United States Patent Application Publication US 2024/0066114 A1 - sequence listing, part 6

SEQ ID NO: 8282 - protein, 1307 aa, Artificial Sequence
  SARS-CoV-2/South Korea/SNU01/2020__EPI_ISL_411929 spike protein (1-1147)(I909C_Y1047C) LumSynth construct
MFVFLVLLPLVSSQCVNLTTRTQLPPAYTNSFTRGVYYPDKVFRSSVLHSTQDLFLPFFSNVTWFHAIHVSGTNGTKRFDNPVLPFNDGVYFASTEKSNIIRGWIFGTTLDSKTQSLLIVNNATNVVIKVCEFQFCNDPFLGVYYHKNNKSWMESEFRVYSSANNCTFEYVSQPFLMDLEGKQGNFKNLREFVFKNIDGYFKIYSKHTPINLVRDLPQGFWALEPLVDLPIGINITRFQTLLALHRSYLTPGDSSSGWTAGAAAYYVGYLQPRTFLLKYNENGTITDAVDCALDPLSETKCTLKSFTVEKGIYQTSNFRVQPTESIVRFPNITNLCPFGEVFNATRFASVYAWNRKRISNCVADYSVLYNSASFSTFKCYGVSPTKLNDLCFTNVYADSFVIRGDEVRQIAPGQTGKIADYNYKLPDDFTGCVIAWNSNNLDSKVGGNYNYLYRLFRKSNLKPFERDISTEIYQAGSTPCNGVEGFNCYFPLQSYGFQPTNGVGYQPYRVVVLSFELLHAPATVCGPKKSTNLVKNKCVNFNFNGLTGTGVLTESNKKFLPFQQFGRDIADTTDAVRDPQTLEILDITPCSFGGVSVITPGTNTSNQVAVLYQDVNCTEVPVAIHADQLTPTWRVYSTGSNVFQTRAGCLIGAEHVNNSYECDIPIGAGICASYQTQTNSPRRARSVASQSIIAYTMSLGAENSVAYSNNSIAIPTNFTISVTTEILPVSMTKTSVDCTMYICGDSTECSNLLLQYGSFCTQLNRALTGIAVEQDKNTQEVFAQVKQIYKTPPIKDFGGFNFSQILPDPSKPSKRSFIEDLLFNKVTLADAGFIKQYGDCLGDIAARDLICAQKFNGLTVLPPLLTDEMIAQYTSALLAGTITSGWTFGAGAALQIPFAMQMAYRFNGCGVTQNVLYENQKLIANQFNSAIGKIQDSLSSTASALGKLQDVVNQNAQALNTLVKQLSSNFGAISSVLNDILSRLDKVEAEVQIDRLITGRLQSLQTYVTQQLIRAAEIRASANLAATKMSECVLGQSKRVDFCGKGCHLMSFPQSAPHGVVFLHVTYVPAQEKNFTTAPAICHDGKAHFPREGVFVSNGTHWFVTQRNFYEPQIITTDNTFVSGNCDVVIGIVNNTVYDPLQPELDSGGGSGGGQIYEGKLTAEGLRFGIVASRFNHALVDRLVEGAIDAIVRHGGREEDITLVRVPGSWEIPVAAGELARKEDIDAVIAIGVLIRGATPHFDYIASEVSKGLADLSLELRKPITFGVITADTLEQAIERAGTKHGNKGWEAALSAIEMANLFKSLR

SEQ ID NO: 8283 - protein, 1307 aa, Artificial Sequence
  SARS-CoV-2/China/WF0004/2020__EPI_ISL_413694 spike protein (1-1147)(I909C_Y1047C) LumSynth construct
MFVFLVLLPLVSSQCVNLTTRTQLPPAYTNSFTRGVYYPDKVFRSSVLHSTQDLFLPFFSNVTWFHAIHVSGTNGTKRFDNPVLPFNDGVYFASTEKSNIIRGWIFGTTLDSKTQSLLIVNNATNVVIKVCEFQFCNDPFLGVYYHKNNKSWTESEFRVYSSANNCTFEYVSQPFLMDLEGKQGNFKNLREFVFKNIDGYFKIYSKHTPINLVRDLPQGFSALEPLVDLPIGINITRFQTLLALHRSYLTPGDSSSGWTAGAAAYYVGYLQPRTFLLKYNENGTITDAVDCALDPLSETKCTLKSFTVEKGIYQTSNFRVQPTESIVRFPNITNLCPFGEVFNATRFASVYAWNRKRISNCVADYSVLYNSASFSTFKCYGVSPTKLNDLCFTNVYADSFVIRGDEVRQIAPGQTGKIADYNYKLPDDFTGCVIAWNSNNLDSKVGGNYNYLYRLFRKSNLKPFERDISTEIYQAGSTPCNGVEGFNCYFPLQSYGFQPTNGVGYQPYRVVVLSFELLHAPATVCGPKKSTNLVKNKCVNFNFNGLTGTGVLTESNKKFLPFQQFGRDIADTTDAVRDPQTLEILDITPCSFGGVSVITPGTNTSNQVAVLYQDVNCTEVPVAIHADQLTPTWRVYSTGSNVFQTRAGCLIGAEHVNNSYECDIPIGAGICASYQTQTNSPRRARSVASQSIIAYTMSLGAENSVAYSNNSIAIPTNFTISVTTEILPVSMTKTSVDCTMYICGDSTECSNLLLQYGSFCTQLNRALTGIAVEQDKNTQEVFAQVKQIYKTPPIKDFGGFNFSQILPDPSKPSKRSFIEDLLFNKVTLADAGFIKQYGDCLGDIAARDLICAQKFNGLTVLPPLLTDEMIAQYTSALLAGTITSGWTFGAGAALQIPFAMQMAYRFNGCGVTQNVLYENQKLIANQFNSAIGKIQDSLSSTASALGKLQDVVNQNAQALNTLVKQLSSNFGAISSVLNDILSRLDKVEAEVQIDRLITGRLQSLQTYVTQQLIRAAEIRASANLAATKMSECVLGQSKRFDFCGKGCHLMSFPQSAPHGVVFLHVTYVPAQEKNFTTAPAICHDGKAHFPREGVFVSNGTHWFVTQRNFYEPQIITTDNTFVSGNCDVVIGIVNNTVYDPLQPELDSGGGSGGGQIYEGKLTAEGLRFGIVASRFNHALVDRLVEGAIDAIVRHGGREEDITLVRVPGSWEIPVAAGELARKEDIDAVIAIGVLIRGATPHFDYIASEVSKGLADLSLELRKPITFGVITADTLEQAIERAGTKHGNKGWEAALSAIEMANLFKSLR

SEQ ID NO: 8284 - protein, 1307 aa, Artificial Sequence
  SARS-CoV-2/China/WF0028/2020__EPI_ISL_413791 spike protein (1-1147)(I909C_Y1047C) LumSynth construct
MFVFLVLLPLVSSQCVNLTTRTQLPPAYTNSFTRGVYYPDKVFRSSVLHSTQDLFLPFFSNVTWFHAIHVSGTNGTKRFDNPVLPFNDGVYFASTEKSNIIRGWIFGTTLDSKTQSLLIVNNATNVVIKVCEFQFCNDPFLGVYYHKNNKSWMESEFRVYSSANNCTFEYVSQPFLMDLEGKQGNFKNLREFVFKNIDGYFKIYSKHTPINLVRDLPQGFSALEPLVDLPIGINITRFQTLLALHRSYLTPGDSSSGWTAGAAAYYVGYLQPRTFLLKYNENGTITDAVDCALDPLSETKCTLKSFTVEKGIYQTSNFRVQPTESIVRFPNITNLCPFGEVFNATRFASVYAWNRKRISNCVADYSVLYNSASFSTFKCYGVSPTKLNDLCFTNVYADSFVIRGDEVRQIAPGQTGKIADYNYKLPDDFTGCVIAWNSNNLDSKVGGNYNYLYRLFRKSNLKPFERDISTEIYQAGSTPCNGVEGFNCYFPLQSYGFQPTNGVGYQPYRVVVLSFELLHAPATVCGPKKSTNLVKNKCVNFNFNGLTGTGVLTESNKKFLPFQQFGRDIADTTDAVRDPQTLEILDITPCSFGGVSVITPGTNTSNQVAVLYQDVNCTEVPVAIHADQLTPTWRVYSTGSNVFQTRAGCLIGAEHVNNSYECDIPIGAGICASYQTQTNSPRRARSVASQSIIAYTMSLGAENSVAYSNNSIAIPTNFTISVTTEILPVSMTKTSVDCTMYICGDSTECSNLLLQYGSFCTQLNRALTGIAVEQDKNTQEVFAQVKQIYKTPPIKDFGGFNFSQILPDPSKPSKRSFIEDLLFNKVTLADAGFIKQYGDCLGDIAARDLICAQKFNGLTVLPPLLTDEMIAQYTSALLAGTITSGWTFGAGAALQIPFAMQMAYRFNGCGVTQNVLYENQKLIANQFNSAIGKIQDSLSSTASALGKLQDVVNQNAQALNTLVKQLSSNFGAISSVLNDILSRLDKVEAEVQIDRLITGRLQSLQTYVTQQLIRAAEIRASANLAATKMSECVLGQSKRVDFCGKGCHLMSFPQSAPHGVVFLHVTYVPAQEKNFTTAPAICHDGKAHFPREGVFVSNGTHWFVTQRNFYEPQIITTDNTFVSGNCDVVIGIVNNTVYDPLQPELESGGGSGGGQIYEGKLTAEGLRFGIVASRFNHALVDRLVEGAIDAIVRHGGREEDITLVRVPGSWEIPVAAGELARKEDIDAVIAIGVLIRGATPHFDYIASEVSKGLADLSLELRKPITFGVITADTLEQAIERAGTKHGNKGWEAALSAIEMANLFKSLR

SEQ ID NO: 8285 - protein, 1307 aa, Artificial Sequence
  SARS-CoV-2/2019-nCoV/USA-CruiseA-18/2020__MT159716.1 spike protein (1-1147)(I909C_Y1047C) LumSynth construct
MFVFLVLLPLVSSQCVNLTTRTQLPPAYTNSFTRGVYYPDKVFRSSVLHSTQDLFLPFFSNVTWFHAIHVSGTNGTKRFDNPVLPFNDGVYFASTEKSNIIRGWIFGTTLDSKTQSLLIVNNATNVVIKVCEFQFCNDPFLGVYYHKNNKSWMESELRVYSSANNCTFEYVSQPFLMDLEGKQGNFKNLREFVFKNIDGYFKIYSKHTPINLVRDLPQGFSALEPLVDLPIGINITRFQTLLALHRSYLTPGDSSSGWTAGAAAYYVGYLQPRTFLLKYNENGTITDAVDCALDPLSETKCTLKSFTVEKGIYQTSNFRVQPTESIVRFPNITNLCPFGEVFNATRFASVYAWNRKRISNCVADYSVLYNSASFSTFKCYGVSPTKLNDLCFTNVYADSFVIRGDEVRQIAPGQTGKIADYNYKLPDDFTGCVIAWNSNNLDSKVGGNYNYLYRLFRKSNLKPFERDISTEIYQAGSTPCNGVEGFNCYFPLQSYGFQPTNGVGYQPYRVVVLSFELLHAPATVCGPKKSTNLVKNKCVNFNFNGLTGTGVLTESNKKFLPFQQFGRDIADTTDAVRDPQTLEILDITPCSFGGVSVITPGTNTSNQVAVLYQDVNCTEVPVAIHADQLTPTWRVYSTGSNVFQTRAGCLIGAEHVNNSYECDIPIGAGICASYQTQTNSPRRARSVASQSIIAYTMSLGAENSVAYSNNSIAIPTNFTISVTTEILPVSMTKTSVDCTMYICGDSTECSNLLLQYGSFCTQLNRALTGIAVEQDKNTQEVFAQVKQIYKTPPIKDFGGFNFSQILPDPSKPSKRSFIEDLLFNKVTLADAGFIKQYGDCLGDIAARDLICAQKFNGLTVLPPLLTDEMIAQYTSALLAGTITSGWTFGAGAALQIPFAMQMAYRFNGCGVTQNVLYENQKLIANQFNSAIGKIQDSLSSTASALGKLQDVVNQNAQALNTLVKQLSSNFGAISSVLNDILSRLDKVEAEVQIDRLITGRLQSLQTYVTQQLIRAAEIRASANLAATKMSECVLGQSKRVDFCGKGCHLMSFPQSAPHGVVFLHVTYVPAQEKNFTTAPAICHDGKAHFPREGVFVSNGTHWFVTQRNFYEPQIITTDNTFVSGNCDVVIGIVNNTVYDPLQPELDSGGGSGGGQIYEGKLTAEGLRFGIVASRFNHALVDRLVEGAIDAIVRHGGREEDITLVRVPGSWEIPVAAGELARKEDIDAVIAIGVLIRGATPHFDYIASEVSKGLADLSLELRKPITFGVITADTLEQAIERAGTKHGNKGWEAALSAIEMANLFKSLR

SEQ ID NO: 8286 - protein, 1307 aa, Artificial Sequence
  SARS-CoV-2/SARS-CoV-2/Yunnan-01/human/2020/CHN__MT049951.1 spike protein (1-1147)(I909C_Y1047C) LumSynth construct
MFVFLVLLPLVSSQCVNLTTRTQLPPANTNSFTRGVYYPDKVFRSSVLHSTQDLFLPFFSNVTWFHAIHVSGTNGTKRFDNPVLPFNDGVYFASTEKSNIIRGWIFGTTLDSKTQSLLIVNNATNVVIKVCEFQFCNDPFLGVYYHKNNKSWMESEFRVYSSANNCTFEYVSQPFLMDLEGKQGNFKNLREFVFKNIDGYFKIYSKHTPINLVRDLPQGFSALEPLVDLPIGINITRFQTLLALHRSYLTPGDSSSGWTAGAAAYYVGYLQPRTFLLKYNENGTITDAVDCALDPLSETKCTLKSFTVEKGIYQTSNFRVQPTESIVRFPNITNLCPFGEVFNATRFASVYAWNRKRISNCVADYSVLYNSASFSTFKCYGVSPTKLNDLCFTNVYADSFVIRGDEVRQIAPGQTGKIADYNYKLPDDFTGCVIAWNSNNLDSKVGGNYNYLYRLFRKSNLKPFERDISTEIYQAGSTPCNGVEGFNCYFPLQSYGFQPTNGVGYQPYRVVVLSFELLHAPATVCGPKKSTNLVKNKCVNFNFNGLTGTGVLTESNKKFLPFQQFGRDIADTTDAVRDPQTLEILDITPCSFGGVSVITPGTNTSNQVAVLYQDVNCTEVPVAIHADQLTPTWRVYSTGSNVFQTRAGCLIGAEHVNNSYECDIPIGAGICASYQTQTNSPRRARSVASQSIIAYTMSLGAENSVAYSNNSIAIPTNFTISVTTEILPVSMTKTSVDCTMYICGDSTECSNLLLQYGSFCTQLNRALTGIAVEQDKNTQEVFAQVKQIYKTPPIKDFGGFNFSQILPDPSKPSKRSFIEDLLFNKVTLADAGFIKQYGDCLGDIAARDLICAQKFNGLTVLPPLLTDEMIAQYTSALLAGTITSGWTFGAGAALQIPFAMQMAYRFNGCGVTQNVLYENQKLIANQFNSAIGKIQDSLSSTASALGKLQDVVNQNAQALNTLVKQLSSNFGAISSVLNDILSRLDKVEAEVQIDRLITGRLQSLQTYVTQQLIRAAEIRASANLAATKMSECVLGQSKRVDFCGKGCHLMSFPQSAPHGVVFLHVTYVPAQEKNFTTAPAICHDGKAHFPREGVFVSNGTHWFVTQRNFYEPQIITTDNTFVSGNCDVVIGIVNNTVYDPLQPELDSGGGSGGGQIYEGKLTAEGLRFGIVASRFNHALVDRLVEGAIDAIVRHGGREEDITLVRVPGSWEIPVAAGELARKEDIDAVIAIGVLIRGATPHFDYIASEVSKGLADLSLELRKPITFGVITADTLEQAIERAGTKHGNKGWEAALSAIEMANLFKSLR

SEQ ID NO: 8287 - protein, 1307 aa, Artificial Sequence
  SARS-CoV-2/USA/WA-UW292/2020__EPI_ISL_418077 spike protein (1-1147)(I909C_Y1047C) LumSynth construct
MFVFLVLLPLVSSQCVNLTTRTQLPPAYTNSFTRGVYYPDKVFRSSVLHSTQDLFLPFFSNVTWFHAIHVSGTNGTKRFDNPVLPFNDGVYFASTEKSNIIRGWIFGTTLDSKTQSLLIVNNATNVVIKVCEFQFCNDPFLGVYYHKNNKSWMESEFRVYSSANNCTFEYVSQPFLMDLEGKQGNFKNLREFVFKNIDGYFKIYSKHTPINLVRDLPQGFSALEPLVDLPIGINITRFQTLLALHRSYLTPGDSSSGWTAGAAAYYVGYLQPRTFLLKYNENGTITDAVDCALDPLSETKCTLKSFTVEKGIYQTSNFRVQPTESIVRFPNITNLCPFGEVFNATRFASVYAWNRKRISNCVADYSVLYNSASFSTFKCYGVSPTKLNDLCFTNVYADSFVIRGDEVRQIAPGQTGKIADYNYKLPDDFTGCVIAWNSNNLDSKVGGNYNYLYRLFRKSNLKPFERDISTEIYQASSTPCNGVEGFNCYFPLQSYGFQPTNGVGYQPYRVVVLSFELLHAPATVCGPKKSTNLVKNKCVNFNFNGLTGTGVLTESNKKFLPFQQFGRDIADTTDAVRDPQTLEILDITPCSFGGVSVITPGTNTSNQVAVLYQDVNCTEVPVAIHADQLTPTWRVYSTGSNVFQTRAGCLIGAEHVNNSYECDIPIGAGICASYQTQTNSPRRARSVASQSIIAYTMSLGAENSVAYSNNSIAIPTNFTISVTTEILPVSMTKTSVDCTMYICGDSTECSNLLLQYGSFCTQLNRALTGIAVEQDKNTQEVFAQVKQIYKTPPIKDFGGFNFSQILPDPSKPSKRSFIEDLLFNKVTLADAGFIKQYGDCLGDIAARDLICAQKFNGLTVLPPLLTDEMIAQYTSALLAGTITSGWTFGAGAALQIPFAMQMAYRFNGCGVTQNVLYENQKLIANQFNSAIGKIQDSLSSTASALGKLQDVVNQNAQALNTLVKQLSSNFGAISSVLNDILSRLDKVEAEVQIDRLITGRLQSLQTYVTQQLIRAAEIRASANLAATKMSECVLGQSKRVDFCGKGCHLMSFPQSAPHGVVFLHVTYVPAQEKNFTTAPAICHDGKAHFPREGVFVSNGTHWFVTQRNFYEPQIITTDNTFVSGNCDVVIGIVNNTVYDPLQPELDSGGGSGGGQIYEGKLTAEGLRFGIVASRFNHALVDRLVEGAIDAIVRHGGREEDITLVRVPGSWEIPVAAGELARKEDIDAVIAIGVLIRGATPHFDYIASEVSKGLADLSLELRKPITFGVITADTLEQAIERAGTKHGNKGWEAALSAIEMANLFKSLR

SEQ ID NO: 8288 - protein, 1307 aa, Artificial Sequence
  SARS-CoV-2/Iceland/192/2020__EPI_ISL_417819 spike protein (1-1147)(I909C_Y1047C) LumSynth construct
MFVFFVLLPLVSSQCVNLTTRTQLPPAYTNSFTRGVYYPDKVFRSSVLHSTQDLFLPFFSNVTWFHAIHVSGTNGTKRFDNPVLPFNDGVYFASTEKSNIIRGWIFGTTLDSKTQSLLIVNNATNVVIKVCEFQFCNDPFLGVYYHKNNKSWMESEFRVYSSANNCTFEYVSQPFLMDLEGKQGNFKNLREFVFKNIDGYFKIYSKHTPINLVRDLPQGFSALEPLVDLPIGINITRFQTLLALHRSYLTPGDSSSGWTAGAAAYYVGYLQPRTFLLKYNENGTITDAVDCALDPLSETKCTLKSFTVEKGIYQTSNFRVQPTESIVRFPNITNLCPFGEVFNATRFASVYAWNRKRISNCVADYSVLYNSASFSTFKCYGVSPTKLNDLCFTNVYADSFVIRGDEVRQIAPGQTGKIADYNYKLPDDFTGCVIAWNSNNLDSKVGGNYNYLYRLFRKSNLKPFERDISTEIYQAGSTPCNGVEGFNCYFPLQSYGFQPTNGVGYQPYRVVVLSFELLHAPATVCGPKKSTNLVKNKCVNFNFNGLTGTGVLTESNKKFLPFQQFGRDIADTTDAVRDPQTLEILDITPCSFGGVSVITPGTNTSNQVAVLYQGVNCTEVPVAIHADQLTPTWRVYSTGSNVFQTRAGCLIGAEHVNNSYECDIPIGAGICASYQTQTNSPRRARSVASQSIIAYTMSLGAENSVAYSNNSIAIPTNFTISVTTEILPVSMTKTSVDCTMYICGDSTECSNLLLQYGSFCTQLNRALTGIAVEQDKNTQEVFAQVKQIYKTPPIKDFGGFNFSQILPDPSKPSKRSFIEDLLFNKVTLADAGFIKQYGDCLGDIAARDLICAQKFNGLTVLPPLLTDEMIAQYTSALLAGTITSGWTFGAGAALQIPFAMQMAYRFNGCGVTQNVLYENQKLIANQFNSAIGKIQDSLSSTASALGKLQDVVNQNAQALNTLVKQLSSNFGAISSVLNDILSRLDKVEAEVQIDRLITGRLQSLQTYVTQQLIRAAEIRASANLAATKMSECVLGQSKRVDFCGKGCHLMSFPQSAPHGVVFLHVTYVPAQEKNFTTAPAICHDGKAHFPREGVFVSNGTHWFVTQRNFYEPQIITTDNTFVSGNCDVVIGIVNNTVYDPLQPELDSGGGSGGGQIYEGKLTAEGLRFGIVASRFNHALVDRLVEGAIDAIVRHGGREEDITLVRVPGSWEIPVAAGELARKEDIDAVIAIGVLIRGATPHFDYIASEVSKGLADLSLELRKPITFGVITADTLEQAIERAGTKHGNKGWEAALSAIEMANLFKSLR

SEQ ID NO: 8289 - protein, 1307 aa, Artificial Sequence
  SARS-CoV-2/Belgium/ULG-6939/2020__EPI_ISL_417020 spike protein (1-1147)(I909C_Y1047C) LumSynth construct
MFVFLVLLPLVSSQCVNLTTRTQLPPAYTNSFTRGVYYPDKVFRSSVLHSTQDLFLPFFSNVTWFHAIHVSGTNGTKRFDNPVLPFNDGVYFASTEKSNIIRGWIFGTTLDSKTQSLLIVNNATNVVIKVCEFQFCNDPFLGVYYHKNNKSWMESEFRVYSSANNCTFEYVSQPFLMDLEGKQGNFKNLREFVFKNIDGYFKIYSKHTPINLVRDLPQGFSALEPLVDLPIGINITRFQTLLALHRSYLTPGDSSSGWTAGAAAYYVGYLQPRTFLLKYNENGTITDAVDCALDPLSETKCTLKSFTVEKGIYQTSNFRVQPTESIVRFPNITNLCPFGEVFNATRFASVYAWNRKRISNCVADYSVLYNSASFSTFKCYGVSPTKLNDLCFTNVYADSFVIRGDEVRQIAPGQTGKIADYNYKLPDDFTGCVIAWNSNNLDSKVGGNYNYLYRLFRKSNLKPFERDISTEIYQAGSTPCNGVEGFNCYFPLQSYGFQPTNGVGYQPYRVVVLSFELLHAPATVCGPKKSTNLVKNKCVNFNFNGLTGTGVLTESNKKFLPFQQFGRDIADTTDAVRDPQTLEILDITPCSFGGVSVITPGTNTSNQVAVLYQGVNCTEVPVAIHADQLTPTWRVYSTGSNVFQTRAGCLIGAEHVNNSYECDIPIGAGICASYQTQTNSPRRARSVASQSIIAYTMSLGAENSVVYSNNSIAIPTNFTISVTTEILPVSMTKTSVDCTMYICGDSTECSNLLLQYGSFCTQLNRALTGIAVEQDKNTQEVFAQVKQIYKTPPIKDFGGFNFSQILPDPSKPSKRSFIEDLLFNKVTLADAGFIKQYGDCLGDIAARDLICAQKFNGLTVLPPLLTDEMIAQYTSALLAGTITSGWTFGAGAALQIPFAMQMAYRFNGCGVTQNVLYENQKLIANQFNSAIGKIQDSLSSTASALGKLQDVVNQNAQALNTLVKQLSSNFGAISSVLNDILSRLDKVEAEVQIDRLITGRLQSLQTYVTQQLIRAAEIRASANLAATKMSECVLGQSKRVDFCGKGCHLMSFPQSAPHGVVFLHVTYVPAQEKNFTTAPAICHDGKAHFPREGVFVSNGTHWFVTQRNFYEPQIITTDNTFVSGNCDVVIGIVNNTVYDPLQPELDSGGGSGGGQIYEGKLTAEGLRFGIVASRFNHALVDRLVEGAIDAIVRHGGREEDITLVRVPGSWEIPVAAGELARKEDIDAVIAIGVLIRGATPHFDYIASEVSKGLADLSLELRKPITFGVITADTLEQAIERAGTKHGNKGWEAALSAIEMANLFKSLR

SEQ ID NO: 8290 - protein, 1307 aa, Artificial Sequence
  SARS-CoV-2/France/HF2496/2020__EPI_ISL_418231 spike protein (1-1147)(I909C_Y1047C) LumSynth construct
MFVFLVLLPLVSSQCVNLTTRTQLPPAYTNSFTRGVYYPDKVFRSSVLHSTQDLFLPFFSNVTWFHAIHVSGTNGTKRFDNPVLPFNDGVYFASTEKSNIIRGWIFGTTLDSKTQSLLIVNNATNVVIKVCEFQFCNDPFLGVYYHKNNKSWMESEFRVYSSANNCTFEYVSQPFLMDLEGKQGNFKNLREFVFKNIDGYFKIYSKHTPINLVRDLPQGFSALEPLVDLPIGINITRFQTLLALHRSYLTPGDSSSGWTAGAAAYYVGYLQPRTFLLKYNENGTITDAVDCALDPLSETKCTLKSFTVEKGIYQTSNFRVQPTESIVRFPNITNLCPFGEVFNATRFASVYAWNRKRISNCVADYSVLYNSASFSTFKCYGVSPTKLNDLCFTNVYADSFVIRGDEVRQIAPGQTGKIADYNYKLPDDFTGCVIAWNSNNLDSKVGGNYNYLYRLFRKSNLKPFERDISTEIYQAGSTPCNGVEGFNCYFPLQSYGFQPTNGVGYQPYRVVVLSFELLHAPATVCGPKKSTNLVKNKCVNFNFNGLTGTGVLTESNKKFLPFQQFGRDIADTTDAVRDPQTLEILDITPCSFGGVSVITPGTNTSNQVAVLYQGVNCTEVPVAIHADQLTPTWRVYSTGSNVFQTRAGCLIGAEHVNNSYECDIPIGAGICASYQTQTNSPRRARSVASQSIIAYTMSLGAENSVAYSNNSIAIPTNFTISVTTEILPVSMTKTSVDCTMYICGDSTECSNLLLQYGSFCTQLNRALTGIAVEQDKNTQEVFAQVKQIYKTPPIKDFGGFNFSQILPDPSKPSKRSFIEDLLFNKVTLADAGFIKQYGDCLGDIVARDLICAQKFNGLTVLPPLLTDEMIAQYTSALLAGTITSGWTFGAGAALQIPFAMQMAYRFNGCGVTQNVLYENQKLIANQFNSAIGKIQDSLSSTASALGKLQDVVNQNAQALNTLVKQLSSNFGAISSVLNDILSRLDKVEAEVQIDRLITGRLQSLQTYVTQQLIRAAEIRASANLAATKMSECVLGQSKRVDFCGKGCHLMSFPQSAPHGVVFLHVTYVPAQEKNFTTAPAICHDGKAHFPREGVFVSNGTHWFVTQRNFYEPQIITTDNTFVSGNCDVVIGIVNNTVYDPLQPELDSGGGSGGGQIYEGKLTAEGLRFGIVASRFNHALVDRLVEGAIDAIVRHGGREEDITLVRVPGSWEIPVAAGELARKEDIDAVIAIGVLIRGATPHFDYIASEVSKGLADLSLELRKPITFGVITADTLEQAIERAGTKHGNKGWEAALSAIEMANLFKSLR

SEQ ID NO: 8291 - protein, 1307 aa, Artificial Sequence
  SARS-CoV-2/USA/WA-UW291/2020__EPI_ISL_418076 spike protein (1-1147)(I909C_Y1047C) LumSynth construct
MFVFLVLLPLVSSQCVNLTTRTQLPPAYTNSFTRGVYYPDKVFRSSVLHSTQDLFLPFFSNVTWFHAIHVSGTNGTKRFDNPVLPFNDGVYFASTEKSNIIRGWIFGTTLDSKTQSLLIVNNATNVVIKVCEFQFCNDPFLGVYYHKNNKSWMESEFRVYSSANNCTFEYVSQPFLMDLEGKQGNFKNLREFVFKNIDGYFKIYSKHTPINLVRDLPQGFSALEPLVDLPIGINITRFQTLLALHRSYLTPGDSSSGWTAGAAAYYVGYLQPRTFLLKYNENGTITDAVDCALDPLSETKCTLKSFTVEKGIYQTSNFRVQPTESIVRFPNITNLCPFGEVFNATRFASVYAWNRKRISNCVADYSVLYNSASFSTFKCYGVSPTKLNDLCFTNVYADSFVIRGDEVRQIAPGQTGKIADYNYKLPDDFTGCVIAWNSNNLDSKVGGNYNYLYRLFRKSNLKPFERDISTEIYQAGSTPCNGVEGFNCYFPLQSYGFQPTNGVGYQPYRVVVLSFELLHAPATVCGPKKSTNLVKNKCVNFNFNGLTGTGVLTESNKKFLPFQQFGRDIADTTDAVRDPQTLEILDITPCSFGGVSVITPGTNTSNQVAVLYQGVNCTEVPVAIHADQLTPTWRVYSTGSNVFQTRAGCLIGAEHVNNSYECDIPIGAGICASYQTQTNSPRRARSVASQSIIAYTMSLGAENSVAYSNNSIAIPTNFTISVTTEILPVSMTKTSVDCTMYICGDSTECSNLLLQYGSFCTQLNRALTGIAVEQDKNTQEVFAQVKQIYKTPPIKDFGGFNFSQILPDPSKPSKRSFIEDLLFNKVTLADAGFIKQYGDCLGDIAARDLICAQKFNGLTVLPPLLTDEMIAQYTSALLAGTITSGWTFGAGAALQIPFAMQMAYRFNGCGVTQNVLYENQKLIANQFNSAIGKIQYSLSSTASALGKLQDVVNQNAQALNTLVKQLSSNFGAISSVLNDILSRLDKVEAEVQIDRLITGRLQSLQTYVTQQLIRAAEIRASANLAATKMSECVLGQSKRVDFCGKGCHLMSFPQSAPHGVVFLHVTYVPAQEKNFTTAPAICHDGKAHFPREGVFVSNGTHWFVTQRNFYEPQIITTDNTFVSGNCDVVIGIVNNTVYDPLQPELDSGGGSGGGQIYEGKLTAEGLRFGIVASRFNHALVDRLVEGAIDAIVRHGGREEDITLVRVPGSWEIPVAAGELARKEDIDAVIAIGVLIRGATPHFDYIASEVSKGLADLSLELRKPITFGVITADTLEQAIERAGTKHGNKGWEAALSAIEMANLFKSLR

SEQ ID NO: 8292 - protein, 1307 aa, Artificial Sequence; identical to SEQ ID NO: 8255
  SARS-CoV-2/Portugal/PT0034/2020__EPI_ISL_418019 spike protein (1-1147)(I909C_Y1047C) LumSynth construct

SEQ ID NO: 8293 - protein, 1307 aa, Artificial Sequence; identical to SEQ ID NO: 8247
  SARS-CoV-2/Iceland/202/2020__EPI_ISL_417750 spike protein (1-1147)(I909C_Y1047C) LumSynth construct

SEQ ID NO: 8294 - protein, 1307 aa, Artificial Sequence
  SARS-CoV-2/USA/WA-UW261/2020__EPI_ISL_418046 spike protein (1-1147)(I909C_Y1047C) LumSynth construct
MFVFLVLLPLVSSQCVNLTTRTQLPPAYTNSFTRGVYYPDKVFRSSVLHSTQDLFLPFFSNVTWFHAIHVSGTNGTKRFDNPVLPFNDGVYFASTEKSNIIRGWIFGTTLDSKTQSLLIVNNATNVVIKVCEFQFCNDPFLGVYYHKNNKSWMESEFRVYSSANNCTFEYVSQPFLMDLEGKQGNFKNLREFVFKNIDGYFKIYSKHTPINLVRDLPQGFSALEPLVDLPIGINITRFQTLLALHRSYLTPGDSSSGWTAGAAAYYVGYLQPRTFLLKYNENGTITDAVDCALDPLSETKCTLKSFTVEKGIYQTSNFRVQPTESIVRFPNITNLCPFGEVFNATRFTSVYAWNRKRISNCVADYSVLYNSASFSTFKCYGVSPTKLNDLCFTNVYADSFVIRGDEVRQIAPGQTGKIADYNYKLPDDFTGCVIAWNSNNLDSKVGGNYNYLYRLFRKSNLKPFERDISTEIYQAGSTPCNGVEGFNCYFPLQSYGFQPTNGVGYQPYRVVVLSFELLHAPATVCGPKKSTNLVKNKCVNFNFNGLTGTGVLTESNKKFLPFQQFGRDIADTTDAVRDPQTLEILDITPCSFGGVSVITPGTNTSNQVAVLYQDVNCTEVPVAIHADQLTPTWRVYSTGSNVFQTRAGCLIGAEHVNNSYECDIPIGAGICASYQTQTNSPRRARSVASQSIIAYTMSLGAENSVAYSNNSIAIPTNFTISVTTEILPVSMTKTSVDCTMYICGDSTECSNLLLQYGSFCTQLNRALTGIAVEQDKNTQEVFAQVKQIYKTPPIKDFGGFNFSQILPDPSKPSKRSFIEDLLFNKVTLADAGFIKQYGDCLGDIAARDLICAQKFNGLTVLPPLLTDEMIAQYTSALLAGTITSGWTFGAGAALQIPFAMQMAYRFNGCGVTQNVLYENQKLIANQFNSAIGKIQDSLSSTASALGKLQDVVNQNAQALNTLVKQLSSNFGAISSVLNDILSRLDKVEAEVQIDRLITGRLQSLQTYVTQQLIRAAEIRASANLAATKMSECVLGQSKRVDFCGKGCHLMSFPQSAPHGVVFLHVTYVPAQEKNFTTAPAICHDGKAHFPREGVFVSNGTHWFVTQRNFYEPQIITTDNTFVSGNCDVVIGIVNNTVYDPLQPELDSGGGSGGGQIYEGKLTAEGLRFGIVASRFNHALVDRLVEGAIDAIVRHGGREEDITLVRVPGSWEIPVAAGELARKEDIDAVIAIGVLIRGATPHFDYIASEVSKGLADLSLELRKPITFGVITADTLEQAIERAGTKHGNKGWEAALSAIEMANLFKSLR

SEQ ID NO: 8295 - protein, 1307 aa, Artificial Sequence
  SARS-CoV-2/Portugal/PT0035/2020__EPI_ISL_418020 spike protein (1-1147)(I909C_Y1047C) LumSynth construct
MFVFLVLLPLVSSQCVNLTTRTQLPPAYTNSFTRGVYYPDKVFRSSVLHSTQDLFLPFFSNVTWFHAIHVSGTNGTKRFDNPVLPFNDGVYFASTEKSNIIRGWIFGTTLDSKTQSLLIVNNATNVVIKVCEFQFCNDPFLGVYYHKNNKSWMESEFRVYSSANNCTFEYVSQPFLMDLEGKQGNFKNLREFVFKNIDGYFKIYSKHTPINLVRDLPQGFSALEPLVDLPIGINITRFQTLLALHRSYLTPGDSSSGWTAGAAAYYVGYLQPRTFLLKYNENGTITDAVDCALDPLSETKCTLKSFTVEKGIYQTSNFRVQPTESIVRFPNITNLCPFGEVFNATRFASVYAWNRKRISNCVADYSVLYNSASFSTFKCYGVSPTKLNDLCFTNVYADSFVIRGDEVRQIAPGQTGKIADYNYKLPDDFTGCVIAWNSNNLDSKVGGNYNYLYRLFRKSNLKPFERDISTEIYQAGSTPCNGVEGFNCYFPLQSYGFQPTNGVGYQPYRVVVLSFELLHAPATVCGPKKSTNLVKNKCVNFNFNGLTGTGVLTESNKKFLPFQQFGRDIADTTDAVRDPQTLEILDITPCSFGGVSVITPGTNTSNQVAVLYQDVNCTEVPVAIHADQLTPTWRVYSTGSNVFQTRAGCLIGAEHVNNSYECDIPIGAGICASYQTQTNSPRRARSVASQSIIAYTMSLGAENSVAYSNNSIAIPTNFTISVTTEILPVSMTKTSVDCTMYICGDSTECSNLLLQYGSFCTQLNRALTGIAVEQDKNTQEVFAQVKQIYKTPPIKDFGGFNFSQILPDPSKPSKRSFIEDLLFNKVTLADAGFIKQYGDCLGDISARDLICAQKFNGLTVLPPLLTDEMIAQYTSALLAGTITSGWTFGAGAALQIPFAMQMAYRFNGCGVTQNVLYENQKLIANQFNSAIGKIQDSLSSTASALGKLQDVVNQNAQALNTLVKQLSSNFGAISSVLNDILSRLDKVEAEVQIDRLITGRLQSLQTYVTQQLIRAAEIRASANLAATKMSECVLGQSKRVDFCGKGCHLMSFPQSAPHGVVFLHVTYVPAQEKNFTTAPAICHDGKAHFPREGVFVSNGTHWFVTQRNFYEPQIITTDNTFVSGNCDVVIGIVNNTVYDPLQPELDSGGGSGGGQIYEGKLTAEGLRFGIVASRFNHALVDRLVEGAIDAIVRHGGREEDITLVRVPGSWEIPVAAGELARKEDIDAVIAIGVLIRGATPHFDYIASEVSKGLADLSLELRKPITFGVITADTLEQAIERAGTKHGNKGWEAALSAIEMANLFKSLR

SEQ ID NO: 8296 - protein, 1307 aa, Artificial Sequence
  SARS-CoV-2/USA/NY-NYUMC7/2020__EPI_ISL_418192 spike protein (1-1147)(I909C_Y1047C) LumSynth construct
MFVFLVLLPLVSSQCVNLTTRTQLPPAYTNSFTRGVYYPDKVFRSSVLHSTQDLFLPFFSNVTWFHAIHVSGTNGTKRFDNPVLPFNDGVYFASTEKSNIIRGWIFGTTLDSKTQSLLIVNNATNVVIKVCEFQFCNDPFLGVYHHKNNKSWMESEFRVYSSANNCTFEYVSQPFLMDLEGKQGNFKNLREFVFKNIDGYFKIYSKHTPINLVRDLPQGFSALEPLVDLPIGINITRFQTLLALHRSYLTPGDSSSGWTAGAAAYYVGYLQPRTFLLKYNENGTITDAVDCALDPLSETKCTLKSFTVEKGIYQTSNFRVQPTESIVRFPNITNLCPFGEVFNATRFASVYAWNRKRISNCVADYSVLYNSASFSTFKCYGVSPTKLNDLCFTNVYADSFVIRGDEVRQIAPGQTGKIADYNYKLPDDFTGCVIAWNSNNLDSKVGGNYNYLYRLFRKSNLKPFERDISTEIYQAGSTPCNGVEGFNCYFPLQSYGFQPTNGVGYQPYRVVVLSFELLHAPATVCGPKKSTNLVKNKCVNFNFNGLTGTGVLTESNKKFLPFQQFGRDIADTTDAVRDPQTLEILDITPCSFGGVSVITPGTNTSNQVAVLYQGVNCTEVPVAIHADQLTPTWRVYSTGSNVFQTRAGCLIGAEHVNNSYECDIPIGAGICASYQTQTNSPRRARSVASQSIIAYTMSLGAENSVAYSNNSIAIPTNFTISVTTEILPVSMTKTSVDCTMYICGDSTECSNLLLQYGSFCTQLNRALTGIAVEQDKNTQEVFAQVKQIYKTPPIKDFGGFNFSQILPDPSKPSKRSFIEDLLFNKVTLADAGFIKQYGDCLGDIAARDLICAQKFNGLTVLPPLLTDEMIAQYTSALLAGTITSGWTFGAGAALQIPFAMQMAYRFNGCGVTQNVLYENQKLIANQFNSAIGKIQDSLSSTASALGKLQDVVNQNAQALNTLVKQLSSNFGAISSVLNDILSRLDKVEAEVQIDRLITGRLQSLQTYVTQQLIRAAEIRASANLAATKMSECVLGQSKRVDFCGKGCHLMSFPQSAPHGVVFLHVTYVPAQEKNFTTAPAICHDGKAHFPREGVFVSNGTHWFVTQRNFYEPQIITTDNTFVSGNCDVVIGIVNNTVYDPLQPELDSGGGSGGGQIYEGKLTAEGLRFGIVASRFNHALVDRLVEGAIDAIVRHGGREEDITLVRVPGSWEIPVAAGELARKEDIDAVIAIGVLIRGATPHFDYIASEVSKGLADLSLELRKPITFGVITADTLEQAIERAGTKHGNKGWEAALSAIEMANLFKSLR

SEQ ID NO: 8297 - protein, 1307 aa, Artificial Sequence
  SARS-CoV-2/Iceland/189/2020__EPI_ISL_417709 spike protein (1-1147)(I909C_Y1047C) LumSynth construct
MFVFLVLLPLVSSQCVNLTTRTQLPPAYTNSFTRGVYYPDKVFRSSVLHSTQDLFLPFFSNVTWFHAIHVSGTNGTKRFDNPVLPFNDGVYFASTEKSNIIRGWIFGTTLDSKTQSLLIVNNATNVVIKVCEFQFCNDPFLGVYYHKNNKSWMESEFRVYSSANNCTFEYVSQPFLMDLEGKQGNFKNLREFVFKNIDGYFKIYSKHTPINLVRDLPQGFSALEPLVDLPIGINITRFQTLLALHRSYLTPGDSSSGWTAGAAAYYVGYLQPRTFLLKYNENGTITDAVDCALDPLSETKCTLKSFTVEKGIYQTSNFRVQPTESIVRFPNITNLCPFGEVFNATRFASVYAWNRKRISNCVADYSVLYNSASFSTFKCYGVSPTKLNDLCFTNVYADSFVIRGDEVRQIAPGQTGKIADYNYKLPDDFTGCVIAWNSNNLDSKVGGNYNYLYRLFRKSNLKPFERDISTEIYQAGSTPCNGVEGFNCYFPLQSYGFQPTNGVGYQPYRVVVLSFELLHAPATVCGPKKSTNLVKNKCVNFNFNGLTGTGVLTESNKKFLPFQQFGRDIADTTDAVRDPQTLEILDITPCSFGGVSVITPGTNTSNQVAVLYQGVNCTEVPVAIHADQLTPTWRVYSTGSNVFQTRAGCLIGAEHVNNSYECDIPIGAGICASYQTQTNSPRRARSVASQSIIAYTMSLGAENSVAYSNNSIAIPTNFTISVTTEILPVSMTKTSVDCTMYICGDSTECSNLLLQYGSFCTQLNRALTGIAVEQDKNTQEVFAQVKQIYKTPPIKDFGGFNFSQILPDPSKPSKRSFIEDLLFNKVTLADAGFTKQYGDCLGDIAARDLICAQKFNGLTVLPPLLTDEMIAQYTSALLAGTITSGWTFGAGAALQIPFAMQMAYRFNGCGVTQNVLYENQKLIANQFNSAIGKIQDSLSSTASALGKLQDVVNQNAQALNTLVKQLSSNFGAISSVLNDILSRLDKVEAEVQIDRLITGRLQSLQTYVTQQLIRAAEIRASANLAATKMSECVLGQSKRVDFCGKGCHLMSFPQSAPHGVVFLHVTYVPAQEKNFTTAPAICHDGKAHFPREGVFVSNGTHWFVTQRNFYEPQIITTDNTFVSGNCDVVIGIVNNTVYDPLQPELDSGGGSGGGQIYEGKLTAEGLRFGIVASRFNHALVDRLVEGAIDAIVRHGGREEDITLVRVPGSWEIPVAAGELARKEDIDAVIAIGVLIRGATPHFDYIASEVSKGLADLSLELRKPITFGVITADTLEQAIERAGTKHGNKGWEAALSAIEMANLFKSLR

SEQ ID NO: 8298 - protein, 1307 aa, Artificial Sequence
  SARS-CoV-2/Australia/NSW56/2020__EPI_ISL_417408 spike protein (1-1147)(I909C_Y1047C) LumSynth construct
MFVFLVLLPLVSSQCVNLTTRTQLPPAYTNSFTRGVYYPDKVFRSSVLHSTQDLFLPFFSNVTWFHAIHVSGTNGTKRFDNPVLPFNDGVYFASTEKSNIIRGWIFGTTLDSKTQSLLIVNNATNVVIKVCEFQFCNDPFLGVYYHKNNKSWMESEFRVYSSANNCTFEYVSQPFLMDLEGKQGNFKNLREFVFKNIDGYFKIYSKHTPINLVRDLPQGFSALEPLVDLPIGINITRFQTLLALHRSYLTPGDSSSGWTAGAAAYYVGYLQPRTFLLKYNENGTITDAVDCALDPLSETKCTLKSFTVEKGIYQTSNFRVQPTESIVRFPNITNLCPFGEVFNATRFASVYAWNRKRISNCVADYSVLYNSASFSTFKCYGVSPTKLNDLCFTNVYADSFVIRGDEVRQIAPGQTGKIADYNYKLPDDFTGCVIAWNSNNLDSKVGGNYNYLYRLFRKSNLKPFERDISTEIYQAGSTPCNGVEGFNCYFPLQSYGFQPTNGVGYQPYRVVVLSFELLHAPATVCGPKKSTNLVKNKCVNFNFNGLTGTGVLTESNKKFLPFQQFGRDIADTTDAVRDPQTLEILDITPCSFGGVSVITPGTNTSNQVAVLYQDVNCTEVPVAIHADQLTPTWRVYSTGSNVFQTRAGCLIGAEHVNNSYECDIPIGAGICASYQTQTNSPRRARSVASQSIIAYTMSLGAENSVAYSNNSIAIPTNFTISVTTEILPVSMTKTSVDCTMYICGDSTECSNLLLQYGSFCTQLNRALTGIAVEQDKNTQEVFAQVKQIYKTPPIKDFGGFNFSQILPDSSKPSKRSFIEDLLFNKVTLADAGFIKQYGDCLGDIAARDLICAQKFNGLTVLPPLLTDEMIAQYTSALLAGTITSGWTFGAGAALQIPFAMQMAYRFNGCGVTQNVLYENQKLIANQFNSAIGKIQDSLSSTASALGKLQDVVNQNAQALNTLVKQLSSNFGAISSVLNDILSRLDKVEAEVQIDRLITGRLQSLQTYVTQQLIRAAEIRASANLAATKMSECVLGQSKRVDFCGKGCHLMSFPQSAPHGVVFLHVTYVPAQEKNFTTAPAICHDGKAHFPREGVFVSNGTHWFVTQRNFYEPQIITTDNTFVSGNCDVVIGIVNNTVYDPLQPELDSGGGSGGGQIYEGKLTAEGLRFGIVASRFNHALVDRLVEGAIDAIVRHGGREEDITLVRVPGSWEIPVAAGELARKEDIDAVIAIGVLIRGATPHFDYIASEVSKGLADLSLELRKPITFGVITADTLEQAIERAGTKHGNKGWEAALSAIEMANLFKSLR

SEQ ID NO: 8299 - protein, 1307 aa, Artificial Sequence
  SARS-CoV-2/Iceland/280/2020__EPI_ISL_417608 spike protein (1-1147)(I909C_Y1047C) LumSynth construct
MFVFLVLLPLVSSQCVNLTTRTQLPPAYTNSFTRGVYYPDKVFRSSVLHSTQDLFLPFFSNVTWFHAIHVSGTNGTKRFDNPVLPFNDGVYFASTEKSNIIRGWIFGTTLDSKTQSLLIVNNATNVVIKVCEFQFCNDPFLGVYYHKNNKSWMESEFRVYSSANNCTFEYVSQPFLMDLEGKQGNFKNLREFVFKNIDGYFKIYSKHTPINLVRDLPQGFSALEPLVDLPIGINITRFQTLLALHRSYLTPGDSSSGWTAGAAAYYVGYLQPRTFLLKYNENGTITDAVDCALDPLSETKCTLKSFTVEKGIYQTSNFRVQPTESIVRFPNITNLCPFGEVFNATRFASVYAWNRKRISNCVADYSVLYNSASFSTFKCYGVSPTKLNDLCFTNVYADSFVIRGDEVRQIAPGQTGKIADYNYKLPDDFTGCVIAWNSNNLDSKVGGNYNYLYRLFRKSNLKPFERDISTEIYQAGSTPCNGVEGFNCYFPLQSYGFQPTNGVGYQPYRVVVLSFELLHAPATVCGPKKSTNLVKNKCVNFNFNGLTGTGVLTESNKKFLPFQQFGRDIADTTDAVRDPQTLEILDITPCSFGGVSVITPGTNTSNQVAVLYQGVNCTEVPVAIHADQLTPTWRVYSTGSNVFQTRAGCLIGAEHVNNSYECDIPIGAGICASYHTQTNSPRRARSVASQSIIAYTMSLGAENSVAYSNNSIAIPTNFTISVTTEILPVSMTKTSVDCTMYICGDSTECSNLLLQYGSFCTQLNRALTGIAVEQDKNTQEVFAQVKQIYKTPPIKDFGGFNFSQILPDPSKPSKRSFIEDLLFNKVTLADAGFIKQYGDCLGDIAARDLICAQKFNGLTVLPPLLTDEMIAQYTSALLAGTITSGWTFGAGAALQIPFAMQMAYRFNGCGVTQNVLYENQKLIANQFNSAIGKIQDSLSSTASALGKLQDVVNQNAQALNTLVKQLSSNFGAISSVLNDILSRLDKVEAEVQIDRLITGRLQSLQTYVTQQLIRAAEIRASANLAATKMSECVLGQSKRVDFCGKGCHLMSFPQSAPHGVVFLHVTYVPAQEKNFTTAPAICHDGKAHFPREGVFVSNGTHWFVTQRNFYEPQIITTDNTFVSGNCDVVIGIVNNTVYDPLQPELDSGGGSGGGQIYEGKLTAEGLRFGIVASRFNHALVDRLVEGAIDAIVRHGGREEDITLVRVPGSWEIPVAAGELARKEDIDAVIAIGVLIRGATPHFDYIASEVSKGLADLSLELRKPITFGVITADTLEQAIERAGTKHGNKGWEAALSAIEMANLFKSLR

SEQ ID NO: 8300 - protein, 1307 aa, Artificial Sequence; identical to SEQ ID NO: 8255
  SARS-CoV-2/Iceland/247/2020__EPI_ISL_417575 spike protein (1-1147)(I909C_Y1047C) LumSynth construct

SEQ ID NO: 8301 - protein, 1307 aa, Artificial Sequence
  SARS-CoV-2/Iceland/238/2020__EPI_ISL_417566 spike protein (1-1147)(I909C_Y1047C) LumSynth construct
MFVFLVLLPLVSSQCVNLTTRTQLPPAYTNSFTRGVYYPDKVFRSSVLHSTQDLFLPFFSNVTWFHAIHVSGTNGTKRFDNPVLPFNDGVYFASTEKSNIIRGWIFGTTLDSKTQSLLIVNNATNVVIKVCEFQFCNDPFLGVYYHKNNKSWMESEFRVYSSANNCTFEYVSQPFLMDLEGKQGNFKNLREFVFKNIDGYFKIYSKHTPINLVRDLPQGFSALEPLVDLPIGINITRFQTLLALHRSYLTPGDSSSGWTAGAAAYYVGYLQPRTFLLKYNENGTITDAVDCALDPLSETKCTLKSFTVEKGIYQTSNFRVQPTESIVRFPNITNLCPFGEVFNATRFASVYAWNRKRISNCVADYSVLYNSASFSTFKCYGVSPTKLNDLCFTNVYADSFVIRGDEVRQIAPGQTGKIADYNYKLPDDFTGCVIAWNSNNLDSKVGGNYNYLYRLFRKSNLKPFERDISTEIYQAGSTPCNGVEGFNCYFPLQSYGFQPTNGVGYQPYRVVVLSFELLHAPATVCGPKKSTNLVKNKCVNFNFNGLTGTGVLTESNKKFLPFQQFGRDIADTTDAVRDPQTLEILDITPCSFGGVSVITPGTNTSNQVAVLYQGVNCTEVPVAIHADQLTPTWRVYSTGSNVFQTRAGCLIGAEHVNNSYECDIPIGAGICASYQTQTNSPRRARSVASQSIIAYTMSLGAENSVAYSNNSIAIPTNFTISVTTEILPVSMTKTSVDCTMYICGDSTECSNLLLQYGSFCTQLNRALTGIAVEQDKNTQEVFAQVKQIYKTPPIKDFGGFNFSQILPDPSKPSKRSFIEDLLFNKVTLADVGFIKQYGDCLGDIAARDLICAQKFNGLTVLPPLLTDEMIAQYTSALLAGTITSGWTFGAGAALQIPFAMQMAYRFNGCGVTQNVLYENQKLIANQFNSAIGKIQDSLSSTASALGKLQDVVNQNAQALNTLVKQLSSNFGAISSVLNDILSRLDKVEAEVQIDRLITGRLQSLQTYVTQQLIRAAEIRASANLAATKMSECVLGQSKRVDFCGKGCHLMSFPQSAPHGVVFLHVTYVPAQEKNFTTAPAICHDGKAHFPREGVFVSNGTHWFVTQRNFYEPQIITTDNTFVSGNCDVVIGIVNNTVYDPLQPELDSGGGSGGGQIYEGKLTAEGLRFGIVASRFNHALVDRLVEGAIDAIVRHGGREEDITLVRVPGSWEIPVAAGELARKEDIDAVIAIGVLIRGATPHFDYIASEVSKGLADLSLELRKPITFGVITADTLEQAIERAGTKHGNKGWEAALSAIEMANLFKSLR

SEQ ID NO: 8302 - protein, 1307 aa, Artificial Sequence
  SARS-CoV-2/Greece/16/2020__EPI_ISL_418265 spike protein (1-1147)(I909C_Y1047C) LumSynth construct
MFVFLVLLPLVSSQCVNLTTRTQLPPAYTNSFTRGVYYPDKVFRSSVLHSTQDLFLPFFSNVTWFHAIHVSGTNGTKRFDNPVLPFNDGVYFASTEKSNIIRGWIFGTTLDSKTQSLLIVNNATNVVIKVCEFQFCNDPFLGVYYHKNNKSWMESEFRVYSSANNCTFEYVSQPFLMDLEGKQGNFKNLREFVFKNVDGYFKIYSKHTPINLVRDLPQGFSALEPLVDLPIGINITRFQTLLALHRSYLTPGDSSSGWTAGAAAYYVGYLQPRTFLLKYNENGTITDAVDCALDPLSETKCTLKSFTVEKGIYQTSNFRVQPTESIVRFPNITNLCPFGEVFNATRFASVYAWNRKRISNCVADYSVLYNSASFSTFKCYGVSPTKLNDLCFTNVYADSFVIRGDEVRQIAPGQTGKIADYNYKLPDDFTGCVIAWNSNNLDSKVGGNYNYLYRLFRKSNLKPFERDISTEIYQAGSTPCNGVEGFNCYFPLQSYGFQPTNGVGYQPYRVVVLSFELLHAPATVCGPKKSTNLVKNKCVNFNFNGLTGTGVLTESNKKFLPFQQFGRDIADTTDAVRDPQTLEILDITPCSFGGVSVITPGTNTSNQVAVLYQDVNCTEVPVAIHADQLTPTWRVYSTGSNVFQTRAGCLIGAEHVNNSYECDIPIGAGICASYQTQTNSPRRARSVASQSIIAYTMSLGAENSVAYSNNSIAIPTNFTISVTTEILPVSMTKTSVDCTMYICGDSTECSNLLLQYGSFCTQLNRALTGIAVEQDKNTQEVFAQVKQIYKTPPIKDFGGFNFSQILPDPSKPSKRSFIEDLLFNKVTLADAGFIKQYGDCLGDIAARDLICAQKFNGLTVLPPLLTDEMIAQYTSALLAGTITSGWTFGAGAALQIPFAMQMAYRFNGCGVTQNVLYENQKLIANQFNSAIGKIQDSLSSTASALGKLQDVVNQNAQALNTLVKQLSSNFGAISSVLNDILSRLDKVEAEVQIDRLITGRLQSLQTYVTQQLIRAAEIRASANLAATKMSECVLGQSKRVDFCGKGCHLMSFPQSAPHGVVFLHVTYVPAQEKNFTTAPAICHDGKAHFPREGVFVSNGTHWFVTQRNFYEPQIITTDNTFVSGNCDVVIGIVNNTVYDPLQPELDSGGGSGGGQIYEGKLTAEGLRFGIVASRFNHALVDRLVEGAIDAIVRHGGREEDITLVRVPGSWEIPVAAGELARKEDIDAVIAIGVLIRGATPHFDYIASEVSKGLADLSLELRKPITFGVITADTLEQAIERAGTKHGNKGWEAALSAIEMANLFKSLR

SEQ ID NO: 8303 - protein, 1307 aa, Artificial Sequence
  SARS-CoV-2/Iceland/319/2020__EPI_ISL_417648 spike protein (1-1147)(I909C_Y1047C) LumSynth construct
MFVFLVLLPLVSSQCVNLTTRTQLPPAYTNSFTRGVYYPDKVFRSSVLHSTQDLFLPFFSNVTWFHAIHVSGTNGTKRFDNPVLPFNDGVYFASTEKSNIIRGWIFGTTLDSKTQSLLIVNNATNVVIKVCEFQFCNDPFLGVYYHKNNKSWMESEFRVYSSANNCTFEYVSQPFLIDLEGKQGNFKNLREFVFKNIDGYFKIYSKHTPINLVRDLPQGFSALEPLVDLPIGINITRFQTLLALHRSYLTPGDSSSGWTAGAAAYYVGYLQPRTFLLKYNENGTITDAVDCALDPLSETKCTLKSFTVEKGIYQTSNFRVQPTESIVRFPNITNLCPFGEVFNATRFASVYAWNRKRISNCVADYSVLYNSASFSTFKCYGVSPTKLNDLCFTNVYADSFVIRGDEVRQIAPGQTGKIADYNYKLPDDFTGCVIAWNSNNLDSKVGGNYNYLYRLFRKSNLKPFERDISTEIYQAGSTPCNGVEGFNCYFPLQSYGFQPTNGVGYQPYRVVVLSFELLHAPATVCGPKKSTNLVKNKCVNFNFNGLTGTGVLTESNKKFLPFQQFGRDIADTTDAVRDPQTLEILDITPCSFGGVSVITPGTNTSNQVAVLYQGVNCTEVPVAIHADQLTPTWRVYSTGSNVFQTRAGCLIGAEHVNNSYECDIPIGAGICASYQTQTNSPRRARSVASQSIIAYTMSLGAENSVAYSNNSIAIPTNFTISVTTEILPVSMTKTSVDCTMYICGDSTECSNLLLQYGSFCTQLNRALTGIAVEQDKNTQEVFAQVKQIYKTPPIKDFGGFNFSQILPDPSKPSKRSFIEDLLFNKVTLADAGFIKQYGDCLGDIAARDLICAQKFNGLTVLPPLLTDEMIAQYTSALLAGTITSGWTFGAGAALQIPFAMQMAYRFNGCGVTQNVLYENQKLIANQFNSAIGKIQDSLSSTASALGKLQDVVNQNAQALNTLVKQLSSNFGAISSVLNDILSRLDKVEAEVQIDRLITGRLQSLQTYVTQQLIRAAEIRASANLAATKMSECVLGQSKRVDFCGKGCHLMSFPQSAPHGVVFLHVTYVPAQEKNFTTAPAICHDGKAHFPREGVFVSNGTHWFVTQRNFYEPQIITTDNTFVSGNCDVVIGIVNNTVYDPLQPELDSGGGSGGGQIYEGKLTAEGLRFGIVASRFNHALVDRLVEGAIDAIVRHGGREEDITLVRVPGSWEIPVAAGELARKEDIDAVIAIGVLIRGATPHFDYIASEVSKGLADLSLELRKPITFGVITADTLEQAIERAGTKHGNKGWEAALSAIEMANLFKSLR

SEQ ID NO: 8304 - protein, 1307 aa, Artificial Sequence
  SARS-CoV-2/Congo/94/2020__EPI_ISL_417947 spike protein (1-1147)(I909C_Y1047C) LumSynth construct
MFVFLVLLPLVSSQCVNLTTRTQLPPAYTNSFTRGVYYPDKVFRSSVLHSTQDLFLPFFSNVTWFHAIHVSGTNGTKRFDNPVLPFNDGVYFASTEKSNIIRGWIFGTTLDSKTQSLLIVNNATNVVIKVCEFQFCNDPFLGVYYHKNNKSWMESEFRVYSSANNCTFEYVSQPFLMDLEGKQGNFKNLREFVFKNIDGYFKIYSKHTPINLVRDLPQGFSALEPLVDLPIGINITRFQTLLALHRSYLTPGDSSSGWTAGAAAYYVGYLQPRTFLLKYNENGTITDAVDCALDPLSETKCTLKSFTVEKGIYQTSNFRVQPTESIVRFPNITNLCPFGEVFNATRFASVYAWNRKRISNCVADYSVLYNSASFSTFKCYGVSPTKLNDLCFTNVYADSFVIRGDEVRQIAPGQTGKIADYNYKLPDDFTGCVIAWNSNNLDSKVGGNYNYLYRLFRKSNLKPFERDISTEIYQAGSTPCNGVEGFNCYFPLQSYGFQPTNGVGYQPYRVVVLSFELLHAPATVCGPKKSTNLVKNKCVNFNFNGLTGTGVLTESNKKFLPFQQFGRDIADTTDAVRDPQTLEILDITPCSFGGVSVITPGTNTSNQVAVLYQGVNCTEVPVAIHADQLTPTWRVYSTGSNVFQTRAGCLIGAEHVNNSYECDIPIGAGICASYQTQTNSPRRARSVASQSIIAYTMSLGAENSVAYSNNSIAIPTNFTISVTTEILPVSMTKTSVDCTMYICGDSTECSNLLLQYGSFCTQLNRALTGIAVEQDKNTQEVFAQVKQIYKTPPIKDFGGFNFSQILPDPSKPSKRSFIEDILFNKVTLADAGFIKQYGDCLGDIAARDLICAQKFNGLTVLPPLLTDEMIAQYTSALLAGTITSGWTFGAGAALQIPFAMQMAYRFNGCGVTQNVLYENQKLIANQFNSAIGKIQDSLSSTASALGKLQDVVNQNAQALNTLVKQLSSNFGAISSVLNDILSRLDKVEAEVQIDRLITGRLQSLQTYVTQQLIRAAEIRASANLAATKMSECVLGQSKRVDFCGKGCHLMSFPQSAPHGVVFLHVTYVPAQEKNFTTAPAICHDGKAHFPREGVFVSNGTHWFVTQRNFYEPQIITTDNTFVSGNCDVVIGIVNNTVYDPLQPELDSGGGSGGGQIYEGKLTAEGLRFGIVASRFNHALVDRLVEGAIDAIVRHGGREEDITLVRVPGSWEIPVAAGELARKEDIDAVIAIGVLIRGATPHFDYIASEVSKGLADLSLELRKPITFGVITADTLEQAIERAGTKHGNKGWEAALSAIEMANLFKSLR

SEQ ID NO: 8305 - protein, 1307 aa, Artificial Sequence
  SARS-CoV-2/Congo/158/2020__EPI_ISL_417950 spike protein (1-1147)(I909C_Y1047C) LumSynth construct
MFVFLVLLPLVSSQCVNLTTRTQLPPAYTNSFTRGVYYPDKVFRSSVLHSTQDLFLPFFSNVTWFHAIHVSGTNGTKRFDNPVLPFNDGVYFASTEKSNIIRGWIFGTTLDSKTQSLLIVNNATNVVIKVCEFQFCNDPFLGVYYHKNNKSWMESEFRVYSSANNCTFEYVSQPFLMDLEGKQGNFKNLREFVFKNIDGYFKIYSKHTPINLVRDLPQGFSALEPLVDLPIGINITRFQTLLALHRSYLTPGDSSSGWTAGAAAYYVGYLQPRTFLLKYNENGTITDAVDCALDPLSETKCTLKSFTVEKGIYQTSNFRVQPTESIVRFPNITNLCPFGEVFNATRFASVYAWNRKRISNCVADYSVLYNSASFSTFKCYGVSPTKLNDLCFTNVYADSFVIRGDEVRQIAPGQTGKIADYNYKLPDDFTGCVIAWNSNNLDSKVGGNYNYLYRLFRKSNLKPFERDISTEIYQAGSTPCNGVEGFNCYFPLQSYGFQPTNGVGYQPYRVVVLSFELLHAPATVCGPKKSTNLVKNKCVNFNFNGLTGTGVLTESNKKFLPFQQFGRDIADTTDAVRDPQTLEILDITPCSFGGVSVITPGTNTSNQVAVLYQDVNCTEVPVAIHADQLTPTWRVYSTGSNVFQTRAGCLIGAEHVNNSYECDIPIGAGICASYQTQTNSPRRARSVASQSIIAYTMSLGAENSVAYSNNSIAIPTNFTISVTTEILPVSMTKTSVDCTMYICGDSTECSNLLLQYGSFCTQLNRALTGIAVEQDKNTQEVFAQVKQIYKTPPIKDFGGFNFSQILPDPSKPSKRSFIEDLLFNKVTLADAGFIKQYGDCLGDIAARDLICAQKFNGLTVLPPLLTDEMIAQYTSALLAGTITSGWTFGAGAALQIPFAMQMAYRFNGCGVTQNVLYENQKLIANQFNSAIGKIQDSLSSTASALGKLQDVVNQNAQALNTLVKQLSSNFGAISSVLNDILSRLDKVEAEVQIDRLITGRLQSLQTYVTQQLIRAAEIRASANLAATKMSECVLGQSKRVDFCGKGCHLMSFPQSAPHGVVFLHVTYVPAQEKNFTTAPAICHDGKAHFPREGVFVSNGTHWFVTQRNFYEPQIITTDNTFLSGNCDVVIGIVNNTVYDPLQPELDSGGGSGGGQIYEGKLTAEGLRFGIVASRFNHALVDRLVEGAIDAIVRHGGREEDITLVRVPGSWEIPVAAGELARKEDIDAVIAIGVLIRGATPHFDYIASEVSKGLADLSLELRKPITFGVITADTLEQAIERAGTKHGNKGWEAALSAIEMANLFKSLR

SEQ ID NO: 8306 - protein, 1307 aa, Artificial Sequence
  SARS-CoV-2/USA/UT-00034/2020__EPI_ISL_417977 spike protein (1-1147)(I909C_Y1047C) LumSynth construct
MFVFLVLLPLVSSQCVNLTTRTQLPPAYTNSFTRGVYYPDKVFRSSVLHSTQDLFLPFFSNVTWFHAIHVSGTNGTKRFDNPVLPFNDGVYFASTEKSNIIRGWIFGTTLDSKTQSLLIVNNATNVVIKVCEFQFCNDPFLGVYYYKNNKSWMESEFRVYSSANNCTFEYVSQPFLMDLEGKQGNFKNLREFVFKNIDGYFKIYSKHTPINLVRDLPQGFSALEPLVDLPIGINITRFQTLLALHRSYLTPGDSSSGWTAGAAAYYVGYLQPRTFLLKYNENGTITDAVDCALDPLSETKCTLKSFTVEKGIYQTSNFRVQPTESIVRFPNITNLCPFGEVFNATRFASVYAWNRKRISNCVADYSVLYNSASFSTFKCYGVSPTKLNDLCFTNVYADSFVIRGDEVRQIAPGQTGKIADYNYKLPDDFTGCVIAWNSNNLDSKVGGNYNYLYRLFRKSNLKPFERDISTEIYQAGSTPCNGVEGFNCYFPLQSYGFQPTNGVGYQPYRVVVLSFELLHAPATVCGPKKSTNLVKNKCVNFNFNGLTGTGVLTESNKKFLPFQQFGRDIADTTDAVRDPQTLEILDITPCSFGGVSVITPGTNTSNQVAVLYQGVNCTEVPVAIHADQLTPTWRVYSTGSNVFQTRAGCLIGAEHVNNSYECDIPIGAGICASYQTQTNSPRRARSVASQSIIAYTMSLGAENSVAYSNNSIAIPTNFTISVTTEILPVSMTKTSVDCTMYICGDSTECSNLLLQYGSFCTQLNRALTGIAVEQDKNTQEVFAQVKQIYKTPPIKDFGGFNFSQILPDPSKPSKRSFIEDLLFNKVTLADAGFIKQYGDCLGDIAARDLICAQKFNGLTVLPPLLTDEMIAQYTSALLAGTITSGWTFGAGAALQIPFAMQMAYRFNGCGVTQNVLYENQKLIANQFNSAIGKIQDSLSSTASALGKLQDVVNQNAQALNTLVKQLSSNFGAISSVLNDILSRLDKVEAEVQIDRLITGRLQSLQTYVTQQLIRAAEIRASANLAATKMSECVLGQSKRVDFCGKGCHLMSFPQSAPHGVVFLHVTYVPAQEKNFTTAPAICHDGKAHFPREGVFVSNGTHWFVTQRNFYEPQIITTDNTFVSGNCDVVIGIVNNTVYDPLQPELDSGGGSGGGQIYEGKLTAEGLRFGIVASRFNHALVDRLVEGAIDAIVRHGGREEDITLVRVPGSWEIPVAAGELARKEDIDAVIAIGVLIRGATPHFDYIASEVSKGLADLSLELRKPITFGVITADTLEQAIERAGTKHGNKGWEAALSAIEMANLFKSLR

SEQ ID NO: 8307 - protein, 1307 aa, Artificial Sequence
  SARS-CoV-2/USA/UT-00033/2020__EPI_ISL_417976 spike protein (1-1147)(I909C_Y1047C) LumSynth construct
MFVFLVLLPLVSSQCVNLTTRTQLPPAYTNSFTRGVYYPDKVFRSSVLHSTQDLFLPFFSNVTWFHAIHVSGTNGTKRFDNPVLPFNDGVYFASTEKSNIIRGWIFGTTLDSKTQSLLIVNNATNVVIKVCEFQFCNDPFLGVYYHKNNKSWMESEFRVYSSANNCTFEYVSQPFLMDLEGKQGNFKNLREFVFKNIDGYFKIYSKHTPINLVRDLPQGFSALEPLVDLPIGINITRFQTLLALHRSYLTPGDSSSGLTAGAAAYYVGYLQPRTFLLKYNENGTITDAVDCALDPLSETKCTLKSFTVEKGIYQTSNFRVQPTESIVRFPNITNLCPFGEVFNATRFASVYAWNRKRISNCVADYSVLYNSASFSTFKCYGVSPTKLNDLCFTNVYADSFVIRGDEVRQIAPGQTGKIADYNYKLPDDFTGCVIAWNSNNLDSKVGGNYNYLYRLFRKSNLKPFERDISTEIYQAGSTPCNGVEGFNCYFPLQSYGFQPTNGVGYQPYRVVVLSFELLHAPATVCGPKKSTNLVKNKCVNFNFNGLTGTGVLTESNKKFLPFQQFGRDIADTTDAVRDPQTLEILDITPCSFGGVSVITPGTNTSNQVAVLYQGVNCTEVPVAIHADQLTPTWRVYSTGSNVFQTRAGCLIGAEHVNNSYECDIPIGAGICASYQTQTNSPRRARSVASQSIIAYTMSLGAENSVAYSNNSIAIPTNFTISVTTEILPVSMTKTSVDCTMYICGDSTECSNLLLQYGSFCTQLNRALTGIAVEQDKNTQEVFAQVKQIYKTPPIKDFGGFNFSQILPDPSKPSKRSFIEDLLFNKVTLADAGFIKQYGDCLGDIAARDLICAQKFNGLTVLPPLLTDEMIAQYTSALLAGTITSGWTFGAGAALQIPFAMQMAYRFNGCGVTQNVLYENQKLIANQFNSAIGKIQDSLSSTASALGKLQDVVNQNAQALNTLVKQLSSNFGAISSVLNDILSRLDKVEAEVQIDRLITGRLQSLQTYVTQQLIRAAEIRASANLAATKMSECVLGQSKRVDFCGKGCHLMSFPQSAPHGVVFLHVTYVPAQEKNFTTAPAICHDGKAHFPREGVFVSNGTHWFVTQRNFYEPQIITTDNTFVSGNCDVVIGIVNNTVYDPLQPELDSGGGSGGGQIYEGKLTAEGLRFGIVASRFNHALVDRLVEGAIDAIVRHGGREEDITLVRVPGSWEIPVAAGELARKEDIDAVIAIGVLIRGATPHFDYIASEVSKGLADLSLELRKPITFGVITADTLEQAIERAGTKHGNKGWEAALSAIEMANLFKSLR

SEQ ID NO: 8308 - protein, 1307 aa, Artificial Sequence
  SARS-CoV-2/USA/WI-13/2020__EPI_ISL_417516 spike protein (1-1147)(I909C_Y1047C) LumSynth construct
MFVFLVLLPLVSSQCVNLTTRTQLPPAYTNSFTRGVYYPDKVFRSSVLHSTQDLFLPFFSNVTWFHAIHVSGTNGTKRFDNPVLPFNDGVYFASTEKSNIIRGWIFGTTLDSKTQSLLIVNNATNVVIKVCEFQFCNDPFLGVYYHKNNKSWMESEFRVYSSANNCTFEYVSQPFLMDLEGKQGNFKNLREFVFKNIDGYFKIYSKHTPINLVRDLPQGFSALEPLVDLPIGINITRFQTLLALHRSYLTPGDSSSGWTAGAAAYYVGYLQPRTFLLKYNENGTITDAVDCALDPLSETKCTLKSFTVEKGIYQTSNFRVLPTESIVRFPNITNLCPFGEVFNATRFASVYAWNRKRISNCVADYSVLYNSASFSTFKCYGVSPTKLNDLCFTNVYADSFVIRGDEVRQIAPGQTGKIADYNYKLPDDFTGCVIAWNSNNLDSKVGGNYNYLYRLFRKSNLKPFERDISTEIYQAGSTPCNGVEGFNCYFPLQSYGFQPTNGVGYQPYRVVVLSFELLHAPATVCGPKKSTNLVKNKCVNFNFNGLTGTGVLTESNKKFLPFQQFGRDIADTTDAVRDPQTLEILDITPCSFGGVSVITPGTNTSNQVAVLYQGVNCTEVPVAIHADQLTPTWRVYSTGSNVFQTRAGCLIGAEHVNNSYECDIPIGAGICASYQTQTNSPRRARSVASQSIIAYTMSLGAENSVAYSNNSIAIPTNFTISVTTEILPVSMTKTSVDCTMYICGDSTECSNLLLQYGSFCTQLNRALTGIAVEQDKNTQEVFAQVKQIYKTPPIKDFGGFNFSQILPDPSKPSKRSFIEDLLFNKVTLADAGFIKQYGDCLGDIAARDLICAQKFNGLTVLPPLLTDEMIAQYTSALLAGTITSGWTFGAGAALQIPFAMQMAYRFNGCGVTQNVLYENQKLIANQFNSAIGKIQDSLSSTASALGKLQDVVNQNAQALNTLVKQLSSNFGAISSVLNDILSRLDKVEAEVQIDRLITGRLQSLQTYVTQQLIRAAEIRASANLAATKMSECVLGQSKRVDFCGKGCHLMSFPQSAPHGVVFLHVTYVPAQEKNFTTAPAICHDGKAHFPREGVFVSNGTHWFVTQRNFYEPQIITTDNTFVSGNCDVVIGIVNNTVYDPLQPELDSGGGSGGGQIYEGKLTAEGLRFGIVASRFNHALVDRLVEGAIDAIVRHGGREEDITLVRVPGSWEIPVAAGELARKEDIDAVIAIGVLIRGATPHFDYIASEVSKGLADLSLELRKPITFGVITADTLEQAIERAGTKHGNKGWEAALSAIEMANLFKSLR

SEQ ID NO: 8309 - protein, 1306 aa, Artificial Sequence
  SARS-CoV-2/India/1-27/2020__EPI_ISL_413522 spike protein (1-1146)(I908C_Y1046C) LumSynth construct
MFVFLVLLPLVSSQCVNLTTRTQLPPAYTNSFTRGVYYPDKVFRSSVLHSTQDLFLPFFSNVTWFHAIHVSGTNGTKRFDNPVLPFNDGVYFASTEKSNIIRGWIFGTTLDSKTQSLLIVNNATNVVIKVCEFQFCNDPFLGVYHKNNKSWMESEFRVYSSANNCTFEYVSQPFLMDLEGKQGNFKNLREFVFKNIDGYFKIYSKHTPINLVRDLPQGFSALEPLVDLPIGINITRFQTLLALHRSYLTPGDSSSGWTAGAAAYYVGYLQPRTFLLKYNENGTITDAVDCALDPLSETKCTLKSFTVEKGIYQTSNFRVQPTESIVRFPNITNLCPFGEVFNATRFASVYAWNRKRISNCVADYSVLYNSASFSTFKCYGVSPTKLNDLCFTNVYADSFVIRGDEVIQIAPGQTGKIADYNYKLPDDFTGCVIAWNSNNLDSKVGGNYNYLYRLFRKSNLKPFERDISTEIYQAGSTPCNGVEGFNCYFPLQSYGFQPTNGVGYQPYRVVVLSFELLHAPATVCGPKKSTNLVKNKCVNFNFNGLTGTGVLTESNKKFLPFQQFGRDIADTTDAVRDPQTLEILDITPCSFGGVSVITPGTNTSNQVAVLYQDVNCTEVPVAIHADQLTPTWRVYSTGSNVFQTRAGCLIGAEHVNNSYECDIPIGAGICASYQTQTNSPRRARSVASQSIIAYTMSLGAENSVAYSNNSIAIPTNFTISVTTEILPVSMTKTSVDCTMYICGDSTECSNLLLQYGSFCTQLNRALTGIAVEQDKNTQEVFAQVKQIYKTPPIKDFGGFNFSQILPDPSKPSKRSFIEDLLFNKVTLADAGFIKQYGDCLGDIAARDLICAQKFNGLTVLPPLLTDEMIAQYTSALLAGTITSGWTFGAGAALQIPFAMQMAYRFNGCGVTQNVLYENQKLIANQFNSAIGKIQDSLSSTASALGKLQDVVNQNAQALNTLVKQLSSNFGAISSVLNDILSRLDKVEAEVQIDRLITGRLQSLQTYVTQQLIRAAEIRASANLAATKMSECVLGQSKRVDFCGKGCHLMSFPQSAPHGVVFLHVTYVPAQEKNFTTAPAICHDGKAHFPREGVFVSNGTHWFVTQRNFYEPQIITTDNTFVSGNCDVVIGIVNNTVYDPLQPELDSGGGSGGGQIYEGKLTAEGLRFGIVASRFNHALVDRLVEGAIDAIVRHGGREEDITLVRVPGSWEIPVAAGELARKEDIDAVIAIGVLIRGATPHFDYIASEVSKGLADLSLELRKPITFGVITADTLEQAIERAGTKHGNKGWEAALSAIEMANLFKSLR

SEQ ID NO: 8310 - protein, 1301 aa, Artificial Sequence
  SARS-CoV-2/pangolin/Guangxi/P4L/2017__EPI_ISL_410538 spike protein (1-1141)(I903C_Y1041C) LumSynth construct
MFVFLFVLPLVSSQCVNLTTRTGIPPGYTNSSTRGVYYPDKVFRSSILHLTQDLFLPFFSNVTWFNTINYQGGFKKFDNPVLPFNDGVYFASTEKSNIIRGWIFGTTLDARTQSLLIVNNATNVVIKVCEFQFCTDPFLGVYYHNNNKTWVENEFRVYSSANNCTFEYISQPFLMDLEGKQGNFKNLREFVFKNVDGYFKIYSKHTPIDLVRDLPRGFAALEPLVDLPIGINITRFQTLLALHRSYLTPGNLESGWTTGAAAYYVGYLQQRTFLLSYNQNGTITDAVDCSLDPLSETKCTLKSLTVEKGIYQTSNFRVQPTISIVRFPNITNLCPFGEVFNASKFASVYAWNRKRISNCVADYSVLYNSTSFSTFKCYGVSPTKLNDLCFTNVYADSFVVKGDEVRQIAPGQTGVIADYNYKLPDDFTGCVIAWNSVKQDALTGGNYGYLYRLFRKSKLKPFERDISTEIYQAGSTPCNGQVGLNCYYPLERYGFHPTTGVNYQPFRVVVLSFELLNGPATVCGPKLSTTLVKDKCVNFNFNGLTGTGVLTTSKKQFLPFQQFGRDISDTTDAVRDPQTLEILDITPCSFGGVSVITPGTNTSNQVAVLYQDVNCTEVPMAIHAEQLTPAWRVYSAGANVFQTRAGCLVGAEHVNNSYECDIPVGAGICASYHSMSSLRSVNQRSIIAYTMSLGAENSVAYSNNSIAIPTNFTISVTTEILPVSMTKTSVDCTMYICGDSIECSNLLLQYGSFCTQLNRALTGIAVEQDKNTQEVFAQVKQIYKTPPIKDFGGFNFSQILPDPSKPSKRSFIEDLLFNKVTLADAGFIKQYGDCLGDIAARDLICAQKFNGLTVLPPLLTDEMIAQYTSALLAGTITSGWTFGAGAALQIPFAMQMAYRFNGCGVTQNVLYENQKLIANQFNSAIGKIQDSLSSTASALGKLQDVVNQNAQALNTLVKQLSSNFGAISSVLNDILSRLDKVEAEVQIDRLITGRLQSLQTYVTQQLIRAAEIRASANLAATKMSECVLGQSKRVDFCGKGCHLMSFPQSAPHGVVFLHVTYVPAQEKNFTTAPAICHEGKAHFPREGVFVSNGTHWFITQRNFYEPQIITTDNTFVSGSCDVVIGIVNNTVYDPLQPELDSGGGSGGGQIYEGKLTAEGLRFGIVASRFNHALVDRLVEGAIDAIVRHGGREEDITLVRVPGSWEIPVAAGELARKEDIDAVIAIGVLIRGATPHFDYIASEVSKGLADLSLELRKPITFGVITADTLEQAIERAGTKHGNKGWEAALSAIEMANLFKSLR

SEQ ID NO: 8311 - protein, 1301 aa, Artificial Sequence
  SARS-CoV-2/pangolin/Guangxi/P5L/2017__EPI_ISL_410540 spike protein (1-1141)(I903C_Y1041C) LumSynth construct
MFVFLFVLPLVSSQCVNLTTRTGIPPGYTNSSTRGVYYPDKVFRSSILHLTQDLFLPFFSNVTWFNTINYQGGFKKFDNPVLPFNDGVYFASTEKSNIIRGWIFGTTLDARTQSLLIVNNATNVVIKVCEFQFCTDPFLGVYYHNNNKTWVENEFRVYSSANNCTFEYISQPFLMDLEGKQGNFKNLREFVFKNVDGYFKIYSKHTPIDLVRDLPRGFAALEPLVDLPIGINITRFQTLLALHRSYLTPGKLESGWTTGAAAYYVGYLQQRTFLLSYNQNGTITDAVDCSLDPLSETKCTLKSLTVEKGIYQTSNFRVQPTISIVRFPNITNLCPFGEVFNASKFASVYAWNRKRISNCVADYSVLYNSTSFSTFKCYGVSPTKLNDLCFTNVYADSFVVKGDEVRQIAPGQTGVIADYNYKLPDDFTGCVIAWNSVKQDALTGGNYGYLYRLFRKSKLKPFERDISTEIYQAGSTPCNGQVGLNCYYPLERYGFHPTTGVNYQPFRVVVLSFELLNGPATVCGPKLSTTLVKDKCVNFNFNGLTGTGVLTTSKKQFLPFQQFGRDISDTTDAVRDPQTLEILDITPCSFGGVSVITPGTNTSNQVAVLYQDVNCTEVPMAIHAEQLTPAWRVYSAGANVFQTRAGCLVGAEHVNNSYECDIPVGAGICASYHSMSSFRSVNQRSIIAYTMSLGAENSVAYSNNSIAIPTNFTISVTTEILPVSMTKTSVDCTMYICGDSIECSNLLLQYGSFCTQLNRALTGIAVEQDKNTQEVFAQVKQIYKTPPIKDFGGFNFSQILPDPSKPSKRSFIEDLLFNKVTLADAGFIKQYGDCLGDIAARDLICAQKFNGLTVLPPLLTDEMIAQYTSALLAGTITSGWTFGAGAALQIPFAMQMAYRFNGCGVTQNVLYENQKLIANQFNSAIGKIQDSLSSTASALGKLQDVVNQNAQALNTLVKQLSSNFGAISSVLNDILSRLDKVEAEVQIDRLITGRLQSLQTYVTQQLIRAAEIRASANLAATKMSECVLGQSKRVDFCGKGCHLMSFPQSAPHGVVFLHVTYVPAQEKNFTTAPAICHEGKAHFPREGVFVSNGTHWFITQRNFYEPQIITTDNTFVSGSCDVVIGIVNNTVYDPLQPELDSGGGSGGGQIYEGKLTAEGLRFGIVASRFNHALVDRLVEGAIDAIVRHGGREEDITLVRVPGSWEIPVAAGELARKEDIDAVIAIGVLIRGATPHFDYIASEVSKGLADLSLELRKPITFGVITADTLEQAIERAGTKHGNKGWEAALSAIEMANLFKSLR

SEQ ID NO: 8312 - protein, 1301 aa, Artificial Sequence
  SARS-CoV-2/pangolin/Guangxi/P5E/2017__EPI_ISL_410541 spike protein (1-1141)(I903C_Y1041C) LumSynth construct
MFVFLFVLPLVSSQCVNLTTRTGIPPGYTNSSTRGVYYPDKVFRSSILHLTQDLFLPFFSNVTWFNTITYQGGSKKFDNPVLPFNDGVYFASTEKSNIIRGWIFGTTLDARTQSLLIVNNATNVVIKVCEFQFCTDPFLGVYYHNNNKTWVENEFRVYSSANNCTFEYISQPFLMDLEGKQGNFKNLREFVFKNVDGYFKIYSKHTPIDLVRDLPRGFAALEPLVDLPIGINITRFQTLLALHRSYLTPGKLESGWTTGAAAYYVGYLQQRTFLLSYNQNGTITDAVDCSLDPLSETKCTLKSLTVEKGIYQTSNFRVQPTISIVRFPNITNLCPFGEVFNASKFASVYAWNRKRISNCVADYSVLYNSTSFSTFKCYGVSPTKLNDLCFTNVYADSFVVKGDEVRQIAPGQTGVIADYNYKLPDDFTGCVIAWNSVKQDALTGDNYGYLYRLFRKSKLKPFERDISTEIYQAGSTPCNGQVGLNCYYPLERYGFHPTTGVNYQPFRVVVLSFELLNGPATVCGPKLSTTLVKDKCVNFNFNGLTGTGVLTTSKKQFLPFQQFGRDISDTTDAVRDPQTLEILDITPCSFGGVSVITPGTNTSNQVAVLYQDVNCTEVPMAIHAEQLTPAWRVYSAGANVFQTRAGCLVGAEHVNNSYECDIPVGAGICASYHSMSSFRSVNQRSIIAYTMSLGAENSVAYSNNSIAIPTNFTISVTTEILPVSMTKTSVDCTMYICGDSIECSNLLLQYGSFCTQLNRALTGIAVEQDKNTQEVFAQVKQIYKTPPIKDFGGFNFSQILPDPSKPSKRSFIEDLLFNKVTLADAGFIKQYGDCLGDIAARDLICAQKFNGLTVLPPLLTDEMIAQYTSALLAGTITSGWTFGAGAALQIPFAMQMAYRFNGCGVTQNVLYENQKLIANQFNSAIGKIQDSLSSTASALGKLQDVVNQNAQALNTLVKQLSSNFGAISSVLNDILSRLDKVEAEVQIDRLITGRLQSLQTYVTQQLIRAAEIRASANLAATKMSECVLGQSKRVDFCGKGCHLMSFPQSAPHGVVFLHVTYVPAQEKNFTTAPAICHEGKAHFPREGVFVSNGTHWFITQRNFYEPQIITTDNTFVSGSCDVVIGIVNNTVYDPLQPELDSGGGSGGGQIYEGKLTAEGLRFGIVASRFNHALVDRLVEGAIDAIVRHGGREEDITLVRVPGSWEIPVAAGELARKEDIDAVIAIGVLIRGATPHFDYIASEVSKGLADLSLELRKPITFGVITADTLEQAIERAGTKHGNKGWEAALSAIEMANLFKSLR

SEQ ID NO: 8313 - protein, 1299 aa, Artificial Sequence
  SARS-CoV-2/pangolin/Guangxi/P1E/2017__EPI_ISL_410539 spike protein (1-1139)(I901C_Y1039C) LumSynth construct
MFVFLFVLPLVSSQCVNLTTRTGIQPGYTNSSTRGVYYPDKVFRSSILHLTQDLFLPFFSNVTWFNTINYQGGFKKFDNPVLPFNDGVYFASTEKSNIIRGWIFGTTLDARTQSLLIVNNATNVVIKVCEFQFCTDPFLGVYYHNNNKTWVENEFRVYSSANNCTFEYISQPFLMDLEGKQGNFKNLREFVFKNVDGYFKIYSKHTPIDLVRDLPRGFAALEPLVDLPIGINITRFQTLLALHRSYLTPGKLESGWTTGAAAYYVGYLQQRTFLLSYNQNGTITDAVDCSLDPLSETKCTLKSLTVEKGIYQTSNFRVQPTISIVRFPNITNLCPFGEVFNASKFASVYAWNRKRISNCVADYSVLYNSTSFSTFKCYGVSPTKLNDLCFTNVYADSFVVKGDEVRQIAPGQTGVIADYNYKLPDDFTGCVIAWNSVKQDALTGGNYLYRLFRKSKLKPFERDISTEIYQAGSTPCNGQVGLNCYYPLERYGFHPTTGVNYQPFRVVVLSFELLNGPATVCGPKLSTTLVKDKCVNFNFNGLTGTGVLTTSKKQFLPFQQFGRDISDTTDAVRDPQTLEILDITPCSFGGVSVITPGTNTSNQVAVLYQDVNCTEVPMAIHAEQLTPAWRVYSAGANVFQTRAGCLVGAEHVNNSYECDIPVGAGICASYHSMSSLRSVNQRSIIAYTMSLGAENSVAYSNNSIAIPTNFTISVTTEILPVSMTKTSVDCTMYICGDSIECSNLLLQYGSFCTQLNRALTGIAVEQDKNTQEVFAQVKQIYKTPPIKDFGGFNFSQILPDPSKPSKRSFIEDLLFNKVTLADAGFIKQYGDCLGDIAARDLICAQKFNGLTVLPPLLTDEMIAQYTSALLAGTITSGWTFGAGAALQIPFAMQMAYRFNGCGVTQNVLYENQKLIANQFNSAIGKIQDSLSSTASALGKLQDVVNQNAQALNTLVKQLSSNFGAISSVLNDILSRLDKVEAEVQIDRLITGRLQSLQTYVTQQLIRAAEIRASANLAATKMSECVLGQSKRVDFCGKGCHLMSFPQSAPHGVVFLHVTYVPAQEKNFTTAPAICHEGKAHFPREGVFVSNGTHWFITQRNFYEPQIITTDNTFVSGSCDVVIGIVNNTVYDPLQPELDSGGGSGGGQIYEGKLTAEGLRFGIVASRFNHALVDRLVEGAIDAIVRHGGREEDITLVRVPGSWEIPVAAGELARKEDIDAVIAIGVLIRGATPHFDYIASEVSKGLADLSLELRKPITFGVITADTLEQAIERAGTKHGNKGWEAALSAIEMANLFKSLR

SEQ ID NO: 8314 - protein, 1307 aa, Artificial Sequence
  SARS-CoV-2/Wuhan/WIV05/2019__EPI_ISL_402128 spike protein (1-1147)(Q965C_S1003C) LumSynth construct
MFVFLVLLPLVSSQCVNLTTRTQLPPAYTNSFTRGVYYPDKVFRSSVLHSTQDLFLPFFSNVTWFHAIHVSGTNGTKRFDNPVLPFNDGVYFASTEKSNIIRGWIFGTTLDSKTQSLLIVNNATNVVIKVCEFQFCNDPFLGVYYHKNNKSWMESEFRVYSSANNCTFEYVSQPFLMDLEGKQGNFKNLREFVFKNIDGYFKIYSKHTPINLVRDLPQGFSALEPLVDLPIGINITRFQTLLALHRSYLTPGDSSSGWTAGAAAYYVGYLQPRTFLLKYNENGTITDAVDCALDPLSETKCTLKSFTVEKGIYQTSNFRVQPTESIVRFPNITNLCPFGEVFNATRFASVYAWNRKRISNCVADYSVLYNSASFSTFKCYGVSPTKLNDLCFTNVYADSFVIRGDEVRQIAPGQTGKIADYNYKLPDDFTGCVIAWNSNNLDSKVGGNYNYLYRLFRKSNLKPFERDISTEIYQAGSTPCNGVEGFNCYFPLQSYGFQPTNGVGYQPYRVVVLSFELLHAPATVCGPKKSTNLVKNKCVNFNFNGLTGTGVLTESNKKFLPFQQFGRDIADTTDAVRDPQTLEILDITPCSFGGVSVITPGTNTSNQVAVLYQDVNCTEVPVAIHADQLTPTWRVYSTGSNVFQTRAGCLIGAEHVNNSYECDIPIGAGICASYQTQTNSPRRARSVASQSIIAYTMSLGAENSVAYSNNSIAIPTNFTISVTTEILPVSMTKTSVDCTMYICGDSTECSNLLLQYGSFCTQLNRALTGIAVEQDKNTQEVFAQVKQIYKTPPIKDFGGFNFSQILPDPSKPSKRSFIEDLLFNKVTLADAGFIKQYGDCLGDIAARDLICAQKFNGLTVLPPLLTDEMIAQYTSALLAGTITSGWTFGAGAALQIPFAMQMAYRFNGIGVTQNVLYENQKLIANQFNSAIGKIQDSLSSTASALGKLQDVVNQNAQALNTLVKCLSSNFGAISSVLNDILSRLDKVEAEVQIDRLITGRLQCLQTYVTQQLIRAAEIRASANLAATKMSECVLGQSKRVDFCGKGYHLMSFPQSAPHGVVFLHVTYVPAQEKNFTTAPAICHDGKAHFPREGVFVSNGTHWFVTQRNFYEPQIITTDNTFVSGNCDVVIGIVNNTVYDPLQPELDSGGGSGGGQIYEGKLTAEGLRFGIVASRFNHALVDRLVEGAIDAIVRHGGREEDITLVRVPGSWEIPVAAGELARKEDIDAVIAIGVLIRGATPHFDYIASEVSKGLADLSLELRKPITFGVITADTLEQAIERAGTKHGNKGWEAALSAIEMANLFKSLR

SEQ ID NO: 8315 - protein, 1303 aa, Artificial Sequence
  SARS-CoV-2/bat/Yunnan/RaTG13/2013__EPI_ISL_402131 spike protein (1-1143)(Q961C_S999C) LumSynth construct
MFVFLVLLPLVSSQCVNLTTRTQLPPAYTNSSTRGVYYPDKVFRSSVLHLTQDLFLPFFSNVTWFHAIHVSGTNGIKRFDNPVLPFNDGVYFASTEKSNIIRGWIFGTTLDSKTQSLLIVNNATNVVIKVCEFQFCNDPFLGVYYHKNNKSWMESEFRVYSSANNCTFEYVSQPFLMDLEGKQGNFKNLREFVFKNIDGYFKIYSKHTPINLVRDLPPGFSALEPLVDLPIGINITRFQTLLALHRSYLTPGDSSSGWTAGAAAYYVGYLQPRTFLLKYNENGTITDAVDCALDPLSETKCTLKSFTVEKGIYQTSNFRVQPTDSIVRFPNITNLCPFGEVFNATTFASVYAWNRKRISNCVADYSVLYNSTSFSTFKCYGVSPTKLNDLCFTNVYADSFVITGDEVRQIAPGQTGKIADYNYKLPDDFTGCVIAWNSKHIDAKEGGNFNYLYRLFRKANLKPFERDISTEIYQAGSKPCNGQTGLNCYYPLYRYGFYPTDGVGHQPYRVVVLSFELLNAPATVCGPKKSTNLVKNKCVNFNFNGLTGTGVLTESNKKFLPFQQFGRDIADTTDAVRDPQTLEILDITPCSFGGVSVITPGTNASNQVAVLYQDVNCTEVPVAIHADQLTPTWRVYSTGSNVFQTRAGCLIGAEHVNNSYECDIPIGAGICASYQTQTNSRSVASQSIIAYTMSLGAENSVAYSNNSIAIPTNFTISVTTEILPVSMTKTSVDCTMYICGDSTECSNLLLQYGSFCTQLNRALTGIAVEQDKNTQEVFAQVKQIYKTPPIKDFGGFNFSQILPDPSKPSKRSFIEDLLFNKVTLADAGFIKQYGDCLGDIAARDLICAQKFNGLTVLPPLLTDEMIAQYTSALLAGTITSGWTFGAGAALQIPFAMQMAYRFNGIGVTQNVLYENQKLIANQFNSAIGKIQDSLSSTASALGKLQDVVNQNAQALNTLVKCLSSNFGAISSVLNDILSRLDKVEAEVQIDRLITGRLQCLQTYVTQQLIRAAEIRASANLAATKMSECVLGQSKRVDFCGKGYHLMSFPQSAPHGVVFLHVTYVPAQEKNFTTAPAICHDGKAHFPREGVFVSNGTHWFVTQRNFYEPQIITTDNTFVSGSCDVVIGIVNNTVYDPLQPELDSGGGSGGGQIYEGKLTAEGLRFGIVASRFNHALVDRLVEGAIDAIVRHGGREEDITLVRVPGSWEIPVAAGELARKEDIDAVIAIGVLIRGATPHFDYIASEVSKGLADLSLELRKPITFGVITADTLEQAIERAGTKHGNKGWEAALSAIEMANLFKSLR

SEQ ID NO: 8316 - protein, 1307 aa, Artificial Sequence
  SARS-CoV-2/Wuhan/HBCDC-HB-01/2019__EPI_ISL_402132 spike protein (1-1147)(Q965C_S1003C) LumSynth construct
MFVFLVLLPLVSSQCVNLTTRTQLPPAYTNSITRGVYYPDKVFRSSVLHSTQDLFLPFFSNVTWFHAIHVSGTNGTKRFDNPVLPFNDGVYFASTEKSNIIRGWIFGTTLDSKTQSLLIVNNATNVVIKVCEFQFCNDPFLGVYYHKNNKSWMESEFRVYSSANNCTFEYVSQPFLMDLEGKQGNFKNLREFVFKNIDGYFKIYSKHTPINLVRDLPQGFSALEPLVDLPIGINITRFQTLLALHRSYLTPGDSSSGWTAGAAAYYVGYLQPRTFLLKYNENGTITDAVDCALDPLSETKCTLKSFTVEKGIYQTSNFRVQPTESIVRFPNITNLCPFGEVFNATRFASVYAWNRKRISNCVADYSVLYNSASFSTFKCYGVSPTKLNDLCFTNVYADSFVIRGDEVRQIAPGQTGKIADYNYKLPDDFTGCVIAWNSNNLDSKVGGNYNYLYRLFRKSNLKPFERDISTEIYQAGSTPCNGVEGFNCYFPLQSYGFQPTNGVGYQPYRVVVLSFELLHAPATVCGPKKSTNLVKNKCVNFNFNGLTGTGVLTESNKKFLPFQQFGRDIADTTDAVRDPQTLEILDITPCSFGGVSVITPGTNTSNQVAVLYQDVNCTEVPVAIHADQLTPTWRVYSTGSNVFQTRAGCLIGAEHVNNSYECDIPIGAGICASYQTQTNSPRRARSVASQSIIAYTMSLGAENSVAYSNNSIAIPTNFTISVTTEILPVSMTKTSVDCTMYICGDSTECSNLLLQYGSFCTQLNRALTGIAVEQDKNTQEVFAQVKQIYKTPPIKDFGGFNFSQILPDPSKPSKRSFIEDLLFNKVTLADAGFIKQYGDCLGDIAARDLICAQKFNGLTVLPPLLTDEMIAQYTSALLAGTITSGWTFGAGAALQIPFAMQMAYRFNGIGVTQNVLYENQKLIANQFNSAIGKIQDSLSSTASALGKLQDVVNQNAQALNTLVKCLSSNFGAISSVLNDILSRLDKVEAEVQIDRLITGRLQCLQTYVTQQLIRAAEIRASANLAATKMSECVLGQSKRVDFCGKGYHLMSFPQSAPHGVVFLHVTYVPAQEKNFTTAPAICHDGKAHFPREGVFVSNGTHWFVTQRNFYEPQIITTDNTFVSGNCDVVIGIVNNTVYDPLQPELDSGGGSGGGQIYEGKLTAEGLRFGIVASRFNHALVDRLVEGAIDAIVRHGGREEDITLVRVPGSWEIPVAAGELARKEDIDAVIAIGVLIRGATPHFDYIASEVSKGLADLSLELRKPITFGVITADTLEQAIERAGTKHGNKGWEAALSAIEMANLFKSLR

SEQ ID NO: 8317 - protein, 1307 aa, Artificial Sequence
  SARS-CoV-2/Guangdong/20SF028/2020__EPI_ISL_403936 spike protein (1-1147)(Q965C_S1003C) LumSynth construct
MFVFLVLLPLVSSQCVNLTTRTQLPPAYTNSFTRGVYYPDKVFRSSVLYSTQDLFLPFFSNVTWFHAIHVSGTNGTKRFDNPVLPFNDGVYFASTEKSNIIRGWIFGTTLDSKTQSLLIVNNATNVVIKVCEFQFCNDPFLGVYYHKNNKSWMESEFRVYSSANNCTFEYVSQPFLMDLEGKQGNFKNLREFVFKNIDGYFKIYSKHTPINLVRDLPQGFSALEPLVDLPIGINITRFQTLLALHRSYLTPGDSSSGWTAGAAAYYVGYLQPRTFLLKYNENGTITDAVDCALDPLSETKCTLKSFTVEKGIYQTSNFRVQPTESIVRFPNITNLCPFGEVFNATRFASVYAWNRKRISNCVADYSVLYNSASFSTFKCYGVSPTKLNDLCFTNVYADSFVIRGDEVRQIAPGQTGKIADYNYKLPDDFTGCVIAWNSNNLDSKVGGNYNYLYRLFRKSNLKPFERDISTEIYQAGSTPCNGVEGFNCYFPLQSYGFQPTNGVGYQPYRVVVLSFELLHAPATVCGPKKSTNLVKNKCVNFNFNGLTGTGVLTESNKKFLPFQQFGRDIADTTDAVRDPQTLEILDITPCSFGGVSVITPGTNTSNQVAVLYQDVNCTEVPVAIHADQLTPTWRVYSTGSNVFQTRAGCLIGAEHVNNSYECDIPIGAGICASYQTQTNSPRRARSVASQSIIAYTMSLGAENSVAYSNNSIAIPTNFTISVTTEILPVSMTKTSVDCTMYICGDSTECSNLLLQYGSFCTQLNRALTGIAVEQDKNTQEVFAQVKQIYKTPPIKDFGGFNFSQILPDPSKPSKRSFIEDLLFNKVTLADAGFIKQYGDCLGDIAARDLICAQKFNGLTVLPPLLTDEMIAQYTSALLAGTITSGWTFGAGAALQIPFAMQMAYRFNGIGVTQNVLYENQKLIANQFNSAIGKIQDSLSSTASALGKLQDVVNQNAQALNTLVKCLSSNFGAISSVLNDILSRLDKVEAEVQIDRLITGRLQCLQTYVTQQLIRAAEIRASANLAATKMSECVLGQSKRVDFCGKGYHLMSFPQSAPHGVVFLHVTYVPAQEKNFTTAPAICHDGKAHFPREGVFVSNGTHWFVTQRNFYEPQIITTDNTFVSGNCDVVIGIVNNTVYDPLQPELDSGGGSGGGQIYEGKLTAEGLRFGIVASRFNHALVDRLVEGAIDAIVRHGGREEDITLVRVPGSWEIPVAAGELARKEDIDAVIAIGVLIRGATPHFDYIASEVSKGLADLSLELRKPITFGVITADTLEQAIERAGTKHGNKGWEAALSAIEMANLFKSLR

SEQ ID NO: 8318 - protein, 1307 aa, Artificial Sequence
  SARS-CoV-2/Shenzhen/SZTH-001/2020__EPI_ISL_406592 spike protein (1-1147)(Q965C_S1003C) LumSynth construct
MFVFLVLLPLVSSQCVNLTTRTQLPPAYTNSFTRGVYYPDKVFRSSVLHSTQDLFLPFFSNVTWFHAIHVSGTNGTKRFDNPVLPFNDGVYFASTEKSNIIRGWIFGTTLDSKTQSLLIVNNATNVVIKVCEFQFCNDPFLGVYYHKNNKSWMESEFRVYSSANNCTFEYVSQPFLMDLEGKQGNFKNLREFVFKNIDGYFKIYSKHTPINLVRDLPQGFSALEPLVDLPIGINITRFQTLLALHRSYLTPGDSSSGWTAGAAAYYVGYLQPRTFLLKYNENGTITDAVDCALDPLSETKCTLKSFTVEKGIYQTSNFRVQPTESIVRFPNITNLCPFGEVFNATRFASVYAWNRKRISNCVADYSVLYNSASFSTFKCYGVSPTKLNDLCFTNVYADSFVIRGDEVRQIAPGQTGKIADYNYKLPDDFTGCVIAWNSNNLDSKVGGNYNYLYRLFRKSNLKPFERDISTEIYQAGSTPCNGVEGFNCYFPLQSYGFQPTNGVGYQPYRVVVLSFELLHAPATVCGPKKSTNLVKNKCVNFNFNGLTGTGVLTESNKKFLPFQQFGRDIADTTDAVRDPQTLEILDITPCSFGGVSVITPGTNTSNQVAVLYQDVNCTEVPVAIHADQLTPTWRVYSTGSNVFQTRAGCLIGAEHVNNSYECDIPIGAGICASYQTQTNSPRRARSVASQSIIAYTMSLGAENSVAYSNNSIAIPTNFTISVTTEILPVSMTKTSVDCTMYICGDSTECSNLLLQYGSFCTQLNRALTGIAVEQDKNTQEVFAQVKQIYKTPPIKDFGGFNFSQILPDPSKPSKRSFIEDLLFNKVTLADAGFIKQYGDCLGDIAARDLICAQKFNGLTVLPPLLTDEMIAQYTSALLAGTITSGWTFGAGAALQIPFAMQMAYRFNGIGVTQNVLYENQKLIANQFNSAIGKIQDSLSSTASALGKLQDVVNQNAQALNTLVKCLSSNFGAISSVLNDILSRLDKVEAEVQIDRLITGRLQCLQTYVTQQLIRAAEIRASANLAATKMSECVLGQSKRVDFCGKGYHLMSFPQSAPHGVVFLHVTYVPAQEKNFTTAPAICHDGKAHFPREGVFVSNGTHWFVTQRNFYEPQIITTDNTFVSGNCDVLIGIVNNTVYDPLQPELDSGGGSGGGQIYEGKLTAEGLRFGIVASRFNHALVDRLVEGAIDAIVRHGGREEDITLVRVPGSWEIPVAAGELARKEDIDAVIAIGVLIRGATPHFDYIASEVSKGLADLSLELRKPITFGVITADTLEQAIERAGTKHGNKGWEAALSAIEMANLFKSLR

SEQ ID NO: 8319 - protein, 1307 aa, Artificial Sequence
  SARS-CoV-2/Shenzhen/SZTH-004/2020__EPI_ISL_406595 spike protein (1-1147)(Q965C_S1003C) LumSynth construct
MFVFLVLLPLVSSQCVNLTTRTQLPPAYTNSFTRGVYYPDKVFRSSVLHSTQDLFLPFFSNVTWFHAIHVSGTNGTKRFDNPVLPFNDGVYFASTEKSNIIRGWIFGTTLDSKTQSLLIVNNATNVVIKVCEFQFCNDPFLGVYYHKNNKSWMESEFRVYSSANNCTFEYVSQPFLMDLEGKQGNFKNLREFVFKNIDGYFKIYSKHTPINLVRDLPQGFSALEPLVDLPIGINITRFQTLLALHRSYLTPGDSSSGWTAGAAAYYVGYLQPRTFLLKYNENGTITDAVDCALDPLSETKCTLKSFTVEKGIYQTSNFRVQPTESIVRFPNITNLCPFGEVFNATRFASVYAWDRKRISNCVAYYSVLYNSASFSTFKCYGVSPTKLNDLCFTNVYADSFVIRGDEVRQIAPGQTGKIADYNYKLPDDFTGCVIAWNSNNLDSKVGGNYNYLYRLFRKSNLKPFERDISTEIYQAGSTPCNGVEGFNCYFPLQSYGFQPTNGVGYQPYRVVVLSFELLHAPATVCGPKKSTNLVKNKCVNFNFNGLTGTGVLTESNKKFLPFQQFGRDIADTTDAVRDPQTLEILDITPCSFGGVSVITPGTNTSNQVAVLYQDVNCTEVPVAIHADQLTPTWRVYSTGSNVFQTRAGCLIGAEHVNNSYECDIPIGAGICASYQTQTNSPRRARSVASQSIIAYTMSLGAENSVAYSNNSIAIPTNFTISVTTEILPVSMTKTSVDCTMYICGDSTECSNLLLQYGSFCTQLNRALTGIAVEQDKNTQEVFAQVKQIYKTPPIKDFGGFNFSQILPDPSKPSKRSFIEDLLFNKVTLADAGFIKQYGDCLGDIAARDLICAQKFNGLTVLPPLLTDEMIAQYTSALLAGTITSGWTFGAGAALQIPFAMQMAYRFNGIGVTQNVLYENQKLIANQFNSAIGKIQDSLSSTASALGKLQDVVNQNAQALNTLVKCLSSNFGAISSVLNDILSRLDKVEAEVQIDRLITGRLQCLQTYVTQQLIRAAEIRASANLAATKMSECVLGQSKRVDFCGKGYHLMSFPQSAPHGVVFLHVTYVPAQEKNFTTAPAICHDGKAHFPREGVFVSNGTHWFVTQRNFYEPQIITTDNTFVSGNCDVVIGIVNNTVYDPLQPELDSGGGSGGGQIYEGKLTAEGLRFGIVASRFNHALVDRLVEGAIDAIVRHGGREEDITLVRVPGSWEIPVAAGELARKEDIDAVIAIGVLIRGATPHFDYIASEVSKGLADLSLELRKPITFGVITADTLEQAIERAGTKHGNKGWEAALSAIEMANLFKSLR

SEQ ID NO: 8320 - protein, 1307 aa, Artificial Sequence
  SARS-CoV-2/France/IDF0372/2020__EPI_ISL_406596 spike protein (1-1147)(Q965C_S1003C) LumSynth construct
MFVFLVLLPLVSSQCVNLTTRTQLPPAYTNSFTRGVYYPDKVFRSSVLHSTQDLFLPFFSNVTWFHAIHVSGTNGTKRFDNPVLPFNDGVYFASTEKSNIIRGWIFGTTLDSKTQSLLIVNNATNVVIKVCEFQFCNDPFLGVYYHKNNKSWMESEFRVYSSANNCTFEYVSQPFLMDLEGKQGNFKNLREFVFKNIDGYFKIYSKHTPINLVRDLPQGFSALEPLVDLPIGINITRFQTLLALHRSYLTPGDSSSGWTAGAAAYYVGYLQPRTFLLKYNENGTITDAVDCALDPLSETKCTLKSFTVEKGIYQTSNFRVQPTESIVRFPNITNLCPFGEVFNATRFASVYAWNRKRISNCVADYSFLYNSASFSTFKCYGVSPTKLNDLCFTNVYADSFVIRGDEVRQIAPGQTGKIADYNYKLPDDFTGCVIAWNSNNLDSKVGGNYNYLYRLFRKSNLKPFERDISTEIYQAGSTPCNGVEGFNCYFPLQSYGFQPTNGVGYQPYRVVVLSFELLHAPATVCGPKKSTNLVKNKCVNFNFNGLTGTGVLTESNKKFLPFQQFGRDIADTTDAVRDPQTLEILDITPCSFGGVSVITPGTNTSNQVAVLYQDVNCTEVPVAIHADQLTPTWRVYSTGSNVFQTRAGCLIGAEHVNNSYECDIPIGAGICASYQTQTNSPRRARSVASQSIIAYTMSLGAENSVAYSNNSIAIPTNFTISVTTEILPVSMTKTSVDCTMYICGDSTECSNLLLQYGSFCTQLNRALTGIAVEQDKNTQEVFAQVKQIYKTPPIKDFGGFNFSQILPDPSKPSKRSFIEDLLFNKVTLADAGFIKQYGDCLGDIAARDLICAQKFNGLTVLPPLLTDEMIAQYTSALLAGTITSGWTFGAGAALQIPFAMQMAYRFNGIGVTQNVLYENQKLIANQFNSAIGKIQDSLSSTASALGKLQDVVNQNAQALNTLVKCLSSNFGAISSVLNDILSRLDKVEAEVQIDRLITGRLQCLQTYVTQQLIRAAEIRASANLAATKMSECVLGQSKRVDFCGKGYHLMSFPQSAPHGVVFLHVTYVPAQEKNFTTAPAICHDGKAHFPREGVFVSNGTHWFVTQRNFYEPQIITTDNTFVSGNCDVVIGIVNNTVYDPLQPELDSGGGSGGGQIYEGKLTAEGLRFGIVASRFNHALVDRLVEGAIDAIVRHGGREEDITLVRVPGSWEIPVAAGELARKEDIDAVIAIGVLIRGATPHFDYIASEVSKGLADLSLELRKPITFGVITADTLEQAIERAGTKHGNKGWEAALSAIEMANLFKSLR

SEQ ID NO: 8321 - protein, 1307 aa, Artificial Sequence
  SARS-CoV-2/Australia/VIC01/2020__EPI_ISL_406844 spike protein (1-1147)(Q965C_S1003C) LumSynth construct
MFVFLVLLPLVSSQCVNLTTRTQLPPAYTNSFTRGVYYPDKVFRSSVLHSTQDLFLPFFSNVTWFHAIHVSGTNGTKRFDNPVLPFNDGVYFASTEKSNIIRGWIFGTTLDSKTQSLLIVNNATNVVIKVCEFQFCNDPFLGVYYHKNNKSWMESEFRVYSSANNCTFEYVSQPFLMDLEGKQGNFKNLREFVFKNIDGYFKIYSKHTPINLVRDLPQGFSALEPLVDLPIGINITRFQTLLALHRRYLTPGDSSSGWTAGAAAYYVGYLQPRTFLLKYNENGTITDAVDCALDPLSETKCTLKSFTVEKGIYQTSNFRVQPTESIVRFPNITNLCPFGEVFNATRFASVYAWNRKRISNCVADYSVLYNSASFSTFKCYGVSPTKLNDLCFTNVYADSFVIRGDEVRQIAPGQTGKIADYNYKLPDDFTGCVIAWNSNNLDSKVGGNYNYLYRLFRKSNLKPFERDISTEIYQAGSTPCNGVEGFNCYFPLQSYGFQPTNGVGYQPYRVVVLSFELLHAPATVCGPKKSTNLVKNKCVNFNFNGLTGTGVLTESNKKFLPFQQFGRDIADTTDAVRDPQTLEILDITPCSFGGVSVITPGTNTSNQVAVLYQDVNCTEVPVAIHADQLTPTWRVYSTGSNVFQTRAGCLIGAEHVNNSYECDIPIGAGICASYQTQTNSPRRARSVASQSIIAYTMSLGAENSVAYSNNSIAIPTNFTISVTTEILPVSMTKTSVDCTMYICGDSTECSNLLLQYGSFCTQLNRALTGIAVEQDKNTQEVFAQVKQIYKTPPIKDFGGFNFSQILPDPSKPSKRSFIEDLLFNKVTLADAGFIKQYGDCLGDIAARDLICAQKFNGLTVLPPLLTDEMIAQYTSALLAGTITSGWTFGAGAALQIPFAMQMAYRFNGIGVTQNVLYENQKLIANQFNSAIGKIQDSLSSTASALGKLQDVVNQNAQALNTLVKCLSSNFGAISSVLNDILSRLDKVEAEVQIDRLITGRLQCLQTYVTQQLIRAAEIRASANLAATKMSECVLGQSKRVDFCGKGYHLMSFPQSAPHGVVFLHVTYVPAQEKNFTTAPAICHDGKAHFPREGVFVSNGTHWFVTQRNFYEPQIITTDNTFVSGNCDVVIGIVNNTVYDPLQPELDSGGGSGGGQIYEGKLTAEGLRFGIVASRFNHALVDRLVEGAIDAIVRHGGREEDITLVRVPGSWEIPVAAGELARKEDIDAVIAIGVLIRGATPHFDYIASEVSKGLADLSLELRKPITFGVITADTLEQAIERAGTKHGNKGWEAALSAIEMANLFKSLR

SEQ ID NO: 8322 - protein, 1307 aa, Artificial Sequence
  SARS-CoV-2/Germany/BavPat1/2020__EPI_ISL_406862 spike protein (1-1147)(Q965C_S1003C) LumSynth construct
MFVFLVLLPLVSSQCVNLTTRTQLPPAYTNSFTRGVYYPDKVFRSSVLHSTQDLFLPFFSNVTWFHAIHVSGTNGTKRFDNPVLPFNDGVYFASTEKSNIIRGWIFGTTLDSKTQSLLIVNNATNVVIKVCEFQFCNDPFLGVYYHKNNKSWMESEFRVYSSANNCTFEYVSQPFLMDLEGKQGNFKNLREFVFKNIDGYFKIYSKHTPINLVRDLPQGFSALEPLVDLPIGINITRFQTLLALHRSYLTPGDSSSGWTAGAAAYYVGYLQPRTFLLKYNENGTITDAVDCALDPLSETKCTLKSFTVEKGIYQTSNFRVQPTESIVRFPNITNLCPFGEVFNATRFASVYAWNRKRISNCVADYSVLYNSASFSTFKCYGVSPTKLNDLCFTNVYADSFVIRGDEVRQIAPGQTGKIADYNYKLPDDFTGCVIAWNSNNLDSKVGGNYNYLYRLFRKSNLKPFERDISTEIYQAGSTPCNGVEGFNCYFPLQSYGFQPTNGVGYQPYRVVVLSFELLHAPATVCGPKKSTNLVKNKCVNFNFNGLTGTGVLTESNKKFLPFQQFGRDIADTTDAVRDPQTLEILDITPCSFGGVSVITPGTNTSNQVAVLYQGVNCTEVPVAIHADQLTPTWRVYSTGSNVFQTRAGCLIGAEHVNNSYECDIPIGAGICASYQTQTNSPRRARSVASQSIIAYTMSLGAENSVAYSNNSIAIPTNFTISVTTEILPVSMTKTSVDCTMYICGDSTECSNLLLQYGSFCTQLNRALTGIAVEQDKNTQEVFAQVKQIYKTPPIKDFGGFNFSQILPDPSKPSKRSFIEDLLFNKVTLADAGFIKQYGDCLGDIAARDLICAQKFNGLTVLPPLLTDEMIAQYTSALLAGTITSGWTFGAGAALQIPFAMQMAYRFNGIGVTQNVLYENQKLIANQFNSAIGKIQDSLSSTASALGKLQDVVNQNAQALNTLVKCLSSNFGAISSVLNDILSRLDKVEAEVQIDRLITGRLQCLQTYVTQQLIRAAEIRASANLAATKMSECVLGQSKRVDFCGKGYHLMSFPQSAPHGVVFLHVTYVPAQEKNFTTAPAICHDGKAHFPREGVFVSNGTHWFVTQRNFYEPQIITTDNTFVSGNCDVVIGIVNNTVYDPLQPELDSGGGSGGGQIYEGKLTAEGLRFGIVASRFNHALVDRLVEGAIDAIVRHGGREEDITLVRVPGSWEIPVAAGELARKEDIDAVIAIGVLIRGATPHFDYIASEVSKGLADLSLELRKPITFGVITADTLEQAIERAGTKHGNKGWEAALSAIEMANLFKSLR

SEQ ID NO: 8323 - protein, 1307 aa, Artificial Sequence
  SARS-CoV-2/Wuhan/HBCDC-HB-02/2020__EPI_ISL_412978 spike protein (1-1147)(Q965C_S1003C) LumSynth construct
MFVFLVLLPLVSSQCVNLTTRTQLPPAYTNSFTRGVYYPDKVFRSSVLHSTQDLFLPFFSNVTWFHAIHVSGTNGTKRFDNPVLPFNDGVYFASTEKSNIIRGWIFGTTLDSKTQSLLIVNNATNVVIKVCEFQFCNDPFLGVYYHKNNKSWMESEFRVYSSANNCTFEYVSQPFLMDLEGKQGNFKNLREFVFKNIDGYFKIYSKHTPINLVRDLPQGFSALEPLVDLPIGINITRFQTLLALHRSYLTPGDSSSGWTAGAAAYYVGYLQPRTFLLKYNENGTITDAVDCALDPLSETKCTLKSFTVEKGIYQTSNFRVQPTESIVRFPNITNLCPFGEVFNATRFASVYAWNRKRISNCVADYSVLYNSASFSTFKCYGVSPTKLNDLCFTNVYADSFVIRGDEVRQIAPGQTGKIADYNYKLPDDFTGCVIAWNSNNLDSKVGGNYNYLYRLFRKSNLKPFERDISTEIYQAGSTPCNGVEGFNCYFPLQSYGFQPTNGVGYQPYRVVVLSFELLHAPATVCGPKKSTNLVKNKCVNFNFNGLTGTGVLTESNKKFLPFQQFGRDIADTTDAVRDPQTLEILDITPCSFGGVSVITPGTNTSNQVAVLYQDVNCTEVPVAIHADQLTPTWRVYSTGSNVFQTRAGCLIGAEHVNNSYECDIPIGAGICASYQTQTNSPRRARSVASQSIIAYTMSLGAENSVAYSNNSIAIPTNFTISVTTEILPVSMTKTSVDCTMYICGDSTECSNFLLQYGSFCTQLNRALTGIAVEQDKNTQEVFAQVKQIYKTPPIKDFGGFNFSQILPDPSKPSKRSFIEDLLFNKVTLADAGFIKQYGDCLGDIAARDLICAQKFNGLTVLPPLLTDEMIAQYTSALLAGTITSGWTFGAGAALQIPFAMQMAYRFNGIGVTQNVLYENQKLIANQFNSAIGKIQDSLSSTASALGKLQDVVNQNAQALNTLVKCLSSNFGAISSVLNDILSRLDKVEAEVQIDRLITGRLQCLQTYVTQQLIRAAEIRASANLAATKMSECVLGQSKRVDFCGKGYHLMSFPQSAPHGVVFLHVTYVPAQEKNFTTAPAICHDGKAHFPREGVFVSNGTHWFVTQRNFYEPQIITTDNTFVSGNCDVVIGIVNNTVYDPLQPELDSGGGSGGGQIYEGKLTAEGLRFGIVASRFNHALVDRLVEGAIDAIVRHGGREEDITLVRVPGSWEIPVAAGELARKEDIDAVIAIGVLIRGATPHFDYIASEVSKGLADLSLELRKPITFGVITADTLEQAIERAGTKHGNKGWEAALSAIEMANLFKSLR

SEQ ID NO: 8324 - protein, 1307 aa, Artificial Sequence
  SARS-CoV-2/Australia/QLD02/2020__EPI_ISL_407896 spike protein (1-1147)(Q965C_S1003C) LumSynth construct
MFVFLVLLPLVSSQCVNLTTRTQLPPAYTNSFTRGVYYPDKVFRSSVLHSTQDLFLPFFSNVTWFHAIHVSGTNGTKRFDNPVLPFNDGVYFASTEKSNIIRGWIFGTTLDSKTQSLLIVNNATNVVIKVCEFQFCNDPFLGVYYHKNNKSWMESEFRVYSSANNCTFEYVSQPFLMDLEGKQGNFKNLREFVFKNIDGYFKIYSKHTPINLVRDLPQGFSALEPLVDLPIGINITRFQTLLALHRSYLTPGDSSSGWTAGAAAYYVGYLQPRTFLLKYNENGTITDAVDCALDPLSETKCTLKSFTVEKGIYQTSNFRVQPTESIVRFPNITNLCPFGEVFNATRFASVYAWNRKRISNCVADYSVLYNSASFSTFKCYGVSPTKLNDLCFTNVYADSFVIRGDEVRQIAPGQTGKIADYNYKLPDDFTGCVIAWNSNNLDSKVGGNYNYLYRLFRKSNLKPFERDISTEIYQAGSTPCNGVEGFNCYFPLQSYGFQPTNGVGYQPYRVVVLSFELLHAPATVCGPKKSTNLVKNKCVNFNFNGLTGTGVLTESNKKFLPFQQFGRDIADTTDAVRDPQTLEILDITPCSFGGVSVITPGTNTSNQVAVLYQDVNCTEVPVAIHADQLTPTWRVYSTGSNVFQTRAGCLIGAEHVNNSYECDIPIGAGICASYQTQTNSPRRARSVASQSIIAYTMSLGAENSVAYSNNSIAIPTNFTISVTTEILPVSMTKTSVDCTMYICGDSTECSNLLLQYGSFCTQLNRALTGIAVEQDKNTQEVFAQVKQIYKTPPIKDFGGFNFSQILPDPSKPSKRSFIEDLLFNKVTLADAGFIKQYGDCLGDIAARDLICAQKFNGLTVLPPLLTDEMIAQYTSALLAGTITSGWTFGAGAALQIPFAMQMAYRFNGIGVTQNVLYENQKLIANQFNSAIGKIQDSLSSTASALGKLQDVVNQNAQALNTLVKCLSSNFGAISSVLNDILSRLDKVEAEVQIDRLITGRLQCLQTYVTQQLIRAAEIRASANLAATKMSECVLGQSKRVDFCGKGYHLMSFPQSAPHGVVFLHVTYVPAQEKNFTTAPAICHDGKAHFPREGVFVSNGTHWFVTQRNFYEPQIITTDNTFVSGNCDVVIGIVNNTVYDPLQLELDSGGGSGGGQIYEGKLTAEGLRFGIVASRFNHALVDRLVEGAIDAIVRHGGREEDITLVRVPGSWEIPVAAGELARKEDIDAVIAIGVLIRGATPHFDYIASEVSKGLADLSLELRKPITFGVITADTLEQAIERAGTKHGNKGWEAALSAIEMANLFKSLR

SEQ ID NO: 8325 - protein, 1307 aa, Artificial Sequence
  SARS-CoV-2/India/1-31/2020__EPI_ISL_413523 spike protein (1-1147)(Q965C_S1003C) LumSynth construct
MFVFLVLLPLVSSQCVNLTTRTQLPPAYTNSFTRGVYYPDKVFRSSVLHSTQDLFLPFFSNVTWFHAIHVSGTNGTKRFDNPVLPFNDGVYFASTEKSNIIRGWIFGTTLDSKTQSLLIVNNATNVVIKVCEFQFCNDPFLGVYYHKNNKSWMESEFRVYSSANNCTFEYVSQPFLMDLEGKQGNFKNLREFVFKNIDGYFKIYSKHTPINLVRDLPQGFSALEPLVDLPIGINITRFQTLLALHRSYLTPGDSSSGWTAGAAAYYVGYLQPRTFLLKYNENGTITDAVDCALDPLSETKCTLKSFTVEKGIYQTSNFRVQPTESIVRFPNITNLCPFGEVFNATRFASVYAWNRKRISNCVADYSVLYNSASFSTFKCYGVSPTKLNDLCFTNVYADSFVIRGDEVRQIAPGQTGKIADYNYKLPDDFTGCVIAWNSNNLDSKVGGNYNYLYRLFRKSNLKPFERDISTEIYQAGSTPCNGVEGFNCYFPLQSYGFQPTNGVGYQPYRVVVLSFELLHAPATVCGPKKSTNLVKNKCVNFNFNGLTGTGVLTESNKKFLPFQQFGRDIADTTDAVRDPQTLEILDITPCSFGGVSVITPGTNTSNQVAVLYQDVNCTEVPVAIHADQLTPTWRVYSTGSNVFQTRAGCLIGAEHVNNSYECDIPIGAGICASYQTQTNSPRRARSVASQSIIAYTMSLGAENSVAYSNNSIAIPTNFTISVTTEILPVSMTKTSVDCTMYICGDSTECSNLLLQYGSFCTQLNRALTGIAVEQDKNTQEVFAQVKQIYKTPPIKDFGGFNFSQILPDPSKPSKRSFIEDLLFNKVTLADAGFIKQYGDCLGDIAARDLICAQKFNGLTVLPPLLTDEMIAQYTSALLAGTITSGWTFGAGAALQIPFAMQMAYRFNGIGVTQNVLYENQKLIANQFNSVIGKIQDSLSSTASALGKLQDVVNQNAQALNTLVKCLSSNFGAISSVLNDILSRLDKVEAEVQIDRLITGRLQCLQTYVTQQLIRAAEIRASANLAATKMSECVLGQSKRVDFCGKGYHLMSFPQSAPHGVVFLHVTYVPAQEKNFTTAPAICHDGKAHFPREGVFVSNGTHWFVTQRNFYEPQIITTDNTFVSGNCDVVIGIVNNTVYDPLQPELDSGGGSGGGQIYEGKLTAEGLRFGIVASRFNHALVDRLVEGAIDAIVRHGGREEDITLVRVPGSWEIPVAAGELARKEDIDAVIAIGVLIRGATPHFDYIASEVSKGLADLSLELRKPITFGVITADTLEQAIERAGTKHGNKGWEAALSAIEMANLFKSLR

SEQ ID NO: 8326 - protein, 1307 aa, Artificial Sequence
  SARS-CoV-2/Guangdong/GD2020087-P0008/2020__EPI_ISL_413863 spike protein (1-1147)(Q965C_S1003C) LumSynth construct
MFVFLVLLPLVSSQCVNLTTRTQLPPAYTNSFTRGVYYPDKVFRSSVLHSTQDLFLPFFSNVTWFHAIHVSGTNGTKRFDNPVLPFNDGVYFASTEKSNIIRGWIFGTTLDSKTQSLLIVNNATNVVIKVCEFQFCNDPFLGVYYHKNNKSWMESEFRVYSSANNCTFEYVSQPFLMDLEGKQGNFKNLREFVFKNIDGYFKIYSKHTPINLVRDLPQGFSALEPLVDLPIGINITRFQTLLALHRSYLTPGDSSSGWTAGAAAYYVGYLQPRTFLLKYNENGTITDAVDCALDPLSETKCTLKSFTVEKGIYQTSNFRVQPTESIVRFPNITNLCPFGEVFNATRFASVYAWNRKRISNCVADYSVLYNSASFSTFKCYGVSPTKLNDLCFTNVYADSFVIRGDEVREIAPGQTGKIADYNYKLPDDFTGCVIAWNSNNLDSKVGGNYNYLYRLFRKSNLKPFERDISTEIYQAGSTPCNGVEGFNCYFPLQSYGFQPTNGVGYQPYRVVVLSFELLHAPATVCGPKKSTNLVKNKCVNFNFNGLTGTGVLTESNKKFLPFQQFGRDIADTTDAVRDPQTLEILDITPCSFGGVSVITPGTNTSNQVAVLYQDVNCTEVPVAIHADQLTPTWRVYSTGSNVFQTRAGCLIGAEHVNNSYECDIPIGAGICASYQTQTNSPRRARSVASQSIIAYTMSLGAENSVAYSNNSIAIPTNFTISVTTEILPVSMTKTSVDCTMYICGDSTECSNLLLQYGSFCTQLNRALTGIAVEQDKNTQEVFAQVKQIYKTPPIKDFGGFNFSQILPDPSKPSKRSFIEDLLFNKVTLADAGFIKQYGDCLGDIAARDLICAQKFNGLTVLPPLLTDEMIAQYTSALLAGTITSGWTFGAGAALQIPFAMQMAYRFNGIGVTQNVLYENQKLIANQFNSAIGKIQDSLSSTASALGKLQDVVNQNAQALNTLVKCLSSNFGAISSVLNDILSRLDKVEAEVQIDRLITGRLQCLQTYVTQQLIRAAEIRASANLAATKMSECVLGQSKRVDFCGKGYHLMSFPQSAPHGVVFLHVTYVPAQEKNFTTAPAICHDGKAHFPREGVFVSNGTHWFVTQRNFYEPQIITTDNTFVSGNCDVVIGIVNNTVYDPLQPELDSGGGSGGGQIYEGKLTAEGLRFGIVASRFNHALVDRLVEGAIDAIVRHGGREEDITLVRVPGSWEIPVAAGELARKEDIDAVIAIGVLIRGATPHFDYIASEVSKGLADLSLELRKPITFGVITADTLEQAIERAGTKHGNKGWEAALSAIEMANLFKSLR

SEQ ID NO: 8327 - protein, 1307 aa, Artificial Sequence
  SARS-CoV-2/Sweden/01/2020__EPI_ISL_411951 spike protein (1-1147)(Q965C_S1003C) LumSynth construct
MFVFLVLLPLVSSQCVNLTTRTQLPPAYTNSFTRGVYYPDKVFRSSVLHSTQDLFLPFFSNVTWFHAIHVSGTNGTKRFDNPVLPFNDGVYFASTEKSNIIRGWIFGTTLDSKTQSLLIVNNATNVVIKVCEFQFCNDPFLGVYYHKNNKSWMESEFRVYSSANNCTFEYVSQPFLMDLEGKQGNFKNLREFVFKNIDGYFKIYSKHTPINLVRDLPQGFSALEPLVDLPIGINITRFQTLLALHRSYLTPGDSSSGWTAGAAAYYVGYLQPRTFLLKYNENGTITDAVDCALDPLSETKCTLKSFTVEKGIYQTSNFRVQPTESIVRFPNITNLCPFGEVFNATRFASVYAWNRKRISNCVADYSVLYNSASFSTFKCYGVSPTKLNDLCFTNVYADSFVIRGDEVRQIAPGQTGKIADYNYKLPDDFTGCVIAWNSNNLDSKVGGNYNYLYRLFRKSNLKPFERDISTEIYQAGSTPCNGVEGFNCYFPLQSYGFQPTNGVGYQPYRVVVLSFELLHAPATVCGPKKSTNLVKNKCVNFNFNGLTGTGVLTESNKKFLPFQQFGRDIADTTDAVRDPQTLEILDITPCSFGGVSVITPGTNTSNQVAVLYQDVNCTEVPVAIHADQLTPTWRVYSTGSNVFQTRAGCLIGAEHVNNSYECDIPIGAGICASYQTQTNSPRRARSVASQSIIAYTMSLGAENSVAYSNNSIAIPTNFTISVTTEILPVSMTKTSVDCTMYICGDSTECSNLLLQYGSFCTQLNRALTGIAVEQDKNTQEVFAQVKQIYKTPPIKDCGGFNFSQILPDPSKPSKRSFIEDLLFNKVTLADAGFIKQYGDCLGDIAARDLICAQKFNGLTVLPPLLTDEMIAQYTSALLAGTITSGWTFGAGAALQIPFAMQMAYRFNGIGVTQNVLYENQKLIANQFNSAIGKIQDSLSSTASALGKLQDVVNQNAQALNTLVKCLSSNFGAISSVLNDILSRLDKVEAEVQIDRLITGRLQCLQTYVTQQLIRAAEIRASANLAATKMSECVLGQSKRVDFCGKGYHLMSFPQSAPHGVVFLHVTYVPAQEKNFTTAPAICHDGKAHFPREGVFVSNGTHWFVTQRNFYEPQIITTDNTFVSGNCDVVIGIVNNTVYDPLQPELDSGGGSGGGQIYEGKLTAEGLRFGIVASRFNHALVDRLVEGAIDAIVRHGGREEDITLVRVPGSWEIPVAAGELARKEDIDAVIAIGVLIRGATPHFDYIASEVSKGLADLSLELRKPITFGVITADTLEQAIERAGTKHGNKGWEAALSAIEMANLFKSLR

SEQ ID NO: 8328 - protein, 1307 aa, Artificial Sequence
  SARS-CoV-2/Tianmen/HBCDC-HB-07/2020__EPI_ISL_412983 spike protein (1-1147)(Q965C_S1003C) LumSynth construct
MFVFLVLLPLVSSQCVNLTTRTQLPPAYTNSFTRGVYYPDKVFRSSVLHSTQDLFLPFFSNVTWFHAIHVSGTNGTKRFDNPVLPFNDGVYFASTEKSNIIRGWIFGTTLDSKTQSLLIVNNATNVVIKVCEFQFCNDPFLGVYYHKNNKSWMESEFRVYSSANNCTFEYVSQPFLMDLEGKQGNFKNLREFVFKNIDGYFKIYSKHTPINLVRDLPQGFSALEPLVDLPIGINITRFQTLLALHRSYLTPGDSSSGWTAGAAAYYVGYLQPRTFLLKYNENGTITDAVDCALDPLSETKCTLKSFTVEKGIYQTSNFRVQPTESIVRFPNITNLCPFGEVFNATRFASVYAWNRKRISNCVADYSVLYNSASFSTFKCYGVSPTKLNDLCFTNVYADSFVIRGDEVRQIAPGQTGKIADYNYKLPDDFTGCVIAWNSNNLDSKVGGNYNYLYRLFRKSNLKPFERDISTEIYQAGSTPCNGVEGFNCYFPLQSYGFQPTNGVGYQPYRVVVLSFELLHAPATVCGPKKSTNLVKNKCVNFNFNGLTGTGVLTESNKKFLPFQQFGRDIADTTDAVRDPQTLEILDITPCSFGGVSVITPGTNTSNQVAVLYQDLNCTEVPVAIHADQLTPTWRVYSTGSNVFQTRAGCLIGAEHVNNSYECDIPIGAGICASYQTQTNSPRRARSVASQSIIAYTMSLGAENSVAYSNNSIAIPTNFTISVTTEILPVSMTKTSVDCTMYICGDSTECSNLLLQYGSFCTQLNRALTGIAVEQDKNTQEVFAQVKQIYKTPPIKDFGGFNFSQILPDPSKPSKRSFIEDLLFNKVTLADAGFIKQYGDCLGDIAARDLICAQKFNGLTVLPPLLTDEMIAQYTSALLAGTITSGWTFGAGAALQIPFAMQMAYRFNGIGVTQNVLYENQKLIANQFNSAIGKIQDSLSSTASALGKLQDVVNQNAQALNTLVKCLSSNFGAISSVLNDILSRLDKVEAEVQIDRLITGRLQCLQTYVTQQLIRAAEIRASANLAATKMSECVLGQSKRVDFCGKGYHLMSFPQSAPHGVVFLHVTYVPAQEKNFTTAPAICHDGKAHFPREGVFVSNGTHWFVTQRNFYEPQIITTDNTFVSGNCDVVIGIVNNTVYDPLQPELDSGGGSGGGQIYEGKLTAEGLRFGIVASRFNHALVDRLVEGAIDAIVRHGGREEDITLVRVPGSWEIPVAAGELARKEDIDAVIAIGVLIRGATPHFDYIASEVSKGLADLSLELRKPITFGVITADTLEQAIERAGTKHGNKGWEAALSAIEMANLFKSLR

SEQ ID NO: 8329 - protein, 1307 aa, Artificial Sequence
  SARS-CoV-2/Hong Kong/case42_VM20002493/2020__EPI_ISL_414527 spike protein (1-1147)(Q965C_S1003C) LumSynth construct
MFVFLVLLPLVSSQCVNLTTRTQLPPAYTNSFTRGVYYPDKVFRSSVLHSTQDLFLPFFSNVTWFHAIHVSGTNGTKRFDNPVLPFNDGVYFASTEKSNIIRGWIFGTTLDSKTQSLLIVNNATNVVIKVCEFQFCNDPFLGVYYHKNNKSWMESEFRVYSSANNCTFEYVSQPFLMDLEGKQGNFKNLREFVFKNIDGYFKIYSKHTPINLVRDLPQGFSALEPLVDLPIGINITRFQTLLALHRSYLTPGDSSSGWTAGAAAYYVGYLQPRTFLLKYNENGTITDAVDCALDPLSETKCTLKSFTVEKGIYQTSNFRVQPTESIVRFPNITNLCPFGEVFNATRFASVYAWNRKRISNCVADYSVLYNSASFSTFKCYGVSPTKLNDLCFTNVYADSFVIRGDEVRQIAPGQTGKIADYNYKLPDDFTGCVIAWNSNNLDSKVGGNYNYLYRLFRKSNLKPFERDISTEIYQAGSTPCNGVEGFNCYFPLQSYGFQPTNGVGYQPYRVVVLSFELLHAPATVCGPKKSTNLVKNKCVNFNFNGLTGTGVLTESNKKFLPFQQFGRDIADTTDAVRDPQTLEILDITPCSFGGVSVITPGTNTSNQVAVLYQDVNCTEVPVAIHADQLTPTWRVYSTGSNVFQTRAGCLIGAEHVNNSYECDIPIGAGICASYQTQTNSPRRARSVASQSIIAYTMSLGAENSVAYSNNSIAIPTNFAISVTTEILPVSMTKTSVDCTMYICGDSTECSNLLLQYGSFCTQLNRALTGIAVEQDKNTQEVFAQVKQIYKTPPIKDFGGFNFSQILPDPSKPSKRSFIEDLLFNKVTLADAGFIKQYGDCLGDIAARDLICAQKFNGLTVLPPLLTDEMIAQYTSALLAGTITSGWTFGAGAALQIPFAMQMAYRFNGIGVTQNVLYENQKLIANQFNSAIGKIQDSLSSTASALGKLQDVVNQNAQALNTLVKCLSSNFGAISSVLNDILSRLDKVEAEVQIDRLITGRLQCLQTYVTQQLIRAAEIRASANLAATKMSECVLGQSKRVDFCGKGYHLMSFPQSAPHGVVFLHVTYVPAQEKNFTTAPAICHDGKAHFPREGVFVSNGTHWFVTQRNFYEPQIITTDNTFVSGNCDVVIGIVNNTVYDPLQPELDSGGGSGGGQIYEGKLTAEGLRFGIVASRFNHALVDRLVEGAIDAIVRHGGREEDITLVRVPGSWEIPVAAGELARKEDIDAVIAIGVLIRGATPHFDYIASEVSKGLADLSLELRKPITFGVITADTLEQAIERAGTKHGNKGWEAALSAIEMANLFKSLR

SEQ ID NO: 8330 - protein, 1307 aa, Artificial Sequence
  SARS-CoV-2/USA/CruiseA-23/2020__EPI_ISL_414482 spike protein (1-1147)(Q965C_S1003C) LumSynth construct
MFVFLVLLPLVSSQCVNLTTRTQLPPAYTNSFTRGVYYPDKVFRSSVLHSTQDLFLPFFSNVTWFHAIHVSGTNGTKRFDNPVLPFNDGVYFASTEKSNIIRGWIFGTTLDSKTQSLLIVNNATNVVIKVCEFQFCNDPFLGVYYHKNNKSWMESEFRVYSSANNCTFEYVSQPFLMDLEVKQGNFKNLREFVFKNIDGYFKIYSKHTPINLVRDLPQGFSALEPLVDLPIGINITRFQTLLALHRSYLTPGDSSSGWTAGAAAYYVGYLQPRTFLLKYNENGTITDAVDCALDPLSETKCTLKSFTVEKGIYQTSNFRVQPTESIVRFPNITNLCPFGEVFNATRFASVYAWNRKRISNCVADYSVLYNSASFSTFKCYGVSPTKLNDLCFTNVYADSFVIRGDEVRQIAPGQTGKIADYNYKLPDDFTGCVIAWNSNNLDSKVGGNYNYLYRLFRKSNLKPFERDISTEIYQAGSTPCNGVEGFNCYFPLQSYGFQPTNGVGYQPYRVVVLSFELLHAPATVCGPKKSTNLVKNKCVNFNFNGLTGTGVLTESNKKFLPFQQFGRDIADTTDAVRDPQTLEILDITPCSFGGVSVITPGTNTSNQVAVLYQDVNCTEVPVAIHADQLTPTWRVYSTGSNVFQTRAGCLIGAEHVNNSYECDIPIGAGICASYQTQTNSPRRARSVASQSIIAYTMSLGAENSVAYSNNSIAIPTNFTISVTTEILPVSMTKTSVDCTMYICGDSTECSNLLLQYGSFCTQLNRALTGIAVEQDKNTQEVFAQVKQIYKTPPIKDFGGFNFSQILPDPSKPSKRSFIEDLLFNKVTLADAGFIKQYGDCLGDIAARDLICAQKFNGLTVLPPLLTDEMIAQYTSALLAGTITSGWTFGAGAALQIPFAMQMAYRFNGIGVTQNVLYENQKLIANQFNSAIGKIQDSLSSTASALGKLQDVVNQNAQALNTLVKCLSSNFGAISSVLNDILSRLDKVEAEVQIDRLITGRLQCLQTYVTQQLIRAAEIRASANLAATKMSECVLGQSKRVDFCGKGYHLMSFPQSAPHGVVFLHVTYVPAQEKNFTTAPAICHDGKAHFPREGVFVSNGTHWFVTQRNFYEPQIITTDNTFVSGNCDVVIGIVNNTVYDPLQPELDSGGGSGGGQIYEGKLTAEGLRFGIVASRFNHALVDRLVEGAIDAIVRHGGREEDITLVRVPGSWEIPVAAGELARKEDIDAVIAIGVLIRGATPHFDYIASEVSKGLADLSLELRKPITFGVITADTLEQAIERAGTKHGNKGWEAALSAIEMANLFKSLR

SEQ ID NO: 8331 - protein, 1307 aa, Artificial Sequence
  SARS-CoV-2/Hong Kong/case85_VM20002868/2020__EPI_ISL_414519 spike protein (1-1147)(Q965C_S1003C) LumSynth construct
MFVFLVLVPLVSSQCVNLTTRTQLPPAYTNSFTRGVYYPDKVFRSSVLHSTQDLFLPFFSNVTWFHAIHVSGTNGTKRFDNPVLPFNDGVYFASTEKSNIIRGWIFGTTLDSKTQSLLIVNNATNVVIKVCEFQFCNDPFLGVYYHKNNKSWMESEFRVYSSANNCTFEYVSQPFLMDLEGKQGNFKNLREFVFKNIDGYFKIYSKHTPINLVRDLPQGFSALEPLVDLPIGINITRFQTLLALHRSYLTPGDSSSGWTAGAAAYYVGYLQPRTFLLKYNENGTITDAVDCALDPLSETKCTLKSFTVEKGIYQTSNFRVQPTESIVRFPNITNLCPFGEVFNATRFASVYAWNRKRISNCVADYSVLYNSASFSTFKCYGVSPTKLNDLCFTNVYADSFVIRGDEVRQIAPGQTGKIADYNYKLPDDFTGCVIAWNSNNLDSKVGGNYNYLYRLFRKSNLKPFERDISTEIYQAGSTPCNGVEGFNCYFPLQSYGFQPTNGVGYQPYRVVVLSFELLHAPATVCGPKKSTNLVKNKCVNFNFNGLTGTGVLTESNKKFLPFQQFGRDIADTTDAVRDPQTLEILDITPCSFGGVSVITPGTNTSNQVAVLYQDVNCTEVPVAIHADQLTPTWRVYSTGSNVFQTRAGCLIGAEHVNNSYECDIPIGAGICASYQTQTNSPRRARSVASQSIIAYTMSLGAENSVAYSNNSIAIPTNFTISVTTEILPVSMTKTSVDCTMYICGDSTECSNLLLQYGSFCTQLNRALTGIAVEQDKNTQEVFAQVKQIYKTPPIKDFGGFNFSQILPDPSKPSKRSFIEDLLFNKVTLADAGFIKQYGDCLGDIAARDLICAQKFNGLTVLPPLLTDEMIAQYTSALLAGTITSGWTFGAGAALQIPFAMQMAYRFNGIGVTQNVLYENQKLIANQFNSAIGKIQDSLSSTASALGKLQDVVNQNAQALNTLVKCLSSNFGAISSVLNDILSRLDKVEAEVQIDRLITGRLQCLQTYVTQQLIRAAEIRASANLAATKMSECVLGQSKRVDFCGKGYHLMSFPQSAPHGVVFLHVTYVPAQEKNFTTAPAICHDGKAHFPREGVFVSNGTHWFVTQRNFYEPQIITTDNTFVSGNCDVVIGIVNNTVYDPLQPELDSGGGSGGGQIYEGKLTAEGLRFGIVASRFNHALVDRLVEGAIDAIVRHGGREEDITLVRVPGSWEIPVAAGELARKEDIDAVIAIGVLIRGATPHFDYIASEVSKGLADLSLELRKPITFGVITADTLEQAIERAGTKHGNKGWEAALSAIEMANLFKSLR

SEQ ID NO: 8332 - protein, 1307 aa, Artificial Sequence; identical to SEQ ID NO: 8322
  SARS-CoV-2/England/200990660/2020__EPI_ISL_414523 spike protein (1-1147)(Q965C_S1003C) LumSynth construct

SEQ ID NO: 8333 - protein, 1307 aa, Artificial Sequence
  SARS-CoV-2/Australia/NSW09/2020__EPI_ISL_413595 spike protein (1-1147)(Q965C_S1003C) LumSynth construct
MFVFLVLLPLVSSQCVNLTTRTQLPPAYTNSFTRGVYYPDKVFRSSVLHSTQDLFLPFFSNVTWFHAIHVSGTNGTKRFDNPVLPFNDGVYFASTEKSNIIRGWIFGTTLDSKTQSLLIVNNATNVVIKVCEFQFCNDPFLGVYYHKNNKSWMESEFRVYSSANNCTFEYVSQPFLMDLEGKQGNFKNLREFVFKNIDGYFKIYSKHTPINLVRDLPQGFSALEPLVDLPIGINITRFQTLLALHRSYLTPGDSSSGWTAGAAAYYVGYLQPRTFLLKYNENGTITDAVDCALDPLSETKCTLKSFTVEKGIYQTSNFRVQPTESIVRFPNITNLCPFGEVFNATRFASVYAWNRKRISNCVADYSVLYNSASFSTFKCYGVSPTKLNDLCFTNVYADSFVIRGDEVRQIAPGQTGKIADYNYKLPDDFTGCVIAWNSNNLDSKVGGNYNYLYRLFRKSNLKPFERDISTEIYQAGSTPCNGVEGFNCYFPLQSYGFQPTNGVGYQPYRVVVLSFELLHAPATVCGPKKSTNLVKNKCVNFNFNGLTGTGVLTESNKKFLPFQQFGRDIADTTDAVRDPQTLEILDITPCSFGGVSVITPGTNTSNQVAVLYQDVNCTEVPVAIHADQLTPTWRVYSTGSNVFQTRAGCLIGAEHVNNSYECDIPIGAGICASYQTQTNSPRRARSVASQSIIAYTMSLGAENSVAYSNNSIAIPTNFTISVTTEILPVSMTKTSVDCTMYICGDSTECSNLLLQYGSFCTQLNRALTGIAVEQDKNTQEVFAQVKQIYKTPPIKDFGGFNFSQILPDPSKPSKRSFIEDLLFNKVTLADAGFIKQYGDCLGDIAARDLICAQKFNGLTVLPPLLTDEMIAQYTSALLAGTITSGWTFGAGAALQIPFAMQMAYRFNGIGVTQNVLYENQKLIANQFNSAIGKIQDSLSFTASALGKLQDVVNQNAQALNTLVKCLSSNFGAISSVLNDILSRLDKVEAEVQIDRLITGRLQCLQTYVTQQLIRAAEIRASANLAATKMSECVLGQSKRVDFCGKGYHLMSFPQSAPHGVVFLHVTYVPAQEKNFTTAPAICHDGKAHFPREGVFVSNGTHWFVTQRNFYEPQIITTDNTFVSGNCDVVIGIVNNTVYDPLQPELDSGGGSGGGQIYEGKLTAEGLRFGIVASRFNHALVDRLVEGAIDAIVRHGGREEDITLVRVPGSWEIPVAAGELARKEDIDAVIAIGVLIRGATPHFDYIASEVSKGLADLSLELRKPITFGVITADTLEQAIERAGTKHGNKGWEAALSAIEMANLFKSLR

SEQ ID NO: 8334 - protein, 1307 aa, Artificial Sequence; identical to SEQ ID NO: 8314
  SARS-CoV-2/Australia/NSW10/2020__EPI_ISL_413596 spike protein (1-1147)(Q965C_S1003C) LumSynth construct

SEQ ID NO: 8335 - protein, 1307 aa, Artificial Sequence
  SARS-CoV-2/Switzerland/1000477797/2020__EPI_ISL_413023 spike protein (1-1147)(Q965C_S1003C) LumSynth construct
MFVFLVLLPLVSSQCVNLTTRTQLPPAYTNSFTRGVYYPDKVFRSSVLHSTQDLFLPFFSNVTWFHAIHVSGTNGTKRFDNPVLPFNDGVYFASTEKSNIIRGWIFGTTLDSKTQSLLIVNNATNVVIKVCEFQFCNDPFLGVYYHKNNKSWMESEFRVYSSANNCTFEYVSQPFLMDLEGKQGNFKNLREFVFKNIDGYFNIYSKHTPINLVRDLPQGFSALEPLVDLPIGINITRFQTLLALHRSYLTPGDSSSGWTAGAAAYYVGYLQPRTFLLKYNENGTITDAVDCALDPLSETKCTLKSFTVEKGIYQTSNFRVQPTESIVRFPNITNLCPFGEVFNATRFASVYAWNRKRISNCVADYSVLYNSASFSTFKCYGVSPTKLNDLCFTNVYADSFVIRGDEVRQIAPGQTGKIADYNYKLPDDFTGCVIAWNSNNLDSKVGGNYNYLYRLFRKSNLKPFERDISTEIYQAGSTPCNGVEGFNCYFPLQSYGFQPTNGVGYQPYRVVVLSFELLHAPATVCGPKKSTNLVKNKCVNFNFNGLTGTGVLTESNKKFLPFQQFGRDIADTTDAVRDPQTLEILDITPCSFGGVSVITPGTNTSNQVAVLYQGVNCTEVPVAIHADQLTPTWRVYSTGSNVFQTRAGCLIGAEHVNNSYECDIPIGAGICASYQTQTNSPRRARSVASQSIIAYTMSLGAENSVAYSNNSIAIPTNFTISVTTEILPVSMTKTSVDCTMYICGDSTECSNLLLQYGSFCTQLNRALTGIAVEQDKNTQEVFAQVKQIYKTPPIKDFGGFNFSQILPDPSKPSKRSFIEDLLFNKVTLADAGFIKQYGDCLGDIAARDLICAQKFNGLTVLPPLLTDEMIAQYTSALLAGTITSGWTFGAGAALQIPFAMQMAYRFNGIGVTQNVLYENQKLIANQFNSAIGKIQDSLSSTASALGKLQDVVNQNAQALNTLVKCLSSNFGAISSVLNDILSRLDKVEAEVQIDRLITGRLQCLQTYVTQQLIRAAEIRASANLAATKMSECVLGQSKRVDFCGKGYHLMSFPQSAPHGVVFLHVTYVPAQEKNFTTAPAICHDGKAHFPREGVFVSNGTHWFVTQRNFYEPQIITTDNTFVSGNCDVVIGIVNNTVYDPLQPELDSGGGSGGGQIYEGKLTAEGLRFGIVASRFNHALVDRLVEGAIDAIVRHGGREEDITLVRVPGSWEIPVAAGELARKEDIDAVIAIGVLIRGATPHFDYIASEVSKGLADLSLELRKPITFGVITADTLEQAIERAGTKHGNKGWEAALSAIEMANLFKSLR

SEQ ID NO: 8336 - protein, 1307 aa, Artificial Sequence
  SARS-CoV-2/Belgium/BA-02291/2020__EPI_ISL_415159 spike protein (1-1147)(Q965C_S1003C) LumSynth construct
MFVFLVLLPLVSSQCVNLTTRTQLPPAYTNSFTRGVYYPDKVFRSSVLHSTQDLFLPFFSNVTWFHAIHVSGTNGTKRFDNPVLPFNDGVYFASTEKSNIIRGWIFGTTLDSKTQSLLIVNNATNVVIKVCEFQFCNDPFLGVYYHKNNKSWMESEFRVYSSANNCTFEYVSQPFLMDLEGKQGNFKNLREFVFKNIDGYFKIYSKHTPINLVRDLPQGFSALEPLVDLPIGINITRFQTLLALHRSYLTPGDSSSGWTAGAAAYYVGYLQPRTFLLKYNENGTITDAVDCALDPLSETKCTLKSFTVEKGIYQTSNFRVQPTESIVRFPNITNLCPFGEVFNATRFASVYAWNRKRISNCVADYSVLYNSASFSTFKCYGVSPTKLNDLCFTNVYADSFVIRGDEVRQIAPGQTGKIADYNYKLPDDFTGCVIAWNSNNLDSKVGGNYNYLYRLFRRSNLKPFERDISTEIYQAGSTPCNGVEGFNCYFPLQSYGFQPTNGVGYQPYRVVVLSFELLPAPATVCGPKKSTNLVKNKCVNFNFNGLTGTGVLTESNKKFLPFQQFGRDIADTTDAVRDPQTLEILDITPCSFGGVSVITPGTNTSNQVAVLYQGVNCTEVPVAIHADQLTPTWRVYSTGSNVFQTRAGCLIGAEHVNNSYECDIPIGAGICASYQTQTNSPRRARSVASQSIIAYTMSLGAENSVAYSNNSIAIPTNFTISVTTEILPVSMTKTSVDCTMYICGDSTECSNLLLQYGSFCTQLNRALTGIAVEQDKNTQEVFAQVKQIYKTPPIKDFGGFNFSQILPDPSKPSKRSFIEDLLFNKVTLADAGFIKQYGDCLGDIAARDLICAQKFNGLTVLPPLLTDEMIAQYTSALLAGTITSGWTFGAGAALQIPFAMQMAYRFNGIGVTQNVLYENQKLIANQFNSAIGKIQDSLSSAAPALGKLQDVVNQNAQALNTLVKCLSSNFGAISSVLNDILSRLDKVEAEVQIDRLITGRLQCLQTYVTQQLIRAAEIRASANLAATKMSECVLGQSKRVDFCGKGYHLMSFPQSAPHGVVFLHVTYVPAQEKNFTTAPAICHDGKAHFPREGVFVSNGTHWFVTQRNFYEPQIITTDNTFVSGNCDVVIGIVNNTVYDPLQPELDSGGGSGGGQIYEGKLTAEGLRFGIVASRFNHALVDRLVEGAIDAIVRHGGREEDITLVRVPGSWEIPVAAGELARKEDIDAVIAIGVLIRGATPHFDYIASEVSKGLADLSLELRKPITFGVITADTLEQAIERAGTKHGNKGWEAALSAIEMANLFKSLR

SEQ ID NO: 8337 - protein, 1307 aa, Artificial Sequence
  SARS-CoV-2/USA/WA8-UW5/2020__EPI_ISL_413486 spike protein (1-1147)(Q965C_S1003C) LumSynth construct
MFVFLVLLPLVSSQCVNLTTRTQLPPAYTNSFTRGVYYPDKVFRSSVLHSTQDLFLPFFSNVTWFHAIHVSGTNGTKRFDNPVLPFNDGVYFASTEKSNIIRGWIFGTTLDSKTQSLLIVNNATNVVIKVCEFQFCNDPFLGVYYHKNNKSWMESEFRVYSSANNCTFEYVSQPFLMDLEGKQGNFKNLREFVFKNIDGYFKIYSKHTPINLVRDLPQGFSALEPLVDLPIGINITRFQTLLALHRSYLTPGDSSSGWTAGAAAYYVGYLQPRTFLLKYNENGTITDAVDCALDPLSETKCTLKSFTVEKGIYQTSNFRVQPTESIVRFPNITNLCPFGEVFNATRFASVYAWNRKRISNCVADYSVLYNSASFSTFKCYGVSPTKLNDLCFTNVYADSFVIRGDEVRQIAPGQTGKIADYNYKLPDDFTGCVIAWNSNNLDSKVGGNYNYLYRLFRKSNLKPFERDISTEIYQAGSTPCNGVEGFNCYFPLQSYGFQPTNGVGYQPYRVVVLSFELLHAPATVCGPKKSTNLVKNKCVNFNFNGLTGTGVLTESNKKFLPFQQFGRDIADTTDAVRDPQTLEILDITPCSFGGVSVITPGTNTSNQVAVLYQDVNCTEVPVAIHADQLTPTWRVYSTGSNVFQTRAGCLIGAEYVNNSYECDIPIGAGICASYQTQTNSPRRARSVASQSIIAYTMSLGAENSVAYSNNSIAIPTNFTISVTTEILPVSMTKTSVDCTMYICGDSTECSNLLLQYGSFCTQLNRALTGIAVEQDKNTQEVFAQVKQIYKTPPIKDFGGFNFSQILPDPSKPSKRSFIEDLLFNKVTLADAGFIKQYGDCLGDIAARDLICAQKFNGLTVLPPLLTDEMIAQYTSALLAGTITSGWTFGAGAALQIPFAMQMAYRFNGIGVTQNVLYENQKLIANQFNSAIGKIQDSLSSTASALGKLQDVVNQNAQALNTLVKCLSSNFGAISSVLNDILSRLDKVEAEVQIDRLITGRLQCLQTYVTQQLIRAAEIRASANLAATKMSECVLGQSKRVDFCGKGYHLMSFPQSAPHGVVFLHVTYVPAQEKNFTTAPAICHDGKAHFPREGVFVSNGTHWFVTQRNFYEPQIITTDNTFVSGNCDVVIGIVNNTVYDPLQPELDSGGGSGGGQIYEGKLTAEGLRFGIVASRFNHALVDRLVEGAIDAIVRHGGREEDITLVRVPGSWEIPVAAGELARKEDIDAVIAIGVLIRGATPHFDYIASEVSKGLADLSLELRKPITFGVITADTLEQAIERAGTKHGNKGWEAALSAIEMANLFKSLR

SEQ ID NO: 8338 - protein, 1307 aa, Artificial Sequence
  SARS-CoV-2/England/20102000506/2020__EPI_ISL_415147 spike protein (1-1147)(Q965C_S1003C) LumSynth construct
MFVFLVLLPLVSSQCVNLTTRTQLPPAYTNSFTRGVYYPDKVFRSSVLHSTQDLFLPFFSNVTWFHAIHVSGTNGTKRFDNPVLPFNDGVYFASTEKSNIIRGWIFGTTLDSKTQSLLIVNNATNVVIKVCEFQFCNDPFLGVYYHKNNKSWMESEFRVYSSANNCTFEYVSQPFLMDLEGKQGNFKNLREFVFKNIDGYFKIYSKHTPINLVRDLPQGFSALEPLVDLPIGINITRFQTLLALHRSYLTPGDSSSGWTAGAAAYYVGYLQPRTFLLKYNENGTITDAVDCALDPLSETKCTLKSFTVEKGIYQTSNFRVQPTESIVRFPNITNLCPFGEVFNATRFASVYAWNRKRISNCVADYSVLYNSASFSTFKCYGVSPTKLNDLCFTNVYADSFVIRGDEVRQIAPGQTGKIADYNYKLPDDFTGCVIAWNSNNLDSKVGGNYNYLYRLFRKSNLKPFERDISTEIYQAGSTPCNGVEGFNCYFPLQSYGFQPTNGVGYQPYRVVVLSFELLHAPATVCGPKKSTNLVKNKCVNFNFNGLTGTGVLTESNKKFLPFQQFGRDIADTTDAVRDPQTLEILDITPCSFGGVSVITPGTNTSNQVAVLYQGVNCTEVPVAIHADQLTPTWRVYSTGSNVFQTRAGCLIGAEHVNNSYECDIPIGAGICASYQTQTNSPRRARSVASQSIIAYTMSLGAENSVAYSNNSIAIPTNFTISVTTEILPVSMTKTSVDCTMYICGDSTECSNLLLQYGSFCTQLNRALTGIAVEQDKNTQEVFAQVKQIYKTPPIKDFGGFNFSQILPDPSKPSKRSFIEDLLFNKVTLADAGFIKQYGYCLGDIAARDLICAQKFNGLTVLPPLLTDEMIAQYTSALLAGTITSGWTFGAGAALQIPFAMQMAYRFNGIGVTQNVLYENQKLIANQFNSAIGKIQDSLSSTASALGKLQDVVNQNAQALNTLVKCLSSNFGAISSVLNDILSRLDKVEAEVQIDRLITGRLQCLQTYVTQQLIRAAEIRASANLAATKMSECVLGQSKRVDFCGKGYHLMSFPQSAPHGVVFLHVTYVPAQEKNFTTAPAICHDGKAHFPREGVFVSNGTHWFVTQRNFYEPQIITTDNTFVSGNCDVVIGIVNNTVYDPLQPELDSGGGSGGGQIYEGKLTAEGLRFGIVASRFNHALVDRLVEGAIDAIVRHGGREEDITLVRVPGSWEIPVAAGELARKEDIDAVIAIGVLIRGATPHFDYIASEVSKGLADLSLELRKPITFGVITADTLEQAIERAGTKHGNKGWEAALSAIEMANLFKSLR

SEQ ID NO: 8339 - protein, 1307 aa, Artificial Sequence
  SARS-CoV-2/Belgium/VAG-03013/2020__EPI_ISL_415155 spike protein (1-1147)(Q965C_S1003C) LumSynth construct
MFVFLVLLPLVSSQCVNLTTRTQLPPAYTNSFTRGVYYPDKVFRSSVLHSTQDLFLPFFSNVTWFHAIHVSGTNGTKRFDNPVLPFNDGVYFASTEKSNIIRGWIFGTTLDSKTQSLLIVNNATNVVIKVCEFQFCNDPFLGVYYHKNNKSWMESEFRVYSSANNCTFEYVSQPFLMDLEGKQGNFKNLREFVFKNIDGYFKIYSKHTPINLVRDLPQGFSALEPLVDLPIGINITRFQTLLALHRSYLTPGDSSSGWTAGAAAYYVGYLQPRTFLLKYNENGTITDAVDCALDPLSETKCTLKSFTVEKGIYQTSNFRVQPTESIVRFPNITNLCPFGEVFNATRFASVYAWNRKRISNCVADYSVLYNSASFSTFKCYGVSPTKLNDLCFTNVYADSFVIRGDEVRQIAPGQTGKIADYNYKLPDDFTGCVIAWNSNNLDSKVGGNYNYLYRLFRKSNLKPFERDISTEIYQAGSTPCNGVEGFNCYFPLQSYGFQPTNGVGYQPYRVVVLSFELLHAPATVCGPKKSTNLVKNKCVNFNFNGLTGTGVLTESNKKFLPFQQFGRDIADTTDAVRDPQTLEILDITPCSFGGVSVITPGTNTSNQVAVLYQGVNCTEVPVAIHADQLTPTWRVYSTGSNVFQTRAGCLIGAEHVNNSYECDIPIGAGICASYQTQTNSPRRARSVASQSIIAYTMSLGAENSVAYSNNSIAIPTNFTISVTTEILPVSMTKTSVDCTMYICGDSTECSNLLLQYGSFCTQLNRALTGIAVEQDKNTQEVFAQVKQIYKTPPIKDFGGFNFSQILPDPSKPSKRSFIEDLLFNKVTLADAGFIKQYGDCLGDIAARDLICAQKFNGLTVLPPLLTDEMIAQYTSALLAGTITSGWTFGAGAALQIPFAMQMAYRFNGIGVTQNVLYENQKLIANQFNSAIGKIQDSLSSTATALGKLQDVVNQNAQALNTLVKCLSSNFGAISSVLNDILSRLDKVEAEVQIDRLITGRLQCLQTYVTQQLIRAAEIRASANLAATKMSECVLGQSKRVDFCGKGYHLMSFPQSAPHGVVFLHVTYVPAQEKNFTTAPAICHDGKAHFPREGVFVSNGTHWFVTQRNFYEPQIITTDNTFVSGNCDVVIGIVNNTVYDPLQPELDSGGGSGGGQIYEGKLTAEGLRFGIVASRFNHALVDRLVEGAIDAIVRHGGREEDITLVRVPGSWEIPVAAGELARKEDIDAVIAIGVLIRGATPHFDYIASEVSKGLADLSLELRKPITFGVITADTLEQAIERAGTKHGNKGWEAALSAIEMANLFKSLR

SEQ ID NO: 8340 - protein, 1307 aa, Artificial Sequence
  SARS-CoV-2/Belgium/BC-03016/2020__EPI_ISL_415157 spike protein (1-1147)(Q965C_S1003C) LumSynth construct
MFVFLVLLPLVSSQCVNLTTRTQLPPAYTNSFTRGVYYPDKVFRSSVLHSTQDLFLPFFSNVTWFHAIHVSGTNGTKRFDNPVLPFNDGVYFASTEKSNIIRGWIFGTTLDSKTQSLLIVNNATNVVIKVCEFQFCNDPFLGVYYHKNNKSWMESEFRVYSSANNCTFEYVSQPFLMDLEGKQGNFKNLREFVFKNIDGYFKIYSKHTPINLVRDLPQGFSALEPLVDLPIGINITRFQTLLALHRSYLTPGDSSSGWTAGAAAYYVGYLQPRTFLLKYNENGTITDAVDCALDPLSETKCTLKSFTVEKGIYQTSNFRVQPTESIVRFPNITNLCPFGEVFNATRFASVYAWNRKRISNCVADYSVLYNSASFSTFKCYGVSPTKLNDLCFTNVYADSFVIRGDEVRQIAPGQTGKIADYNYKLPDDFTGCVIAWNSNNLDSKVGGNYNYLYRLFRKSNLKPFERDISTEIYQAGSTPCNGVEGFNCYFPLQSYGFQPTNGVGYQPYRVVVLSFELLHAPATVCGPKKSTNLVKNKCVNFNFNGLTGTGVLTESNKKFLPFQQFGRDIADTTDAVRDPQTLEILDITPCSFGGVSVITPGTNTSNQVAVLYQGVNCTEVPVAIHADQLTPTWRVYSTGSNVFQTRAGCLIGAEHVNNSYECDIPIGAGICASYQTQTNSPRRARSVASQSIIAYTMSLGAENSVAYSNNSIAIPTNFTISVTTEILPVSMTKTSVDCTMYICGDSTECSNLLLQYGSFCTQLNRALTGIAVEQDKNTQEVFAQVKQIYKTPPIKDFGGFNFSQILPDPSKPSKRSFIEDLLFNKVTLADAGFIKQYGDCLGDIAARDLICAQKFNGLTVLPPLLTDEMIAQYTSALLAGTITSGWTFGAGAALQIPFAMQMAYRFNGIGVTQNVLYENQKLIANQFNSAIGKIQDSLSSTAPALGKLQDVVNQNAQALNTLVKCLSSNFGAISSVLNDILSRLDKVEAEVQIDRLITGRLQCLQTYVTQQLIRAAEIRASANLAATKMSECVLGQSKRVDFCGKGYHLMSFPQSAPHGVVFLHVTYVPAQEKNFTTAPAICHDGKAHFPREGVFVSNGTHWFVTQRNFYEPQIITTDNTFVSGNCDVVIGIVNNTVYDPLQPELDSGGGSGGGQIYEGKLTAEGLRFGIVASRFNHALVDRLVEGAIDAIVRHGGREEDITLVRVPGSWEIPVAAGELARKEDIDAVIAIGVLIRGATPHFDYIASEVSKGLADLSLELRKPITFGVITADTLEQAIERAGTKHGNKGWEAALSAIEMANLFKSLR

SEQ ID NO: 8341 - protein, 1307 aa, Artificial Sequence
  SARS-CoV-2/Germany/BavPat3/2020__EPI_ISL_414521 spike protein (1-1147)(Q965C_S1003C) LumSynth construct
MFVFLVLLPLVSSQCVNLTTRTQLPPAYTNSFTRGVYYPDKVFRSSVLHSTQDLFLPFFSNVTWFHAIHVSGTNGTKRFDNPVLPFNDGVYFASTEKSNIIRGWIFGTTLDSKTQSLLIVNNATNVVIKVCEFQFCNDPFLGVYYHKNNKSWMESEFRVYSSANNCTFEYVSQPFLMDLEGKQGNFKNLREFVFKNIDGYFKIYSKHTPINLVRDLPQGFSALEPLVDLPIGINITRFQTLLALHRSYLTPGDSSSGWTAGAAAYYVGYLQPRTFLLKYNENGTITDAVDCALDPLSETKCTLKSFTVEKGIYQTSNFRVQPTESIVRFPNITNLCPFGEVFNATRFASVYAWNRKRISNCVADYSVLYNSASFSTFKCYGVSPTKLNDLCFTNVYADSFVIRGDEVRQIAPGQTGKIADYNYKLPDDFTGCVIAWNSNNLDSKVGGNYNYLYRLFRKSNLKPFERDISTEIYQAGSTPCNGVEGFNCYFPLQSYGFQPTNGVGYQPYRVVVLSFELLHAPATVCGPKKSTNLVKNKCVNFNFNGLTGTGVLTESNKKFLPFQQFGRDIADTTDAVRDPQTLEILDITPCSFGGVSVITPGTNTSNQVAVLYQDVNCTEVPVAIHADQLTPTWRVYSTGSNVFQTRAGCLIGAEHVNNSYECDIPIGAGICASYQTQTNSPRRARSVASQSIIAYTMSLGAENSVAYSNNSIAIPTNFTISVTTEILPVSMTKTSVDCTMYICGDSTECSNLLLQYGSFCTQLNRALTGIAVEQDKNTQQVFAQVKQIYKTPPIKDFGGFNFSQILPDPSKPSKRSFIEDLLFNKVTLADAGFIKQYGDCLGDIAARDLICAQKFNGLTVLPPLLTDEMIAQYTSALLAGTITSGWTFGAGAALQIPFAMQMAYRFNGIGVTQNVLYENQKLIANQFNSAIGKIQDSLSSTASALGKLQDVVNQNAQALNTLVKCLSSNFGAISSVLNDILSRLDKVEAEVQIDRLITGRLQCLQTYVTQQLIRAAEIRASANLAATKMSECVLGQSKRVDFCGKGYHLMSFPQSAPHGVVFLHVTYVPAQEKNFTTAPAICHDGKAHFPREGVFVSNGTHWFVTQRNFYEPQIITTDNTFVSGNCDVVIGIVNNTVYDPLQPELDSGGGSGGGQIYEGKLTAEGLRFGIVASRFNHALVDRLVEGAIDAIVRHGGREEDITLVRVPGSWEIPVAAGELARKEDIDAVIAIGVLIRGATPHFDYIASEVSKGLADLSLELRKPITFGVITADTLEQAIERAGTKHGNKGWEAALSAIEMANLFKSLR

SEQ ID NO: 8342 - protein, 1307 aa, Artificial Sequence
  SARS-CoV-2/France/HF1805/2020__EPI_ISL_414628 spike protein (1-1147)(Q965C_S1003C) LumSynth construct
MFVFLVLLPLVSSQCVNLTTRTQLPPAYTNSFTRGVYYPDKVFRSSVLHSTQDLFLPFFSNVTWFHAIHVSGTNGTKRFDNPVLPFNDGVYFASTEKSNIIRGWIFGTTLDSKTQSLLIVNNATNVVIKVCEFQFCNDPFLGVYYHKNNKSWMESEFRVYSSANNCTFEYVSQPFLMDLEGKQGNFKNLREFVFKNIDGYFKIYSKHTPINLVRDLPQGFSALEPLVDLPIGINITRFQTLLALHRSYLTPGDSSSGWTAGAAAYYVGYLQPRTFLLKYNENGTITDAVDCALDPLSETKCTLKSFTVEKGIYQTSNFRVQPTESIVRFPNITNLCPFGEVFNATRFASVYAWNRKRISNCVADYSVLYNSASFSTFKCYGVSPTKLNDLCFTNVYADSFVIRGDEVRQIAPGQTGKIADYNYKLPDDFTGCVIAWNSNNLDSKVGGNYNYLYRLFRKSNLKPFERDISTEIYQAGSTPCNGVEGFNCYFPLQSYGFQPTNGVGYQPYRVVVLSFELLHAPATVCGPKKSTNLVKNKCVNFNFNGLTGTGVLTESNKKFLPFQQFGRDIADTTDAVRDPQTLEILDITPCSFGGVSVITPGTNTSNQVAVLYQGVNCTEVPVAIHADQLTPTWRVYSTGSNVFQTRAGCLIGAEHVNNSYECDIPIGAGICASYQTQTNSPRRARSVASQSIIAYTMSLGAENSVAYSNNSIAIPTNFTISVTTEILPVSMTKTSVDCTMYICGDSTECSNLLLQYGSFCTQLNRALTGIAVEQDKNTQEVFAQVKQIYKTPPIKDFGGFNFSQILPDPSKPSKRSFIEDLLFNKVTLADAGFIKQYGDCLGDIAARDLICAQKFNGLTVLPPLLTDEMIAQYTSALLAGTITSGWTFGAGAALQIPFAMQMAYRFNGIGVTQNVLYENQKLIANQFNSAIGKIQDSLSSTASALGKLQDVVNQNAQALNTLVKCLSSNFGAISSVLNDILSRLDKVEAEVQIDRLITGRLQCLQTYVTQQLIRAAEIRASANLAATKMSECVLGQSKRVDFCGKGYHLMSFPQSAPHGVVFLHVTYVPAQEKNFTTAPAICHDGKAHFPREGVFVSNGTHWFVTQRNFYEPQIITTDNTFVSGNCDVVIGVVNNTVYDPLQPELDSGGGSGGGQIYEGKLTAEGLRFGIVASRFNHALVDRLVEGAIDAIVRHGGREEDITLVRVPGSWEIPVAAGELARKEDIDAVIAIGVLIRGATPHFDYIASEVSKGLADLSLELRKPITFGVITADTLEQAIERAGTKHGNKGWEAALSAIEMANLFKSLR

SEQ ID NO: 8343 - protein, 1307 aa, Artificial Sequence
  SARS-CoV-2/Netherlands/ZuidHolland_9/2020__EPI_ISL_414445 spike protein (1-1147)(Q965C_S1003C) LumSynth construct
MFVFLVLLPLVSSQCVNLTTRTQLPPAYTNSFTRGVYYPDKVFRSSVLHSTQDLFLPFFSNVTWFHAIHVSGTNGTKRFDNPVLPFNDGVYFASTEKSNIIRGWIFGTTLDSKTQSLLIVNNATNVVIKVCEFQFCNDPFLGVYYHKNNKSWMESEFRVYSSANNCTFEYVSQPFLMDLEGKQGNFKNLREFVFKNIDGYFKIYSKHTPINLVRDLPQGFSALEPLVDLPIGINITRFQTLLALHRSYLTPGDSSSGWTAGAAAYYVGYLQPRTFLLKYNENGTITDAVDCALDPLSETKCTLKSFTVEKGIYQTSNFRVQPTESIVRFPNITNLCPFGEVFNATRFASVYAWNRKRISNCVADYSVLYNSASFSTFKCYGVSPTKLNDLCFTNVYADSFVIRGDEVRQIAPGQTGKIADYNYKLPDDFTGCVIAWNSNNLDSKVGGNYNYLYRLFRKSNLKPFERDISTEIYQAGSTPCNGVEGFNCYFPLQSYGFQPTNGVGYQPYRVVVLSFELLHAPATVCGPKKSTNLVKNKCVNFNFNGLTGTGVLTESNKKFLPFQQFGRDIADTTDAVRDPQTLEILDITPCSFGGVSVITPGTNTSNQVAVLYQGVNCTEVPVAIHADQLTPTWRVYSTGSNVFQTRAGCLIGAEHVNNSYECDIPIGAGICASYQTQTNSPRRARSVASQSIIAYTMSLGAENSVAYSNNSIAIPTNFTISVTTEILPVSMTKTSVDCTMYICGDSTECSNLLLQYGSFCTQLNRALTGIAVEQDKNTQEVFAQVKQIYKTPPIKDFGGFNFSQILPDPSKPSKRSFIEDLLFNKVTLADAGFIKQYGDCLGDIAARDLICVQKFNGLTVLPPLLTDEMIAQYTSALLAGTITSGWTFGAGAALQIPFAMQMAYRFNGIGVTQNVLYENQKLIANQFNSAIGKIQDSLSSTASALGKLQDVVNQNAQALNTLVKCLSSNFGAISSVLNDILSRLDKVEAEVQIDRLITGRLQCLQTYVTQQLIRAAEIRASANLAATKMSECVLGQSKRVDFCGKGYHLMSFPQSAPHGVVFLHVTYVPAQEKNFTTAPAICHDGKAHFPREGVFVSNGTHWFVTQRNFYEPQIITTDNTFVSGNCDVVIGIVNNTVYDPLQPELDSGGGSGGGQIYEGKLTAEGLRFGIVASRFNHALVDRLVEGAIDAIVRHGGREEDITLVRVPGSWEIPVAAGELARKEDIDAVIAIGVLIRGATPHFDYIASEVSKGLADLSLELRKPITFGVITADTLEQAIERAGTKHGNKGWEAALSAIEMANLFKSLR

SEQ ID NO: 8344 - protein, 1307 aa, Artificial Sequence
  SARS-CoV-2/Finland/FIN03032020A/2020__EPI_ISL_413602 spike protein (1-1147)(Q965C_S1003C) LumSynth construct
MFVFLVLLPLVSSQCVNLTTRTQLPPAYTNSFTRGVYYPDKVFRSSVLHSTQDLFLPFFSNVTWFHAIHVSGTNGTKRFDNPVLPFNDGVYFASTEKSNIIRGWIFGTTLDSKTQSLLIVNNATNVVIKVCEFQFCNDPFLGVYYHKNNKSWMESEFRVYSSANNCTFEYVSQPFLMDLEGKQGNFKNLREFVFKNIDGYFKIYSKHTPINLVRDLPQGFSALEPLVDLPIGINITRFQTLLALHRSYLTPGDSSSGWTAGAAAYYVGYLQPRTFLLKYNENGTITDAVDCALDPLSETKCTLKSFTVEKGIYQTSNFRVQPTESIVRFPNITNLCPFGEVFNATRFASVYAWNRKRISNCVADYSVLYNSASFSTFKCYGVSPTKLNDLCFTNVYADSFVIRGDEVRQIAPGQTGKIADYNYKLPDDFTGCVISWNSNNLDSKVGGNYNYLYRLFRKSNLKPFERDISTEIYQAGSTPCNGVEGFNCYFPLQSYGFQPTNGVGYQPYRVVVLSFELLHAPATVCGPKKSTNLVKNKCVNFNFNGLTGTGVLTESNKKFLPFQQFGRDIADTTDAVRDPQTLEILDITPCSFGGVSVITPGTNTSNQVAVLYQGVNCTEVPVAIHADQLTPTWRVYSTGSNVFQTRAGCLIGAEHVNNSYECDIPIGAGICASYQTQTNSPRRARSVASQSIIAYTMSLGAENSVAYSNNSIAIPTNFTISVTTEILPVSMTKTSVDCTMYICGDSTECSNLLLQYGSFCTQLNRALTGIAVEQDKNTQEVFAQVKQIYKTPPIKDFGGFNFSQILPDPSKPSKRSFIEDLLFNKVTLADAGFIKQYGDCLGDIAARDLICAQKFNGLTVLPPLLTDEMIAQYTSALLAGTITSGWTFGAGAALQIPFAMQMAYRFNGIGVTQNVLYENQKLIANQFNSAIGKIQDSLSSTASALGKLQDVVNQNAQALNTLVKCLSSNFGAISSVLNDILSRLDKVEAEVQIDRLITGRLQCLQTYVTQQLIRAAEIRASANLAATKMSECVLGQSKRVDFCGKGYHLMSFPQSAPHGVVFLHVTYVPAQEKNFTTAPAICHDGKAHFPREGVFVSNGTHWFVTQRNFYEPQIITTDNTFVSGNCDVVIGIVNNTVYDPLQPELDSGGGSGGGQIYEGKLTAEGLRFGIVASRFNHALVDRLVEGAIDAIVRHGGREEDITLVRVPGSWEIPVAAGELARKEDIDAVIAIGVLIRGATPHFDYIASEVSKGLADLSLELRKPITFGVITADTLEQAIERAGTKHGNKGWEAALSAIEMANLFKSLR

SEQ ID NO: 8345 - protein, 1307 aa, Artificial Sequence
  SARS-CoV-2/France/GE1977/2020__EPI_ISL_414632 spike protein (1-1147)(Q965C_S1003C) LumSynth construct
MFVFLVLLPLVSSQCVNLTTRTQLPPAYTNSFTRGVYYPDKVFRSSVLHSTQDLFLPFFSNVTWFHAIHVSGTNGTKRFDNPVLPFNDGVYFASTEKSNIIRGWIFGTTLDSKTQSLLIVNNATNVVIKVCEFQFCNDPFLGVYYHKNNKSWMESEFRVYSSANNCTFEYVSQPFLMDLEGKQGNFKNLREFVFKNIDGYFKIYSKHTPINLVRDLPQGFSALEPLVDLPIGINITRFQTLLALHRSYLTPGDSSSGWTAGAAAYYVGYLQPRTFLLKYNENGTITDAVDCALDPLSETKCTLKSFTVEKGIYQTSNFRVQPTESIVRFPNITNLCPFGEVFNATRFASVYAWNRKRISNCVADYSVLYNSASFSTFKCYGVSPTKLNDLCFTNVYADSFVIRGDEVRQIAPGQTGKIADYNYKLPDDFTGCVIAWNSNNLDSKVGGNYNYLYRLFRKSNLKPFERDISTEIYQAGSTPCNGVEGFNCYFPLQSYGFQPTNGVGYQPYRVVVLSFELLHAPATVCGPKKSTNLVKNKCVNFNFNGLTGTGVLTESNKKFLPFQQFGRDIADTTDAVRDPQTLEILDITPCSFGGVSVITPGTNTSNQVAVLYQGVNCTEVPVAIHADQLTPTWRVYSTGSNVFQTRAGCLIGAEHVNNSYECDIPIGAGICASYQTQTNSPRRARSVASQSIIAYTMSLGAENSVAYSNNSIAIPTNFTISVTTEILPVSMTKTSVDCTMYICGDSTECSNLLLQYGSFCTQLNRALTGIAVEQDKNTQEVFAQVKQIYKTPPIKDFGGFNFSQILPDPSKPSKRSFIEDLLFNKVTLADAGFIKQYGDCLGDIAARDLICAQKFNGLTVLPPLLTDEMIAQYTSALLAGTITSGWTFGAGAALQIPFAMQMAYRFNGIGVTQNVLYENQKLIANQFNSAIGKIQDSLFSTASALGKLQDVVNQNAQALNTLVKCLSSNFGAISSVLNDILSRLDKVEAEVQIDRLITGRLQCLQTYVTQQLIRAAEIRASANLAATKMSECVLGQSKRVDFCGKGYHLMSFPQSAPHGVVFLHVTYVPAQEKNFTTAPAICHDGKAHFPREGVFVSNGTHWFVTQRNFYEPQIITTDNTFVSGNCDVVIGIVNNTVYDPLQPELDSGGGSGGGQIYEGKLTAEGLRFGIVASRFNHALVDRLVEGAIDAIVRHGGREEDITLVRVPGSWEIPVAAGELARKEDIDAVIAIGVLIRGATPHFDYIASEVSKGLADLSLELRKPITFGVITADTLEQAIERAGTKHGNKGWEAALSAIEMANLFKSLR

SEQ ID NO: 8346 - protein, 1307 aa, Artificial Sequence
  SARS-CoV-2/Finland/FIN-313/2020__EPI_ISL_414641 spike protein (1-1147)(Q965C_S1003C) LumSynth construct
MFVFLVLLPLVSSQCVNLTTRTQLPPAYTNSFTRGVYYPDKVFRSSVLHSTQDLFLPFFSNVTWFHAIHVSGTNGTKRFDNPVLPFNDGVYFASTEKSNIIRGWIFGTTLDSKTQSLLIVNNATNVVIKVCEFQFCNDPFLGVYYHKNNKSWMESEFRVYSSANNCTFEYVSQPFLMDLEGKQGNFKNLREFVFKNIDGYFKIYSKHTPINLVRDLPQGFSALEPLVDLPIGINITRFKTLLALHRSYLTPGDSSSGWTAGAAAYYVGYLQPRTFLLKYNENGTITDAVDCALDPLSETKCTLKSFTVEKGIYQTSNFRVQPTESIVRFPNITNLCPFGEVFNATRFASVYAWNRKRISNCVADYSVLYNSASFSTFKCYGVSPTKLNDLCFTNVYADSFVIRGDEVRQIAPGQTGKIADYNYKLPDDFTGCVIAWNSNNLDSKVGGNYNYLYRLFRKSNLKPFERDISTEIYQAGSTPCNGVEGFNCYFPLQSYGFQPTNGVGYQPYRVVVLSFELLHAPATVCGPKKSTNLVKNKCVNFNFNGLTGTGVLTESNKKFLPFQQFGRDIADTTDAVRDPQTLEILDITPCSFGGVSVITPGTNTSNQVAVLYQGVNCTEVPVAIHADQLTPTWRVYSTGSNVFQTRAGCLIGAEHVNNSYECDIPIGAGICASYQTQTNSPRRARSVASQSIIAYTMSLGAENSVAYSNNSIAIPTNFTISVTTEILPVSMTKTSVDCTMYICGDSTECSNLLLQYGSFCTQLNRALTGIAVEQDKNTQEVFAQVKQIYKTPPIKDFGGFNFSQILPDPSKPSKRSFIEDLLFNKVTLADAGFIKQYGDCLGDIAARDLICAQKFNGLTVLPPLLTDEMIAQYTSALLAGTITSGWTFGAGAALQIPFAMQMAYRFNGIGVTQNVLYENQKLIANQFNSAIGKIQDSLSSTASALGKLQDVVNQNAQALNTLVKCLSSNFGAISSVLNDILSRLDKVEAEVQIDRLITGRLQCLQTYVTQQLIRAAEIRASANLAATKMSECVLGQSKRVDFCGKGYHLMSFPQSAPHGVVFLHVTYVPAQEKNFTTAPAICHDGKAHFPREGVFVSNGTHWFVTQRNFYEPQIITTDNTFVSGNCDVVIGIVNNTVYDPLQPELDSGGGSGGGQIYEGKLTAEGLRFGIVASRFNHALVDRLVEGAIDAIVRHGGREEDITLVRVPGSWEIPVAAGELARKEDIDAVIAIGVLIRGATPHFDYIASEVSKGLADLSLELRKPITFGVITADTLEQAIERAGTKHGNKGWEAALSAIEMANLFKSLR

SEQ ID NO: 8347 - protein, 1307 aa, Artificial Sequence
  SARS-CoV-2/Netherlands/ZuidHolland_2/2020__EPI_ISL_414556 spike protein (1-1147)(Q965C_S1003C) LumSynth construct
MFVFLVLLPLVSSQCVNLTTRTQLPPAYTNSFTRGVYYPDKVFRSSVLHSTQDLFLPFFSNVTWFHAIHVSGTNGTKRFDNPVLPFNDGVYFASTEKSNIIRGWIFGTTLDSKTQSLLIVNNATNVVIKVCEFQFCNDPFLGVYYHKNNKSWMESEFRVYSSANNCTFEYVSQPFLMDLEGKQGNFKNLREFVFKNIDGYFKIYSKHTPINLVRDLPQGFSALEPLVDLPIGINITRFQTLLALHRSYLTPGDSSSGWTAGAAAYYVGYLQPRTFLLKYNENGTITDAVDCALDPLSETKCTLKSFTVEKGIYQTSNFRVQPTESIVRFPNITNLCPFGEVFNATRFASVYAWNRKRISNCVADYSVLYNSASFSTFKCYGVSPTKLNDLCFTNVYADSFVIRGDEVRQIAPGQTGKIADYNYKLPDDFTGCVIAWNSNNLDSKVGGNYNYLYRLFRKSNLKPFERDISTEIYQAGSTPCNGVEGFNCYFPLQSYGFQPTNGVGYQPYRVVVLSFELLHAPATVCGPKKSTNLVKNKCVNFNFNGLTGTGVLTESNKKFLPFQQFGRDIADTTDAVRDPQTLEILDITPCSFGGVSVITPGTNTSNQVAVLYQGVNCTEVPVAIHADQLTPTWRVYSTGSNVFQTRAGCLIGAEHVNNSYECDIPIGAGICASYQTQTNSPRRARSVASQSIIAYTMSLGAENSVAYSNNSIAIPTNFTISVTTEILPVSMTKTSVDCTMYICGDSTECSNLLLQYGSFCTQLNRALTGIALEQDKNTQEVFAQVKQIYKTPPIKDFGGFNFSQILPDPSKPSKRSFIEDLLFNKVTLADAGFIKQYGDCLGDIAARDLICAQKFNGLTVLPPLLTDEMIAQYTSALLAGTITSGWTFGAGAALQIPFAMQMAYRFNGIGVTQNVLYENQKLIANQFNSAIGKIQDSLSSTASALGKLQDVVNQNAQALNTLVKCLSSNFGAISSVLNDILSRLDKVEAEVQIDRLITGRLQCLQTYVTQQLIRAAEIRASANLAATKMSECVLGQSKRVDFCGKGYHLMSFPQSAPHGVVFLHVTYVPAQEKNFTTAPAICHDGKAHFPREGVFVSNGTHWFVTQRNFYEPQIITTDNTFVSGNCDVVIGIVNNTVYDPLQPELDSGGGSGGGQIYEGKLTAEGLRFGIVASRFNHALVDRLVEGAIDAIVRHGGREEDITLVRVPGSWEIPVAAGELARKEDIDAVIAIGVLIRGATPHFDYIASEVSKGLADLSLELRKPITFGVITADTLEQAIERAGTKHGNKGWEAALSAIEMANLFKSLR

SEQ ID NO: 8348 - protein, 1307 aa, Artificial Sequence
  SARS-CoV-2/USA/WA-UW31/2020__EPI_ISL_414618 spike protein (1-1147)(Q965C_S1003C) LumSynth construct
MFVFLVLLPLVSSQCVNLTTRTQLPPAYTNSFTRGVYYPDKVFRSSVLHSTQDLFLPFFSNVTWFHAIHVSGTNGTKRFDNPVLPFNDGVYFASTEKSNIIRGWIFGTTLDSKTQSLLIVNNATNVVIKVCEFQFCNDPFLGVYYHKNNKSWMESEFRVYSSANNCTFEYVSQPFLMDLEGKQGNFKNLREFVFKNIDGYFKIYSKHTPINLVRDLPQGFSALEPLVDLPIGINITRFQTLLALHRSYLTPGDSSSGWTAGAAAYYVGYLQPRTFLLKYNENGTITDAVDCALDPLSETKCTLKSFTVEKGIYQTSNFRVQPTESIVRFPNITNLCPFGEVFNATRFASVYAWNRKRISNCVADYSVLYNSASFSTFKCYGVSPTKLNDLCFTNVYADSFVIRGDEVRQIAPGQTGKIADYNYKLPDDFTGCVIAWNSNNLDSKVGGNYNYLYRLFRKSNLKPFERDISTEIYQAGSTPCNGAEGFNCYFPLQSYGFQPTNGVGYQPYRVVVLSFELLHAPATVCGPKKSTNLVKNKCVNFNFNGLTGTGVLTESNKKFLPFQQFGRDIADTTDAVRDPQTLEILDITPCSFGGVSVITPGTNTSNQVAVLYQDVNCTEVPVAIHADQLTPTWRVYSTGSNVFQTRAGCLIGAEHVNNSYECDIPIGAGICASYQTQTNSPRRARSVASQSIIAYTMSLGAENSVAYSNNSIAIPTNFTISVTTEILPVSMTKTSVDCTMYICGDSTECSNLLLQYGSFCTQLNRALTGIAVEQDKNTQEVFAQVKQIYKTPPIKDFGGFNFSQILPDPSKPSKRSFIEDLLFNKVTLADAGFIKQYGDCLGDIAARDLICAQKFNGLTVLPPLLTDEMIAQYTSALLAGTITSGWTFGAGAALQIPFAMQMAYRFNGIGVTQNVLYENQKLIANQFNSAIGKIQDSLSSTASALGKLQDVVNQNAQALNTLVKCLSSNFGAISSVLNDILSRLDKVEAEVQIDRLITGRLQCLQTYVTQQLIRAAEIRASANLAATKMSECVLGQSKRVDFCGKGYHLMSFPQSAPHGVVFLHVTYVPAQEKNFTTAPAICHDGKAHFPREGVFVSNGTHWFVTQRNFYEPQIITTDNTFVSGNCDVVIGIVNNTVYDPLQPELDSGGGSGGGQIYEGKLTAEGLRFGIVASRFNHALVDRLVEGAIDAIVRHGGREEDITLVRVPGSWEIPVAAGELARKEDIDAVIAIGVLIRGATPHFDYIASEVSKGLADLSLELRKPITFGVITADTLEQAIERAGTKHGNKGWEAALSAIEMANLFKSLR

SEQ ID NO: 8349 - protein, 1307 aa, Artificial Sequence
  SARS-CoV-2/South Korea/SNU01/2020__EPI_ISL_411929 spike protein (1-1147)(Q965C_S1003C) LumSynth construct
MFVFLVLLPLVSSQCVNLTTRTQLPPAYTNSFTRGVYYPDKVFRSSVLHSTQDLFLPFFSNVTWFHAIHVSGTNGTKRFDNPVLPFNDGVYFASTEKSNIIRGWIFGTTLDSKTQSLLIVNNATNVVIKVCEFQFCNDPFLGVYYHKNNKSWMESEFRVYSSANNCTFEYVSQPFLMDLEGKQGNFKNLREFVFKNIDGYFKIYSKHTPINLVRDLPQGFWALEPLVDLPIGINITRFQTLLALHRSYLTPGDSSSGWTAGAAAYYVGYLQPRTFLLKYNENGTITDAVDCALDPLSETKCTLKSFTVEKGIYQTSNFRVQPTESIVRFPNITNLCPFGEVFNATRFASVYAWNRKRISNCVADYSVLYNSASFSTFKCYGVSPTKLNDLCFTNVYADSFVIRGDEVRQIAPGQTGKIADYNYKLPDDFTGCVIAWNSNNLDSKVGGNYNYLYRLFRKSNLKPFERDISTEIYQAGSTPCNGVEGFNCYFPLQSYGFQPTNGVGYQPYRVVVLSFELLHAPATVCGPKKSTNLVKNKCVNFNFNGLTGTGVLTESNKKFLPFQQFGRDIADTTDAVRDPQTLEILDITPCSFGGVSVITPGTNTSNQVAVLYQDVNCTEVPVAIHADQLTPTWRVYSTGSNVFQTRAGCLIGAEHVNNSYECDIPIGAGICASYQTQTNSPRRARSVASQSIIAYTMSLGAENSVAYSNNSIAIPTNFTISVTTEILPVSMTKTSVDCTMYICGDSTECSNLLLQYGSFCTQLNRALTGIAVEQDKNTQEVFAQVKQIYKTPPIKDFGGFNFSQILPDPSKPSKRSFIEDLLFNKVTLADAGFIKQYGDCLGDIAARDLICAQKFNGLTVLPPLLTDEMIAQYTSALLAGTITSGWTFGAGAALQIPFAMQMAYRFNGIGVTQNVLYENQKLIANQFNSAIGKIQDSLSSTASALGKLQDVVNQNAQALNTLVKCLSSNFGAISSVLNDILSRLDKVEAEVQIDRLITGRLQCLQTYVTQQLIRAAEIRASANLAATKMSECVLGQSKRVDFCGKGYHLMSFPQSAPHGVVFLHVTYVPAQEKNFTTAPAICHDGKAHFPREGVFVSNGTHWFVTQRNFYEPQIITTDNTFVSGNCDVVIGIVNNTVYDPLQPELDSGGGSGGGQIYEGKLTAEGLRFGIVASRFNHALVDRLVEGAIDAIVRHGGREEDITLVRVPGSWEIPVAAGELARKEDIDAVIAIGVLIRGATPHFDYIASEVSKGLADLSLELRKPITFGVITADTLEQAIERAGTKHGNKGWEAALSAIEMANLFKSLR

SEQ ID NO: 8350 - protein, 1307 aa, Artificial Sequence
  SARS-CoV-2/China/WF0004/2020__EPI_ISL_413694 spike protein (1-1147)(Q965C_S1003C) LumSynth construct
MFVFLVLLPLVSSQCVNLTTRTQLPPAYTNSFTRGVYYPDKVFRSSVLHSTQDLFLPFFSNVTWFHAIHVSGTNGTKRFDNPVLPFNDGVYFASTEKSNIIRGWIFGTTLDSKTQSLLIVNNATNVVIKVCEFQFCNDPFLGVYYHKNNKSWTESEFRVYSSANNCTFEYVSQPFLMDLEGKQGNFKNLREFVFKNIDGYFKIYSKHTPINLVRDLPQGFSALEPLVDLPIGINITRFQTLLALHRSYLTPGDSSSGWTAGAAAYYVGYLQPRTFLLKYNENGTITDAVDCALDPLSETKCTLKSFTVEKGIYQTSNFRVQPTESIVRFPNITNLCPFGEVFNATRFASVYAWNRKRISNCVADYSVLYNSASFSTFKCYGVSPTKLNDLCFTNVYADSFVIRGDEVRQIAPGQTGKIADYNYKLPDDFTGCVIAWNSNNLDSKVGGNYNYLYRLFRKSNLKPFERDISTEIYQAGSTPCNGVEGFNCYFPLQSYGFQPTNGVGYQPYRVVVLSFELLHAPATVCGPKKSTNLVKNKCVNFNFNGLTGTGVLTESNKKFLPFQQFGRDIADTTDAVRDPQTLEILDITPCSFGGVSVITPGTNTSNQVAVLYQDVNCTEVPVAIHADQLTPTWRVYSTGSNVFQTRAGCLIGAEHVNNSYECDIPIGAGICASYQTQTNSPRRARSVASQSIIAYTMSLGAENSVAYSNNSIAIPTNFTISVTTEILPVSMTKTSVDCTMYICGDSTECSNLLLQYGSFCTQLNRALTGIAVEQDKNTQEVFAQVKQIYKTPPIKDFGGFNFSQILPDPSKPSKRSFIEDLLFNKVTLADAGFIKQYGDCLGDIAARDLICAQKFNGLTVLPPLLTDEMIAQYTSALLAGTITSGWTFGAGAALQIPFAMQMAYRFNGIGVTQNVLYENQKLIANQFNSAIGKIQDSLSSTASALGKLQDVVNQNAQALNTLVKCLSSNFGAISSVLNDILSRLDKVEAEVQIDRLITGRLQCLQTYVTQQLIRAAEIRASANLAATKMSECVLGQSKRFDFCGKGYHLMSFPQSAPHGVVFLHVTYVPAQEKNFTTAPAICHDGKAHFPREGVFVSNGTHWFVTQRNFYEPQIITTDNTFVSGNCDVVIGIVNNTVYDPLQPELDSGGGSGGGQIYEGKLTAEGLRFGIVASRFNHALVDRLVEGAIDAIVRHGGREEDITLVRVPGSWEIPVAAGELARKEDIDAVIAIGVLIRGATPHFDYIASEVSKGLADLSLELRKPITFGVITADTLEQAIERAGTKHGNKGWEAALSAIEMANLFKSLR

SEQ ID NO: 8351 - protein, 1307 aa, Artificial Sequence
  SARS-CoV-2/China/WF0028/2020__EPI_ISL_413791 spike protein (1-1147)(Q965C_S1003C) LumSynth construct
MFVFLVLLPLVSSQCVNLTTRTQLPPAYTNSFTRGVYYPDKVFRSSVLHSTQDLFLPFFSNVTWFHAIHVSGTNGTKRFDNPVLPFNDGVYFASTEKSNIIRGWIFGTTLDSKTQSLLIVNNATNVVIKVCEFQFCNDPFLGVYYHKNNKSWMESEFRVYSSANNCTFEYVSQPFLMDLEGKQGNFKNLREFVFKNIDGYFKIYSKHTPINLVRDLPQGFSALEPLVDLPIGINITRFQTLLALHRSYLTPGDSSSGWTAGAAAYYVGYLQPRTFLLKYNENGTITDAVDCALDPLSETKCTLKSFTVEKGIYQTSNFRVQPTESIVRFPNITNLCPFGEVFNATRFASVYAWNRKRISNCVADYSVLYNSASFSTFKCYGVSPTKLNDLCFTNVYADSFVIRGDEVRQIAPGQTGKIADYNYKLPDDFTGCVIAWNSNNLDSKVGGNYNYLYRLFRKSNLKPFERDISTEIYQAGSTPCNGVEGFNCYFPLQSYGFQPTNGVGYQPYRVVVLSFELLHAPATVCGPKKSTNLVKNKCVNFNFNGLTGTGVLTESNKKFLPFQQFGRDIADTTDAVRDPQTLEILDITPCSFGGVSVITPGTNTSNQVAVLYQDVNCTEVPVAIHADQLTPTWRVYSTGSNVFQTRAGCLIGAEHVNNSYECDIPIGAGICASYQTQTNSPRRARSVASQSIIAYTMSLGAENSVAYSNNSIAIPTNFTISVTTEILPVSMTKTSVDCTMYICGDSTECSNLLLQYGSFCTQLNRALTGIAVEQDKNTQEVFAQVKQIYKTPPIKDFGGFNFSQILPDPSKPSKRSFIEDLLFNKVTLADAGFIKQYGDCLGDIAARDLICAQKFNGLTVLPPLLTDEMIAQYTSALLAGTITSGWTFGAGAALQIPFAMQMAYRFNGIGVTQNVLYENQKLIANQFNSAIGKIQDSLSSTASALGKLQDVVNQNAQALNTLVKCLSSNFGAISSVLNDILSRLDKVEAEVQIDRLITGRLQCLQTYVTQQLIRAAEIRASANLAATKMSECVLGQSKRVDFCGKGYHLMSFPQSAPHGVVFLHVTYVPAQEKNFTTAPAICHDGKAHFPREGVFVSNGTHWFVTQRNFYEPQIITTDNTFVSGNCDVVIGIVNNTVYDPLQPELESGGGSGGGQIYEGKLTAEGLRFGIVASRFNHALVDRLVEGAIDAIVRHGGREEDITLVRVPGSWEIPVAAGELARKEDIDAVIAIGVLIRGATPHFDYIASEVSKGLADLSLELRKPITFGVITADTLEQAIERAGTKHGNKGWEAALSAIEMANLFKSLR

SEQ ID NO: 8352 - protein, 1307 aa, Artificial Sequence
  SARS-CoV-2/2019-nCoV/USA-CruiseA-18/2020__MT159716.1 spike protein (1-1147)(Q965C_S1003C) LumSynth construct
MFVFLVLLPLVSSQCVNLTTRTQLPPAYTNSFTRGVYYPDKVFRSSVLHSTQDLFLPFFSNVTWFHAIHVSGTNGTKRFDNPVLPFNDGVYFASTEKSNIIRGWIFGTTLDSKTQSLLIVNNATNVVIKVCEFQFCNDPFLGVYYHKNNKSWMESELRVYSSANNCTFEYVSQPFLMDLEGKQGNFKNLREFVFKNIDGYFKIYSKHTPINLVRDLPQGFSALEPLVDLPIGINITRFQTLLALHRSYLTPGDSSSGWTAGAAAYYVGYLQPRTFLLKYNENGTITDAVDCALDPLSETKCTLKSFTVEKGIYQTSNFRVQPTESIVRFPNITNLCPFGEVFNATRFASVYAWNRKRISNCVADYSVLYNSASFSTFKCYGVSPTKLNDLCFTNVYADSFVIRGDEVRQIAPGQTGKIADYNYKLPDDFTGCVIAWNSNNLDSKVGGNYNYLYRLFRKSNLKPFERDISTEIYQAGSTPCNGVEGFNCYFPLQSYGFQPTNGVGYQPYRVVVLSFELLHAPATVCGPKKSTNLVKNKCVNFNFNGLTGTGVLTESNKKFLPFQQFGRDIADTTDAVRDPQTLEILDITPCSFGGVSVITPGTNTSNQVAVLYQDVNCTEVPVAIHADQLTPTWRVYSTGSNVFQTRAGCLIGAEHVNNSYECDIPIGAGICASYQTQTNSPRRARSVASQSIIAYTMSLGAENSVAYSNNSIAIPTNFTISVTTEILPVSMTKTSVDCTMYICGDSTECSNLLLQYGSFCTQLNRALTGIAVEQDKNTQEVFAQVKQIYKTPPIKDFGGFNFSQILPDPSKPSKRSFIEDLLFNKVTLADAGFIKQYGDCLGDIAARDLICAQKFNGLTVLPPLLTDEMIAQYTSALLAGTITSGWTFGAGAALQIPFAMQMAYRFNGIGVTQNVLYENQKLIANQFNSAIGKIQDSLSSTASALGKLQDVVNQNAQALNTLVKCLSSNFGAISSVLNDILSRLDKVEAEVQIDRLITGRLQCLQTYVTQQLIRAAEIRASANLAATKMSECVLGQSKRVDFCGKGYHLMSFPQSAPHGVVFLHVTYVPAQEKNFTTAPAICHDGKAHFPREGVFVSNGTHWFVTQRNFYEPQIITTDNTFVSGNCDVVIGIVNNTVYDPLQPELDSGGGSGGGQIYEGKLTAEGLRFGIVASRFNHALVDRLVEGAIDAIVRHGGREEDITLVRVPGSWEIPVAAGELARKEDIDAVIAIGVLIRGATPHFDYIASEVSKGLADLSLELRKPITFGVITADTLEQAIERAGTKHGNKGWEAALSAIEMANLFKSLR

SEQ ID NO: 8353 - protein, 1307 aa, Artificial Sequence
  SARS-CoV-2/SARS-CoV-2/Yunnan-01/human/2020/CHN__MT049951.1 spike protein (1-1147)(Q965C_S1003C) LumSynth construct
MFVFLVLLPLVSSQCVNLTTRTQLPPANTNSFTRGVYYPDKVFRSSVLHSTQDLFLPFFSNVTWFHAIHVSGTNGTKRFDNPVLPFNDGVYFASTEKSNIIRGWIFGTTLDSKTQSLLIVNNATNVVIKVCEFQFCNDPFLGVYYHKNNKSWMESEFRVYSSANNCTFEYVSQPFLMDLEGKQGNFKNLREFVFKNIDGYFKIYSKHTPINLVRDLPQGFSALEPLVDLPIGINITRFQTLLALHRSYLTPGDSSSGWTAGAAAYYVGYLQPRTFLLKYNENGTITDAVDCALDPLSETKCTLKSFTVEKGIYQTSNFRVQPTESIVRFPNITNLCPFGEVFNATRFASVYAWNRKRISNCVADYSVLYNSASFSTFKCYGVSPTKLNDLCFTNVYADSFVIRGDEVRQIAPGQTGKIADYNYKLPDDFTGCVIAWNSNNLDSKVGGNYNYLYRLFRKSNLKPFERDISTEIYQAGSTPCNGVEGFNCYFPLQSYGFQPTNGVGYQPYRVVVLSFELLHAPATVCGPKKSTNLVKNKCVNFNFNGLTGTGVLTESNKKFLPFQQFGRDIADTTDAVRDPQTLEILDITPCSFGGVSVITPGTNTSNQVAVLYQDVNCTEVPVAIHADQLTPTWRVYSTGSNVFQTRAGCLIGAEHVNNSYECDIPIGAGICASYQTQTNSPRRARSVASQSIIAYTMSLGAENSVAYSNNSIAIPTNFTISVTTEILPVSMTKTSVDCTMYICGDSTECSNLLLQYGSFCTQLNRALTGIAVEQDKNTQEVFAQVKQIYKTPPIKDFGGFNFSQILPDPSKPSKRSFIEDLLFNKVTLADAGFIKQYGDCLGDIAARDLICAQKFNGLTVLPPLLTDEMIAQYTSALLAGTITSGWTFGAGAALQIPFAMQMAYRFNGIGVTQNVLYENQKLIANQFNSAIGKIQDSLSSTASALGKLQDVVNQNAQALNTLVKCLSSNFGAISSVLNDILSRLDKVEAEVQIDRLITGRLQCLQTYVTQQLIRAAEIRASANLAATKMSECVLGQSKRVDFCGKGYHLMSFPQSAPHGVVFLHVTYVPAQEKNFTTAPAICHDGKAHFPREGVFVSNGTHWFVTQRNFYEPQIITTDNTFVSGNCDVVIGIVNNTVYDPLQPELDSGGGSGGGQIYEGKLTAEGLRFGIVASRFNHALVDRLVEGAIDAIVRHGGREEDITLVRVPGSWEIPVAAGELARKEDIDAVIAIGVLIRGATPHFDYIASEVSKGLADLSLELRKPITFGVITADTLEQAIERAGTKHGNKGWEAALSAIEMANLFKSLR

SEQ ID NO: 8354 - protein, 1307 aa, Artificial Sequence
  SARS-CoV-2/USA/WA-UW292/2020__EPI_ISL_418077 spike protein (1-1147)(Q965C_S1003C) LumSynth construct
MFVFLVLLPLVSSQCVNLTTRTQLPPAYTNSFTRGVYYPDKVFRSSVLHSTQDLFLPFFSNVTWFHAIHVSGTNGTKRFDNPVLPFNDGVYFASTEKSNIIRGWIFGTTLDSKTQSLLIVNNATNVVIKVCEFQFCNDPFLGVYYHKNNKSWMESEFRVYSSANNCTFEYVSQPFLMDLEGKQGNFKNLREFVFKNIDGYFKIYSKHTPINLVRDLPQGFSALEPLVDLPIGINITRFQTLLALHRSYLTPGDSSSGWTAGAAAYYVGYLQPRTFLLKYNENGTITDAVDCALDPLSETKCTLKSFTVEKGIYQTSNFRVQPTESIVRFPNITNLCPFGEVFNATRFASVYAWNRKRISNCVADYSVLYNSASFSTFKCYGVSPTKLNDLCFTNVYADSFVIRGDEVRQIAPGQTGKIADYNYKLPDDFTGCVIAWNSNNLDSKVGGNYNYLYRLFRKSNLKPFERDISTEIYQASSTPCNGVEGFNCYFPLQSYGFQPTNGVGYQPYRVVVLSFELLHAPATVCGPKKSTNLVKNKCVNFNFNGLTGTGVLTESNKKFLPFQQFGRDIADTTDAVRDPQTLEILDITPCSFGGVSVITPGTNTSNQVAVLYQDVNCTEVPVAIHADQLTPTWRVYSTGSNVFQTRAGCLIGAEHVNNSYECDIPIGAGICASYQTQTNSPRRARSVASQSIIAYTMSLGAENSVAYSNNSIAIPTNFTISVTTEILPVSMTKTSVDCTMYICGDSTECSNLLLQYGSFCTQLNRALTGIAVEQDKNTQEVFAQVKQIYKTPPIKDFGGFNFSQILPDPSKPSKRSFIEDLLFNKVTLADAGFIKQYGDCLGDIAARDLICAQKFNGLTVLPPLLTDEMIAQYTSALLAGTITSGWTFGAGAALQIPFAMQMAYRFNGIGVTQNVLYENQKLIANQFNSAIGKIQDSLSSTASALGKLQDVVNQNAQALNTLVKCLSSNFGAISSVLNDILSRLDKVEAEVQIDRLITGRLQCLQTYVTQQLIRAAEIRASANLAATKMSECVLGQSKRVDFCGKGYHLMSFPQSAPHGVVFLHVTYVPAQEKNFTTAPAICHDGKAHFPREGVFVSNGTHWFVTQRNFYEPQIITTDNTFVSGNCDVVIGIVNNTVYDPLQPELDSGGGSGGGQIYEGKLTAEGLRFGIVASRFNHALVDRLVEGAIDAIVRHGGREEDITLVRVPGSWEIPVAAGELARKEDIDAVIAIGVLIRGATPHFDYIASEVSKGLADLSLELRKPITFGVITADTLEQAIERAGTKHGNKGWEAALSAIEMANLFKSLR

SEQ ID NO: 8355 - protein, 1307 aa, Artificial Sequence
  SARS-CoV-2/Iceland/192/2020__EPI_ISL_417819 spike protein (1-1147)(Q965C_S1003C) LumSynth construct
MFVFFVLLPLVSSQCVNLTTRTQLPPAYTNSFTRGVYYPDKVFRSSVLHSTQDLFLPFFSNVTWFHAIHVSGTNGTKRFDNPVLPFNDGVYFASTEKSNIIRGWIFGTTLDSKTQSLLIVNNATNVVIKVCEFQFCNDPFLGVYYHKNNKSWMESEFRVYSSANNCTFEYVSQPFLMDLEGKQGNFKNLREFVFKNIDGYFKIYSKHTPINLVRDLPQGFSALEPLVDLPIGINITRFQTLLALHRSYLTPGDSSSGWTAGAAAYYVGYLQPRTFLLKYNENGTITDAVDCALDPLSETKCTLKSFTVEKGIYQTSNFRVQPTESIVRFPNITNLCPFGEVFNATRFASVYAWNRKRISNCVADYSVLYNSASFSTFKCYGVSPTKLNDLCFTNVYADSFVIRGDEVRQIAPGQTGKIADYNYKLPDDFTGCVIAWNSNNLDSKVGGNYNYLYRLFRKSNLKPFERDISTEIYQAGSTPCNGVEGFNCYFPLQSYGFQPTNGVGYQPYRVVVLSFELLHAPATVCGPKKSTNLVKNKCVNFNFNGLTGTGVLTESNKKFLPFQQFGRDIADTTDAVRDPQTLEILDITPCSFGGVSVITPGTNTSNQVAVLYQGVNCTEVPVAIHADQLTPTWRVYSTGSNVFQTRAGCLIGAEHVNNSYECDIPIGAGICASYQTQTNSPRRARSVASQSIIAYTMSLGAENSVAYSNNSIAIPTNFTISVTTEILPVSMTKTSVDCTMYICGDSTECSNLLLQYGSFCTQLNRALTGIAVEQDKNTQEVFAQVKQIYKTPPIKDFGGFNFSQILPDPSKPSKRSFIEDLLFNKVTLADAGFIKQYGDCLGDIAARDLICAQKFNGLTVLPPLLTDEMIAQYTSALLAGTITSGWTFGAGAALQIPFAMQMAYRFNGIGVTQNVLYENQKLIANQFNSAIGKIQDSLSSTASALGKLQDVVNQNAQALNTLVKCLSSNFGAISSVLNDILSRLDKVEAEVQIDRLITGRLQCLQTYVTQQLIRAAEIRASANLAATKMSECVLGQSKRVDFCGKGYHLMSFPQSAPHGVVFLHVTYVPAQEKNFTTAPAICHDGKAHFPREGVFVSNGTHWFVTQRNFYEPQIITTDNTFVSGNCDVVIGIVNNTVYDPLQPELDSGGGSGGGQIYEGKLTAEGLRFGIVASRFNHALVDRLVEGAIDAIVRHGGREEDITLVRVPGSWEIPVAAGELARKEDIDAVIAIGVLIRGATPHFDYIASEVSKGLADLSLELRKPITFGVITADTLEQAIERAGTKHGNKGWEAALSAIEMANLFKSLR

SEQ ID NO: 8356 - protein, 1307 aa, Artificial Sequence
  SARS-CoV-2/Belgium/ULG-6939/2020__EPI_ISL_417020 spike protein (1-1147)(Q965C_S1003C) LumSynth construct
MFVFLVLLPLVSSQCVNLTTRTQLPPAYTNSFTRGVYYPDKVFRSSVLHSTQDLFLPFFSNVTWFHAIHVSGTNGTKRFDNPVLPFNDGVYFASTEKSNIIRGWIFGTTLDSKTQSLLIVNNATNVVIKVCEFQFCNDPFLGVYYHKNNKSWMESEFRVYSSANNCTFEYVSQPFLMDLEGKQGNFKNLREFVFKNIDGYFKIYSKHTPINLVRDLPQGFSALEPLVDLPIGINITRFQTLLALHRSYLTPGDSSSGWTAGAAAYYVGYLQPRTFLLKYNENGTITDAVDCALDPLSETKCTLKSFTVEKGIYQTSNFRVQPTESIVRFPNITNLCPFGEVFNATRFASVYAWNRKRISNCVADYSVLYNSASFSTFKCYGVSPTKLNDLCFTNVYADSFVIRGDEVRQIAPGQTGKIADYNYKLPDDFTGCVIAWNSNNLDSKVGGNYNYLYRLFRKSNLKPFERDISTEIYQAGSTPCNGVEGFNCYFPLQSYGFQPTNGVGYQPYRVVVLSFELLHAPATVCGPKKSTNLVKNKCVNFNFNGLTGTGVLTESNKKFLPFQQFGRDIADTTDAVRDPQTLEILDITPCSFGGVSVITPGTNTSNQVAVLYQGVNCTEVPVAIHADQLTPTWRVYSTGSNVFQTRAGCLIGAEHVNNSYECDIPIGAGICASYQTQTNSPRRARSVASQSIIAYTMSLGAENSVVYSNNSIAIPTNFTISVTTEILPVSMTKTSVDCTMYICGDSTECSNLLLQYGSFCTQLNRALTGIAVEQDKNTQEVFAQVKQIYKTPPIKDFGGFNFSQILPDPSKPSKRSFIEDLLFNKVTLADAGFIKQYGDCLGDIAARDLICAQKFNGLTVLPPLLTDEMIAQYTSALLAGTITSGWTFGAGAALQIPFAMQMAYRFNGIGVTQNVLYENQKLIANQFNSAIGKIQDSLSSTASALGKLQDVVNQNAQALNTLVKCLSSNFGAISSVLNDILSRLDKVEAEVQIDRLITGRLQCLQTYVTQQLIRAAEIRASANLAATKMSECVLGQSKRVDFCGKGYHLMSFPQSAPHGVVFLHVTYVPAQEKNFTTAPAICHDGKAHFPREGVFVSNGTHWFVTQRNFYEPQIITTDNTFVSGNCDVVIGIVNNTVYDPLQPELDSGGGSGGGQIYEGKLTAEGLRFGIVASRFNHALVDRLVEGAIDAIVRHGGREEDITLVRVPGSWEIPVAAGELARKEDIDAVIAIGVLIRGATPHFDYIASEVSKGLADLSLELRKPITFGVITADTLEQAIERAGTKHGNKGWEAALSAIEMANLFKSLR

SEQ ID NO: 8357 - protein, 1307 aa, Artificial Sequence
  SARS-CoV-2/France/HF2496/2020__EPI_ISL_418231 spike protein (1-1147)(Q965C_S1003C) LumSynth construct
MFVFLVLLPLVSSQCVNLTTRTQLPPAYTNSFTRGVYYPDKVFRSSVLHSTQDLFLPFFSNVTWFHAIHVSGTNGTKRFDNPVLPFNDGVYFASTEKSNIIRGWIFGTTLDSKTQSLLIVNNATNVVIKVCEFQFCNDPFLGVYYHKNNKSWMESEFRVYSSANNCTFEYVSQPFLMDLEGKQGNFKNLREFVFKNIDGYFKIYSKHTPINLVRDLPQGFSALEPLVDLPIGINITRFQTLLALHRSYLTPGDSSSGWTAGAAAYYVGYLQPRTFLLKYNENGTITDAVDCALDPLSETKCTLKSFTVEKGIYQTSNFRVQPTESIVRFPNITNLCPFGEVFNATRFASVYAWNRKRISNCVADYSVLYNSASFSTFKCYGVSPTKLNDLCFTNVYADSFVIRGDEVRQIAPGQTGKIADYNYKLPDDFTGCVIAWNSNNLDSKVGGNYNYLYRLFRKSNLKPFERDISTEIYQAGSTPCNGVEGFNCYFPLQSYGFQPTNGVGYQPYRVVVLSFELLHAPATVCGPKKSTNLVKNKCVNFNFNGLTGTGVLTESNKKFLPFQQFGRDIADTTDAVRDPQTLEILDITPCSFGGVSVITPGTNTSNQVAVLYQGVNCTEVPVAIHADQLTPTWRVYSTGSNVFQTRAGCLIGAEHVNNSYECDIPIGAGICASYQTQTNSPRRARSVASQSIIAYTMSLGAENSVAYSNNSIAIPTNFTISVTTEILPVSMTKTSVDCTMYICGDSTECSNLLLQYGSFCTQLNRALTGIAVEQDKNTQEVFAQVKQIYKTPPIKDFGGFNFSQILPDPSKPSKRSFIEDLLFNKVTLADAGFIKQYGDCLGDIVARDLICAQKFNGLTVLPPLLTDEMIAQYTSALLAGTITSGWTFGAGAALQIPFAMQMAYRFNGIGVTQNVLYENQKLIANQFNSAIGKIQDSLSSTASALGKLQDVVNQNAQALNTLVKCLSSNFGAISSVLNDILSRLDKVEAEVQIDRLITGRLQCLQTYVTQQLIRAAEIRASANLAATKMSECVLGQSKRVDFCGKGYHLMSFPQSAPHGVVFLHVTYVPAQEKNFTTAPAICHDGKAHFPREGVFVSNGTHWFVTQRNFYEPQIITTDNTFVSGNCDVVIGIVNNTVYDPLQPELDSGGGSGGGQIYEGKLTAEGLRFGIVASRFNHALVDRLVEGAIDAIVRHGGREEDITLVRVPGSWEIPVAAGELARKEDIDAVIAIGVLIRGATPHFDYIASEVSKGLADLSLELRKPITFGVITADTLEQAIERAGTKHGNKGWEAALSAIEMANLFKSLR

SEQ ID NO: 8358 - protein, 1307 aa, Artificial Sequence
  SARS-CoV-2/USA/WA-UW291/2020__EPI_ISL_418076 spike protein (1-1147)(Q965C_S1003C) LumSynth construct
MFVFLVLLPLVSSQCVNLTTRTQLPPAYTNSFTRGVYYPDKVFRSSVLHSTQDLFLPFFSNVTWFHAIHVSGTNGTKRFDNPVLPFNDGVYFASTEKSNIIRGWIFGTTLDSKTQSLLIVNNATNVVIKVCEFQFCNDPFLGVYYHKNNKSWMESEFRVYSSANNCTFEYVSQPFLMDLEGKQGNFKNLREFVFKNIDGYFKIYSKHTPINLVRDLPQGFSALEPLVDLPIGINITRFQTLLALHRSYLTPGDSSSGWTAGAAAYYVGYLQPRTFLLKYNENGTITDAVDCALDPLSETKCTLKSFTVEKGIYQTSNFRVQPTESIVRFPNITNLCPFGEVFNATRFASVYAWNRKRISNCVADYSVLYNSASFSTFKCYGVSPTKLNDLCFTNVYADSFVIRGDEVRQIAPGQTGKIADYNYKLPDDFTGCVIAWNSNNLDSKVGGNYNYLYRLFRKSNLKPFERDISTEIYQAGSTPCNGVEGFNCYFPLQSYGFQPTNGVGYQPYRVVVLSFELLHAPATVCGPKKSTNLVKNKCVNFNFNGLTGTGVLTESNKKFLPFQQFGRDIADTTDAVRDPQTLEILDITPCSFGGVSVITPGTNTSNQVAVLYQGVNCTEVPVAIHADQLTPTWRVYSTGSNVFQTRAGCLIGAEHVNNSYECDIPIGAGICASYQTQTNSPRRARSVASQSIIAYTMSLGAENSVAYSNNSIAIPTNFTISVTTEILPVSMTKTSVDCTMYICGDSTECSNLLLQYGSFCTQLNRALTGIAVEQDKNTQEVFAQVKQIYKTPPIKDFGGFNFSQILPDPSKPSKRSFIEDLLFNKVTLADAGFIKQYGDCLGDIAARDLICAQKFNGLTVLPPLLTDEMIAQYTSALLAGTITSGWTFGAGAALQIPFAMQMAYRFNGIGVTQNVLYENQKLIANQFNSAIGKIQYSLSSTASALGKLQDVVNQNAQALNTLVKCLSSNFGAISSVLNDILSRLDKVEAEVQIDRLITGRLQCLQTYVTQQLIRAAEIRASANLAATKMSECVLGQSKRVDFCGKGYHLMSFPQSAPHGVVFLHVTYVPAQEKNFTTAPAICHDGKAHFPREGVFVSNGTHWFVTQRNFYEPQIITTDNTFVSGNCDVVIGIVNNTVYDPLQPELDSGGGSGGGQIYEGKLTAEGLRFGIVASRFNHALVDRLVEGAIDAIVRHGGREEDITLVRVPGSWEIPVAAGELARKEDIDAVIAIGVLIRGATPHFDYIASEVSKGLADLSLELRKPITFGVITADTLEQAIERAGTKHGNKGWEAALSAIEMANLFKSLR

SEQ ID NO: 8359 - protein, 1307 aa, Artificial Sequence; identical to SEQ ID NO: 8322
  SARS-CoV-2/Portugal/PT0034/2020__EPI_ISL_418019 spike protein (1-1147)(Q965C_S1003C) LumSynth construct

SEQ ID NO: 8360 - protein, 1307 aa, Artificial Sequence; identical to SEQ ID NO: 8314
  SARS-CoV-2/Iceland/202/2020__EPI_ISL_417750 spike protein (1-1147)(Q965C_S1003C) LumSynth construct

SEQ ID NO: 8361 - protein, 1307 aa, Artificial Sequence
  SARS-CoV-2/USA/WA-UW261/2020__EPI_ISL_418046 spike protein (1-1147)(Q965C_S1003C) LumSynth construct
MFVFLVLLPLVSSQCVNLTTRTQLPPAYTNSFTRGVYYPDKVFRSSVLHSTQDLFLPFFSNVTWFHAIHVSGTNGTKRFDNPVLPFNDGVYFASTEKSNIIRGWIFGTTLDSKTQSLLIVNNATNVVIKVCEFQFCNDPFLGVYYHKNNKSWMESEFRVYSSANNCTFEYVSQPFLMDLEGKQGNFKNLREFVFKNIDGYFKIYSKHTPINLVRDLPQGFSALEPLVDLPIGINITRFQTLLALHRSYLTPGDSSSGWTAGAAAYYVGYLQPRTFLLKYNENGTITDAVDCALDPLSETKCTLKSFTVEKGIYQTSNFRVQPTESIVRFPNITNLCPFGEVFNATRFTSVYAWNRKRISNCVADYSVLYNSASFSTFKCYGVSPTKLNDLCFTNVYADSFVIRGDEVRQIAPGQTGKIADYNYKLPDDFTGCVIAWNSNNLDSKVGGNYNYLYRLFRKSNLKPFERDISTEIYQAGSTPCNGVEGFNCYFPLQSYGFQPTNGVGYQPYRVVVLSFELLHAPATVCGPKKSTNLVKNKCVNFNFNGLTGTGVLTESNKKFLPFQQFGRDIADTTDAVRDPQTLEILDITPCSFGGVSVITPGTNTSNQVAVLYQDVNCTEVPVAIHADQLTPTWRVYSTGSNVFQTRAGCLIGAEHVNNSYECDIPIGAGICASYQTQTNSPRRARSVASQSIIAYTMSLGAENSVAYSNNSIAIPTNFTISVTTEILPVSMTKTSVDCTMYICGDSTECSNLLLQYGSFCTQLNRALTGIAVEQDKNTQEVFAQVKQIYKTPPIKDFGGFNFSQILPDPSKPSKRSFIEDLLFNKVTLADAGFIKQYGDCLGDIAARDLICAQKFNGLTVLPPLLTDEMIAQYTSALLAGTITSGWTFGAGAALQIPFAMQMAYRFNGIGVTQNVLYENQKLIANQFNSAIGKIQDSLSSTASALGKLQDVVNQNAQALNTLVKCLSSNFGAISSVLNDILSRLDKVEAEVQIDRLITGRLQCLQTYVTQQLIRAAEIRASANLAATKMSECVLGQSKRVDFCGKGYHLMSFPQSAPHGVVFLHVTYVPAQEKNFTTAPAICHDGKAHFPREGVFVSNGTHWFVTQRNFYEPQIITTDNTFVSGNCDVVIGIVNNTVYDPLQPELDSGGGSGGGQIYEGKLTAEGLRFGIVASRFNHALVDRLVEGAIDAIVRHGGREEDITLVRVPGSWEIPVAAGELARKEDIDAVIAIGVLIRGATPHFDYIASEVSKGLADLSLELRKPITFGVITADTLEQAIERAGTKHGNKGWEAALSAIEMANLFKSLR

SEQ ID NO: 8362 - protein, 1307 aa, Artificial Sequence
  SARS-CoV-2/Portugal/PT0035/2020__EPI_ISL_418020 spike protein (1-1147)(Q965C_S1003C) LumSynth construct
MFVFLVLLPLVSSQCVNLTTRTQLPPAYTNSFTRGVYYPDKVFRSSVLHSTQDLFLPFFSNVTWFHAIHVSGTNGTKRFDNPVLPFNDGVYFASTEKSNIIRGWIFGTTLDSKTQSLLIVNNATNVVIKVCEFQFCNDPFLGVYYHKNNKSWMESEFRVYSSANNCTFEYVSQPFLMDLEGKQGNFKNLREFVFKNIDGYFKIYSKHTPINLVRDLPQGFSALEPLVDLPIGINITRFQTLLALHRSYLTPGDSSSGWTAGAAAYYVGYLQPRTFLLKYNENGTITDAVDCALDPLSETKCTLKSFTVEKGIYQTSNFRVQPTESIVRFPNITNLCPFGEVFNATRFASVYAWNRKRISNCVADYSVLYNSASFSTFKCYGVSPTKLNDLCFTNVYADSFVIRGDEVRQIAPGQTGKIADYNYKLPDDFTGCVIAWNSNNLDSKVGGNYNYLYRLFRKSNLKPFERDISTEIYQAGSTPCNGVEGFNCYFPLQSYGFQPTNGVGYQPYRVVVLSFELLHAPATVCGPKKSTNLVKNKCVNFNFNGLTGTGVLTESNKKFLPFQQFGRDIADTTDAVRDPQTLEILDITPCSFGGVSVITPGTNTSNQVAVLYQDVNCTEVPVAIHADQLTPTWRVYSTGSNVFQTRAGCLIGAEHVNNSYECDIPIGAGICASYQTQTNSPRRARSVASQSIIAYTMSLGAENSVAYSNNSIAIPTNFTISVTTEILPVSMTKTSVDCTMYICGDSTECSNLLLQYGSFCTQLNRALTGIAVEQDKNTQEVFAQVKQIYKTPPIKDFGGFNFSQILPDPSKPSKRSFIEDLLFNKVTLADAGFIKQYGDCLGDISARDLICAQKFNGLTVLPPLLTDEMIAQYTSALLAGTITSGWTFGAGAALQIPFAMQMAYRFNGIGVTQNVLYENQKLIANQFNSAIGKIQDSLSSTASALGKLQDVVNQNAQALNTLVKCLSSNFGAISSVLNDILSRLDKVEAEVQIDRLITGRLQCLQTYVTQQLIRAAEIRASANLAATKMSECVLGQSKRVDFCGKGYHLMSFPQSAPHGVVFLHVTYVPAQEKNFTTAPAICHDGKAHFPREGVFVSNGTHWFVTQRNFYEPQIITTDNTFVSGNCDVVIGIVNNTVYDPLQPELDSGGGSGGGQIYEGKLTAEGLRFGIVASRFNHALVDRLVEGAIDAIVRHGGREEDITLVRVPGSWEIPVAAGELARKEDIDAVIAIGVLIRGATPHFDYIASEVSKGLADLSLELRKPITFGVITADTLEQAIERAGTKHGNKGWEAALSAIEMANLFKSLR

SEQ ID NO: 8363 - protein, 1307 aa, Artificial Sequence
  SARS-CoV-2/USA/NY-NYUMC7/2020__EPI_ISL_418192 spike protein (1-1147)(Q965C_S1003C) LumSynth construct
MFVFLVLLPLVSSQCVNLTTRTQLPPAYTNSFTRGVYYPDKVFRSSVLHSTQDLFLPFFSNVTWFHAIHVSGTNGTKRFDNPVLPFNDGVYFASTEKSNIIRGWIFGTTLDSKTQSLLIVNNATNVVIKVCEFQFCNDPFLGVYHHKNNKSWMESEFRVYSSANNCTFEYVSQPFLMDLEGKQGNFKNLREFVFKNIDGYFKIYSKHTPINLVRDLPQGFSALEPLVDLPIGINITRFQTLLALHRSYLTPGDSSSGWTAGAAAYYVGYLQPRTFLLKYNENGTITDAVDCALDPLSETKCTLKSFTVEKGIYQTSNFRVQPTESIVRFPNITNLCPFGEVFNATRFASVYAWNRKRISNCVADYSVLYNSASFSTFKCYGVSPTKLNDLCFTNVYADSFVIRGDEVRQIAPGQTGKIADYNYKLPDDFTGCVIAWNSNNLDSKVGGNYNYLYRLFRKSNLKPFERDISTEIYQAGSTPCNGVEGFNCYFPLQSYGFQPTNGVGYQPYRVVVLSFELLHAPATVCGPKKSTNLVKNKCVNFNFNGLTGTGVLTESNKKFLPFQQFGRDIADTTDAVRDPQTLEILDITPCSFGGVSVITPGTNTSNQVAVLYQGVNCTEVPVAIHADQLTPTWRVYSTGSNVFQTRAGCLIGAEHVNNSYECDIPIGAGICASYQTQTNSPRRARSVASQSIIAYTMSLGAENSVAYSNNSIAIPTNFTISVTTEILPVSMTKTSVDCTMYICGDSTECSNLLLQYGSFCTQLNRALTGIAVEQDKNTQEVFAQVKQIYKTPPIKDFGGFNFSQILPDPSKPSKRSFIEDLLFNKVTLADAGFIKQYGDCLGDIAARDLICAQKFNGLTVLPPLLTDEMIAQYTSALLAGTITSGWTFGAGAALQIPFAMQMAYRFNGIGVTQNVLYENQKLIANQFNSAIGKIQDSLSSTASALGKLQDVVNQNAQALNTLVKCLSSNFGAISSVLNDILSRLDKVEAEVQIDRLITGRLQCLQTYVTQQLIRAAEIRASANLAATKMSECVLGQSKRVDFCGKGYHLMSFPQSAPHGVVFLHVTYVPAQEKNFTTAPAICHDGKAHFPREGVFVSNGTHWFVTQRNFYEPQIITTDNTFVSGNCDVVIGIVNNTVYDPLQPELDSGGGSGGGQIYEGKLTAEGLRFGIVASRFNHALVDRLVEGAIDAIVRHGGREEDITLVRVPGSWEIPVAAGELARKEDIDAVIAIGVLIRGATPHFDYIASEVSKGLADLSLELRKPITFGVITADTLEQAIERAGTKHGNKGWEAALSAIEMANLFKSLR

SEQ ID NO: 8364 - protein, 1307 aa, Artificial Sequence
  SARS-CoV-2/Iceland/189/2020__EPI_ISL_417709 spike protein (1-1147)(Q965C_S1003C) LumSynth construct
MFVFLVLLPLVSSQCVNLTTRTQLPPAYTNSFTRGVYYPDKVFRSSVLHSTQDLFLPFFSNVTWFHAIHVSGTNGTKRFDNPVLPFNDGVYFASTEKSNIIRGWIFGTTLDSKTQSLLIVNNATNVVIKVCEFQFCNDPFLGVYYHKNNKSWMESEFRVYSSANNCTFEYVSQPFLMDLEGKQGNFKNLREFVFKNIDGYFKIYSKHTPINLVRDLPQGFSALEPLVDLPIGINITRFQTLLALHRSYLTPGDSSSGWTAGAAAYYVGYLQPRTFLLKYNENGTITDAVDCALDPLSETKCTLKSFTVEKGIYQTSNFRVQPTESIVRFPNITNLCPFGEVFNATRFASVYAWNRKRISNCVADYSVLYNSASFSTFKCYGVSPTKLNDLCFTNVYADSFVIRGDEVRQIAPGQTGKIADYNYKLPDDFTGCVIAWNSNNLDSKVGGNYNYLYRLFRKSNLKPFERDISTEIYQAGSTPCNGVEGFNCYFPLQSYGFQPTNGVGYQPYRVVVLSFELLHAPATVCGPKKSTNLVKNKCVNFNFNGLTGTGVLTESNKKFLPFQQFGRDIADTTDAVRDPQTLEILDITPCSFGGVSVITPGTNTSNQVAVLYQGVNCTEVPVAIHADQLTPTWRVYSTGSNVFQTRAGCLIGAEHVNNSYECDIPIGAGICASYQTQTNSPRRARSVASQSIIAYTMSLGAENSVAYSNNSIAIPTNFTISVTTEILPVSMTKTSVDCTMYICGDSTECSNLLLQYGSFCTQLNRALTGIAVEQDKNTQEVFAQVKQIYKTPPIKDFGGFNFSQILPDPSKPSKRSFIEDLLFNKVTLADAGFTKQYGDCLGDIAARDLICAQKFNGLTVLPPLLTDEMIAQYTSALLAGTITSGWTFGAGAALQIPFAMQMAYRFNGIGVTQNVLYENQKLIANQFNSAIGKIQDSLSSTASALGKLQDVVNQNAQALNTLVKCLSSNFGAISSVLNDILSRLDKVEAEVQIDRLITGRLQCLQTYVTQQLIRAAEIRASANLAATKMSECVLGQSKRVDFCGKGYHLMSFPQSAPHGVVFLHVTYVPAQEKNFTTAPAICHDGKAHFPREGVFVSNGTHWFVTQRNFYEPQIITTDNTFVSGNCDVVIGIVNNTVYDPLQPELDSGGGSGGGQIYEGKLTAEGLRFGIVASRFNHALVDRLVEGAIDAIVRHGGREEDITLVRVPGSWEIPVAAGELARKEDIDAVIAIGVLIRGATPHFDYIASEVSKGLADLSLELRKPITFGVITADTLEQAIERAGTKHGNKGWEAALSAIEMANLFKSLR

SEQ ID NO: 8365 - protein, 1307 aa, Artificial Sequence
  SARS-CoV-2/Australia/NSW56/2020__EPI_ISL_417408 spike protein (1-1147)(Q965C_S1003C) LumSynth construct
MFVFLVLLPLVSSQCVNLTTRTQLPPAYTNSFTRGVYYPDKVFRSSVLHSTQDLFLPFFSNVTWFHAIHVSGTNGTKRFDNPVLPFNDGVYFASTEKSNIIRGWIFGTTLDSKTQSLLIVNNATNVVIKVCEFQFCNDPFLGVYYHKNNKSWMESEFRVYSSANNCTFEYVSQPFLMDLEGKQGNFKNLREFVFKNIDGYFKIYSKHTPINLVRDLPQGFSALEPLVDLPIGINITRFQTLLALHRSYLTPGDSSSGWTAGAAAYYVGYLQPRTFLLKYNENGTITDAVDCALDPLSETKCTLKSFTVEKGIYQTSNFRVQPTESIVRFPNITNLCPFGEVFNATRFASVYAWNRKRISNCVADYSVLYNSASFSTFKCYGVSPTKLNDLCFTNVYADSFVIRGDEVRQIAPGQTGKIADYNYKLPDDFTGCVIAWNSNNLDSKVGGNYNYLYRLFRKSNLKPFERDISTEIYQAGSTPCNGVEGFNCYFPLQSYGFQPTNGVGYQPYRVVVLSFELLHAPATVCGPKKSTNLVKNKCVNFNFNGLTGTGVLTESNKKFLPFQQFGRDIADTTDAVRDPQTLEILDITPCSFGGVSVITPGTNTSNQVAVLYQDVNCTEVPVAIHADQLTPTWRVYSTGSNVFQTRAGCLIGAEHVNNSYECDIPIGAGICASYQTQTNSPRRARSVASQSIIAYTMSLGAENSVAYSNNSIAIPTNFTISVTTEILPVSMTKTSVDCTMYICGDSTECSNLLLQYGSFCTQLNRALTGIAVEQDKNTQEVFAQVKQIYKTPPIKDFGGFNFSQILPDSSKPSKRSFIEDLLFNKVTLADAGFIKQYGDCLGDIAARDLICAQKFNGLTVLPPLLTDEMIAQYTSALLAGTITSGWTFGAGAALQIPFAMQMAYRFNGIGVTQNVLYENQKLIANQFNSAIGKIQDSLSSTASALGKLQDVVNQNAQALNTLVKCLSSNFGAISSVLNDILSRLDKVEAEVQIDRLITGRLQCLQTYVTQQLIRAAEIRASANLAATKMSECVLGQSKRVDFCGKGYHLMSFPQSAPHGVVFLHVTYVPAQEKNFTTAPAICHDGKAHFPREGVFVSNGTHWFVTQRNFYEPQIITTDNTFVSGNCDVVIGIVNNTVYDPLQPELDSGGGSGGGQIYEGKLTAEGLRFGIVASRFNHALVDRLVEGAIDAIVRHGGREEDITLVRVPGSWEIPVAAGELARKEDIDAVIAIGVLIRGATPHFDYIASEVSKGLADLSLELRKPITFGVITADTLEQAIERAGTKHGNKGWEAALSAIEMANLFKSLR

SEQ ID NO: 8366 - protein, 1307 aa, Artificial Sequence
  SARS-CoV-2/Iceland/280/2020__EPI_ISL_417608 spike protein (1-1147)(Q965C_S1003C) LumSynth construct
MFVFLVLLPLVSSQCVNLTTRTQLPPAYTNSFTRGVYYPDKVFRSSVLHSTQDLFLPFFSNVTWFHAIHVSGTNGTKRFDNPVLPFNDGVYFASTEKSNIIRGWIFGTTLDSKTQSLLIVNNATNVVIKVCEFQFCNDPFLGVYYHKNNKSWMESEFRVYSSANNCTFEYVSQPFLMDLEGKQGNFKNLREFVFKNIDGYFKIYSKHTPINLVRDLPQGFSALEPLVDLPIGINITRFQTLLALHRSYLTPGDSSSGWTAGAAAYYVGYLQPRTFLLKYNENGTITDAVDCALDPLSETKCTLKSFTVEKGIYQTSNFRVQPTESIVRFPNITNLCPFGEVFNATRFASVYAWNRKRISNCVADYSVLYNSASFSTFKCYGVSPTKLNDLCFTNVYADSFVIRGDEVRQIAPGQTGKIADYNYKLPDDFTGCVIAWNSNNLDSKVGGNYNYLYRLFRKSNLKPFERDISTEIYQAGSTPCNGVEGFNCYFPLQSYGFQPTNGVGYQPYRVVVLSFELLHAPATVCGPKKSTNLVKNKCVNFNFNGLTGTGVLTESNKKFLPFQQFGRDIADTTDAVRDPQTLEILDITPCSFGGVSVITPGTNTSNQVAVLYQGVNCTEVPVAIHADQLTPTWRVYSTGSNVFQTRAGCLIGAEHVNNSYECDIPIGAGICASYHTQTNSPRRARSVASQSIIAYTMSLGAENSVAYSNNSIAIPTNFTISVTTEILPVSMTKTSVDCTMYICGDSTECSNLLLQYGSFCTQLNRALTGIAVEQDKNTQEVFAQVKQIYKTPPIKDFGGFNFSQILPDPSKPSKRSFIEDLLFNKVTLADAGFIKQYGDCLGDIAARDLICAQKFNGLTVLPPLLTDEMIAQYTSALLAGTITSGWTFGAGAALQIPFAMQMAYRFNGIGVTQNVLYENQKLIANQFNSAIGKIQDSLSSTASALGKLQDVVNQNAQALNTLVKCLSSNFGAISSVLNDILSRLDKVEAEVQIDRLITGRLQCLQTYVTQQLIRAAEIRASANLAATKMSECVLGQSKRVDFCGKGYHLMSFPQSAPHGVVFLHVTYVPAQEKNFTTAPAICHDGKAHFPREGVFVSNGTHWFVTQRNFYEPQIITTDNTFVSGNCDVVIGIVNNTVYDPLQPELDSGGGSGGGQIYEGKLTAEGLRFGIVASRFNHALVDRLVEGAIDAIVRHGGREEDITLVRVPGSWEIPVAAGELARKEDIDAVIAIGVLIRGATPHFDYIASEVSKGLADLSLELRKPITFGVITADTLEQAIERAGTKHGNKGWEAALSAIEMANLFKSLR

SEQ ID NO: 8367 - protein, 1307 aa, Artificial Sequence; identical to SEQ ID NO: 8322
  SARS-CoV-2/Iceland/247/2020__EPI_ISL_417575 spike protein (1-1147)(Q965C_S1003C) LumSynth construct

SEQ ID NO: 8368 - protein, 1307 aa, Artificial Sequence
  SARS-CoV-2/Iceland/238/2020__EPI_ISL_417566 spike protein (1-1147)(Q965C_S1003C) LumSynth construct
MFVFLVLLPLVSSQCVNLTTRTQLPPAYTNSFTRGVYYPDKVFRSSVLHSTQDLFLPFFSNVTWFHAIHVSGTNGTKRFDNPVLPFNDGVYFASTEKSNIIRGWIFGTTLDSKTQSLLIVNNATNVVIKVCEFQFCNDPFLGVYYHKNNKSWMESEFRVYSSANNCTFEYVSQPFLMDLEGKQGNFKNLREFVFKNIDGYFKIYSKHTPINLVRDLPQGFSALEPLVDLPIGINITRFQTLLALHRSYLTPGDSSSGWTAGAAAYYVGYLQPRTFLLKYNENGTITDAVDCALDPLSETKCTLKSFTVEKGIYQTSNFRVQPTESIVRFPNITNLCPFGEVFNATRFASVYAWNRKRISNCVADYSVLYNSASFSTFKCYGVSPTKLNDLCFTNVYADSFVIRGDEVRQIAPGQTGKIADYNYKLPDDFTGCVIAWNSNNLDSKVGGNYNYLYRLFRKSNLKPFERDISTEIYQAGSTPCNGVEGFNCYFPLQSYGFQPTNGVGYQPYRVVVLSFELLHAPATVCGPKKSTNLVKNKCVNFNFNGLTGTGVLTESNKKFLPFQQFGRDIADTTDAVRDPQTLEILDITPCSFGGVSVITPGTNTSNQVAVLYQGVNCTEVPVAIHADQLTPTWRVYSTGSNVFQTRAGCLIGAEHVNNSYECDIPIGAGICASYQTQTNSPRRARSVASQSIIAYTMSLGAENSVAYSNNSIAIPTNFTISVTTEILPVSMTKTSVDCTMYICGDSTECSNLLLQYGSFCTQLNRALTGIAVEQDKNTQEVFAQVKQIYKTPPIKDFGGFNFSQILPDPSKPSKRSFIEDLLFNKVTLADVGFIKQYGDCLGDIAARDLICAQKFNGLTVLPPLLTDEMIAQYTSALLAGTITSGWTFGAGAALQIPFAMQMAYRFNGIGVTQNVLYENQKLIANQFNSAIGKIQDSLSSTASALGKLQDVVNQNAQALNTLVKCLSSNFGAISSVLNDILSRLDKVEAEVQIDRLITGRLQCLQTYVTQQLIRAAEIRASANLAATKMSECVLGQSKRVDFCGKGYHLMSFPQSAPHGVVFLHVTYVPAQEKNFTTAPAICHDGKAHFPREGVFVSNGTHWFVTQRNFYEPQIITTDNTFVSGNCDVVIGIVNNTVYDPLQPELDSGGGSGGGQIYEGKLTAEGLRFGIVASRFNHALVDRLVEGAIDAIVRHGGREEDITLVRVPGSWEIPVAAGELARKEDIDAVIAIGVLIRGATPHFDYIASEVSKGLADLSLELRKPITFGVITADTLEQAIERAGTKHGNKGWEAALSAIEMANLFKSLR

SEQ ID NO: 8369 - protein, 1307 aa, Artificial Sequence
  SARS-CoV-2/Greece/16/2020__EPI_ISL_418265 spike protein (1-1147)(Q965C_S1003C) LumSynth construct
MFVFLVLLPLVSSQCVNLTTRTQLPPAYTNSFTRGVYYPDKVFRSSVLHSTQDLFLPFFSNVTWFHAIHVSGTNGTKRFDNPVLPFNDGVYFASTEKSNIIRGWIFGTTLDSKTQSLLIVNNATNVVIKVCEFQFCNDPFLGVYYHKNNKSWMESEFRVYSSANNCTFEYVSQPFLMDLEGKQGNFKNLREFVFKNVDGYFKIYSKHTPINLVRDLPQGFSALEPLVDLPIGINITRFQTLLALHRSYLTPGDSSSGWTAGAAAYYVGYLQPRTFLLKYNENGTITDAVDCALDPLSETKCTLKSFTVEKGIYQTSNFRVQPTESIVRFPNITNLCPFGEVFNATRFASVYAWNRKRISNCVADYSVLYNSASFSTFKCYGVSPTKLNDLCFTNVYADSFVIRGDEVRQIAPGQTGKIADYNYKLPDDFTGCVIAWNSNNLDSKVGGNYNYLYRLFRKSNLKPFERDISTEIYQAGSTPCNGVEGFNCYFPLQSYGFQPTNGVGYQPYRVVVLSFELLHAPATVCGPKKSTNLVKNKCVNFNFNGLTGTGVLTESNKKFLPFQQFGRDIADTTDAVRDPQTLEILDITPCSFGGVSVITPGTNTSNQVAVLYQDVNCTEVPVAIHADQLTPTWRVYSTGSNVFQTRAGCLIGAEHVNNSYECDIPIGAGICASYQTQTNSPRRARSVASQSIIAYTMSLGAENSVAYSNNSIAIPTNFTISVTTEILPVSMTKTSVDCTMYICGDSTECSNLLLQYGSFCTQLNRALTGIAVEQDKNTQEVFAQVKQIYKTPPIKDFGGFNFSQILPDPSKPSKRSFIEDLLFNKVTLADAGFIKQYGDCLGDIAARDLICAQKFNGLTVLPPLLTDEMIAQYTSALLAGTITSGWTFGAGAALQIPFAMQMAYRFNGIGVTQNVLYENQKLIANQFNSAIGKIQDSLSSTASALGKLQDVVNQNAQALNTLVKCLSSNFGAISSVLNDILSRLDKVEAEVQIDRLITGRLQCLQTYVTQQLIRAAEIRASANLAATKMSECVLGQSKRVDFCGKGYHLMSFPQSAPHGVVFLHVTYVPAQEKNFTTAPAICHDGKAHFPREGVFVSNGTHWFVTQRNFYEPQIITTDNTFVSGNCDVVIGIVNNTVYDPLQPELDSGGGSGGGQIYEGKLTAEGLRFGIVASRFNHALVDRLVEGAIDAIVRHGGREEDITLVRVPGSWEIPVAAGELARKEDIDAVIAIGVLIRGATPHFDYIASEVSKGLADLSLELRKPITFGVITADTLEQAIERAGTKHGNKGWEAALSAIEMANLFKSLR

SEQ ID NO: 8370 - protein, 1307 aa, Artificial Sequence
  SARS-CoV-2/Iceland/319/2020__EPI_ISL_417648 spike protein (1-1147)(Q965C_S1003C) LumSynth construct
MFVFLVLLPLVSSQCVNLTTRTQLPPAYTNSFTRGVYYPDKVFRSSVLHSTQDLFLPFFSNVTWFHAIHVSGTNGTKRFDNPVLPFNDGVYFASTEKSNIIRGWIFGTTLDSKTQSLLIVNNATNVVIKVCEFQFCNDPFLGVYYHKNNKSWMESEFRVYSSANNCTFEYVSQPFLIDLEGKQGNFKNLREFVFKNIDGYFKIYSKHTPINLVRDLPQGFSALEPLVDLPIGINITRFQTLLALHRSYLTPGDSSSGWTAGAAAYYVGYLQPRTFLLKYNENGTITDAVDCALDPLSETKCTLKSFTVEKGIYQTSNFRVQPTESIVRFPNITNLCPFGEVFNATRFASVYAWNRKRISNCVADYSVLYNSASFSTFKCYGVSPTKLNDLCFTNVYADSFVIRGDEVRQIAPGQTGKIADYNYKLPDDFTGCVIAWNSNNLDSKVGGNYNYLYRLFRKSNLKPFERDISTEIYQAGSTPCNGVEGFNCYFPLQSYGFQPTNGVGYQPYRVVVLSFELLHAPATVCGPKKSTNLVKNKCVNFNFNGLTGTGVLTESNKKFLPFQQFGRDIADTTDAVRDPQTLEILDITPCSFGGVSVITPGTNTSNQVAVLYQGVNCTEVPVAIHADQLTPTWRVYSTGSNVFQTRAGCLIGAEHVNNSYECDIPIGAGICASYQTQTNSPRRARSVASQSIIAYTMSLGAENSVAYSNNSIAIPTNFTISVTTEILPVSMTKTSVDCTMYICGDSTECSNLLLQYGSFCTQLNRALTGIAVEQDKNTQEVFAQVKQIYKTPPIKDFGGFNFSQILPDPSKPSKRSFIEDLLFNKVTLADAGFIKQYGDCLGDIAARDLICAQKFNGLTVLPPLLTDEMIAQYTSALLAGTITSGWTFGAGAALQIPFAMQMAYRFNGIGVTQNVLYENQKLIANQFNSAIGKIQDSLSSTASALGKLQDVVNQNAQALNTLVKCLSSNFGAISSVLNDILSRLDKVEAEVQIDRLITGRLQCLQTYVTQQLIRAAEIRASANLAATKMSECVLGQSKRVDFCGKGYHLMSFPQSAPHGVVFLHVTYVPAQEKNFTTAPAICHDGKAHFPREGVFVSNGTHWFVTQRNFYEPQIITTDNTFVSGNCDVVIGIVNNTVYDPLQPELDSGGGSGGGQIYEGKLTAEGLRFGIVASRFNHALVDRLVEGAIDAIVRHGGREEDITLVRVPGSWEIPVAAGELARKEDIDAVIAIGVLIRGATPHFDYIASEVSKGLADLSLELRKPITFGVITADTLEQAIERAGTKHGNKGWEAALSAIEMANLFKSLR

SEQ ID NO: 8371 - protein, 1307 aa, Artificial Sequence
  SARS-CoV-2/Congo/94/2020__EPI_ISL_417947 spike protein (1-1147)(Q965C_S1003C) LumSynth construct
MFVFLVLLPLVSSQCVNLTTRTQLPPAYTNSFTRGVYYPDKVFRSSVLHSTQDLFLPFFSNVTWFHAIHVSGTNGTKRFDNPVLPFNDGVYFASTEKSNIIRGWIFGTTLDSKTQSLLIVNNATNVVIKVCEFQFCNDPFLGVYYHKNNKSWMESEFRVYSSANNCTFEYVSQPFLMDLEGKQGNFKNLREFVFKNIDGYFKIYSKHTPINLVRDLPQGFSALEPLVDLPIGINITRFQTLLALHRSYLTPGDSSSGWTAGAAAYYVGYLQPRTFLLKYNENGTITDAVDCALDPLSETKCTLKSFTVEKGIYQTSNFRVQPTESIVRFPNITNLCPFGEVFNATRFASVYAWNRKRISNCVADYSVLYNSASFSTFKCYGVSPTKLNDLCFTNVYADSFVIRGDEVRQIAPGQTGKIADYNYKLPDDFTGCVIAWNSNNLDSKVGGNYNYLYRLFRKSNLKPFERDISTEIYQAGSTPCNGVEGFNCYFPLQSYGFQPTNGVGYQPYRVVVLSFELLHAPATVCGPKKSTNLVKNKCVNFNFNGLTGTGVLTESNKKFLPFQQFGRDIADTTDAVRDPQTLEILDITPCSFGGVSVITPGTNTSNQVAVLYQGVNCTEVPVAIHADQLTPTWRVYSTGSNVFQTRAGCLIGAEHVNNSYECDIPIGAGICASYQTQTNSPRRARSVASQSIIAYTMSLGAENSVAYSNNSIAIPTNFTISVTTEILPVSMTKTSVDCTMYICGDSTECSNLLLQYGSFCTQLNRALTGIAVEQDKNTQEVFAQVKQIYKTPPIKDFGGFNFSQILPDPSKPSKRSFIEDILFNKVTLADAGFIKQYGDCLGDIAARDLICAQKFNGLTVLPPLLTDEMIAQYTSALLAGTITSGWTFGAGAALQIPFAMQMAYRFNGIGVTQNVLYENQKLIANQFNSAIGKIQDSLSSTASALGKLQDVVNQNAQALNTLVKCLSSNFGAISSVLNDILSRLDKVEAEVQIDRLITGRLQCLQTYVTQQLIRAAEIRASANLAATKMSECVLGQSKRVDFCGKGYHLMSFPQSAPHGVVFLHVTYVPAQEKNFTTAPAICHDGKAHFPREGVFVSNGTHWFVTQRNFYEPQIITTDNTFVSGNCDVVIGIVNNTVYDPLQPELDSGGGSGGGQIYEGKLTAEGLRFGIVASRFNHALVDRLVEGAIDAIVRHGGREEDITLVRVPGSWEIPVAAGELARKEDIDAVIAIGVLIRGATPHFDYIASEVSKGLADLSLELRKPITFGVITADTLEQAIERAGTKHGNKGWEAALSAIEMANLFKSLR

SEQ ID NO: 8372 - protein, 1307 aa, Artificial Sequence
  SARS-CoV-2/Congo/158/2020__EPI_ISL_417950 spike protein (1-1147)(Q965C_S1003C) LumSynth construct
MFVFLVLLPLVSSQCVNLTTRTQLPPAYTNSFTRGVYYPDKVFRSSVLHSTQDLFLPFFSNVTWFHAIHVSGTNGTKRFDNPVLPFNDGVYFASTEKSNIIRGWIFGTTLDSKTQSLLIVNNATNVVIKVCEFQFCNDPFLGVYYHKNNKSWMESEFRVYSSANNCTFEYVSQPFLMDLEGKQGNFKNLREFVFKNIDGYFKIYSKHTPINLVRDLPQGFSALEPLVDLPIGINITRFQTLLALHRSYLTPGDSSSGWTAGAAAYYVGYLQPRTFLLKYNENGTITDAVDCALDPLSETKCTLKSFTVEKGIYQTSNFRVQPTESIVRFPNITNLCPFGEVFNATRFASVYAWNRKRISNCVADYSVLYNSASFSTFKCYGVSPTKLNDLCFTNVYADSFVIRGDEVRQIAPGQTGKIADYNYKLPDDFTGCVIAWNSNNLDSKVGGNYNYLYRLFRKSNLKPFERDISTEIYQAGSTPCNGVEGFNCYFPLQSYGFQPTNGVGYQPYRVVVLSFELLHAPATVCGPKKSTNLVKNKCVNFNFNGLTGTGVLTESNKKFLPFQQFGRDIADTTDAVRDPQTLEILDITPCSFGGVSVITPGTNTSNQVAVLYQDVNCTEVPVAIHADQLTPTWRVYSTGSNVFQTRAGCLIGAEHVNNSYECDIPIGAGICASYQTQTNSPRRARSVASQSIIAYTMSLGAENSVAYSNNSIAIPTNFTISVTTEILPVSMTKTSVDCTMYICGDSTECSNLLLQYGSFCTQLNRALTGIAVEQDKNTQEVFAQVKQIYKTPPIKDFGGFNFSQILPDPSKPSKRSFIEDLLFNKVTLADAGFIKQYGDCLGDIAARDLICAQKFNGLTVLPPLLTDEMIAQYTSALLAGTITSGWTFGAGAALQIPFAMQMAYRFNGIGVTQNVLYENQKLIANQFNSAIGKIQDSLSSTASALGKLQDVVNQNAQALNTLVKCLSSNFGAISSVLNDILSRLDKVEAEVQIDRLITGRLQCLQTYVTQQLIRAAEIRASANLAATKMSECVLGQSKRVDFCGKGYHLMSFPQSAPHGVVFLHVTYVPAQEKNFTTAPAICHDGKAHFPREGVFVSNGTHWFVTQRNFYEPQIITTDNTFLSGNCDVVIGIVNNTVYDPLQPELDSGGGSGGGQIYEGKLTAEGLRFGIVASRFNHALVDRLVEGAIDAIVRHGGREEDITLVRVPGSWEIPVAAGELARKEDIDAVIAIGVLIRGATPHFDYIASEVSKGLADLSLELRKPITFGVITADTLEQAIERAGTKHGNKGWEAALSAIEMANLFKSLR

SEQ ID NO: 8373 - protein, 1307 aa, Artificial Sequence
  SARS-CoV-2/USA/UT-00034/2020__EPI_ISL_417977 spike protein (1-1147)(Q965C_S1003C) LumSynth construct
MFVFLVLLPLVSSQCVNLTTRTQLPPAYTNSFTRGVYYPDKVFRSSVLHSTQDLFLPFFSNVTWFHAIHVSGTNGTKRFDNPVLPFNDGVYFASTEKSNIIRGWIFGTTLDSKTQSLLIVNNATNVVIKVCEFQFCNDPFLGVYYYKNNKSWMESEFRVYSSANNCTFEYVSQPFLMDLEGKQGNFKNLREFVFKNIDGYFKIYSKHTPINLVRDLPQGFSALEPLVDLPIGINITRFQTLLALHRSYLTPGDSSSGWTAGAAAYYVGYLQPRTFLLKYNENGTITDAVDCALDPLSETKCTLKSFTVEKGIYQTSNFRVQPTESIVRFPNITNLCPFGEVFNATRFASVYAWNRKRISNCVADYSVLYNSASFSTFKCYGVSPTKLNDLCFTNVYADSFVIRGDEVRQIAPGQTGKIADYNYKLPDDFTGCVIAWNSNNLDSKVGGNYNYLYRLFRKSNLKPFERDISTEIYQAGSTPCNGVEGFNCYFPLQSYGFQPTNGVGYQPYRVVVLSFELLHAPATVCGPKKSTNLVKNKCVNFNFNGLTGTGVLTESNKKFLPFQQFGRDIADTTDAVRDPQTLEILDITPCSFGGVSVITPGTNTSNQVAVLYQGVNCTEVPVAIHADQLTPTWRVYSTGSNVFQTRAGCLIGAEHVNNSYECDIPIGAGICASYQTQTNSPRRARSVASQSIIAYTMSLGAENSVAYSNNSIAIPTNFTISVTTEILPVSMTKTSVDCTMYICGDSTECSNLLLQYGSFCTQLNRALTGIAVEQDKNTQEVFAQVKQIYKTPPIKDFGGFNFSQILPDPSKPSKRSFIEDLLFNKVTLADAGFIKQYGDCLGDIAARDLICAQKFNGLTVLPPLLTDEMIAQYTSALLAGTITSGWTFGAGAALQIPFAMQMAYRFNGIGVTQNVLYENQKLIANQFNSAIGKIQDSLSSTASALGKLQDVVNQNAQALNTLVKCLSSNFGAISSVLNDILSRLDKVEAEVQIDRLITGRLQCLQTYVTQQLIRAAEIRASANLAATKMSECVLGQSKRVDFCGKGYHLMSFPQSAPHGVVFLHVTYVPAQEKNFTTAPAICHDGKAHFPREGVFVSNGTHWFVTQRNFYEPQIITTDNTFVSGNCDVVIGIVNNTVYDPLQPELDSGGGSGGGQIYEGKLTAEGLRFGIVASRFNHALVDRLVEGAIDAIVRHGGREEDITLVRVPGSWEIPVAAGELARKEDIDAVIAIGVLIRGATPHFDYIASEVSKGLADLSLELRKPITFGVITADTLEQAIERAGTKHGNKGWEAALSAIEMANLFKSLR

SEQ ID NO: 8374 - protein, 1307 aa, Artificial Sequence
  SARS-CoV-2/USA/UT-00033/2020__EPI_ISL_417976 spike protein (1-1147)(Q965C_S1003C) LumSynth construct
MFVFLVLLPLVSSQCVNLTTRTQLPPAYTNSFTRGVYYPDKVFRSSVLHSTQDLFLPFFSNVTWFHAIHVSGTNGTKRFDNPVLPFNDGVYFASTEKSNIIRGWIFGTTLDSKTQSLLIVNNATNVVIKVCEFQFCNDPFLGVYYHKNNKSWMESEFRVYSSANNCTFEYVSQPFLMDLEGKQGNFKNLREFVFKNIDGYFKIYSKHTPINLVRDLPQGFSALEPLVDLPIGINITRFQTLLALHRSYLTPGDSSSGLTAGAAAYYVGYLQPRTFLLKYNENGTITDAVDCALDPLSETKCTLKSFTVEKGIYQTSNFRVQPTESIVRFPNITNLCPFGEVFNATRFASVYAWNRKRISNCVADYSVLYNSASFSTFKCYGVSPTKLNDLCFTNVYADSFVIRGDEVRQIAPGQTGKIADYNYKLPDDFTGCVIAWNSNNLDSKVGGNYNYLYRLFRKSNLKPFERDISTEIYQAGSTPCNGVEGFNCYFPLQSYGFQPTNGVGYQPYRVVVLSFELLHAPATVCGPKKSTNLVKNKCVNFNFNGLTGTGVLTESNKKFLPFQQFGRDIADTTDAVRDPQTLEILDITPCSFGGVSVITPGTNTSNQVAVLYQGVNCTEVPVAIHADQLTPTWRVYSTGSNVFQTRAGCLIGAEHVNNSYECDIPIGAGICASYQTQTNSPRRARSVASQSIIAYTMSLGAENSVAYSNNSIAIPTNFTISVTTEILPVSMTKTSVDCTMYICGDSTECSNLLLQYGSFCTQLNRALTGIAVEQDKNTQEVFAQVKQIYKTPPIKDFGGFNFSQILPDPSKPSKRSFIEDLLFNKVTLADAGFIKQYGDCLGDIAARDLICAQKFNGLTVLPPLLTDEMIAQYTSALLAGTITSGWTFGAGAALQIPFAMQMAYRFNGIGVTQNVLYENQKLIANQFNSAIGKIQDSLSSTASALGKLQDVVNQNAQALNTLVKCLSSNFGAISSVLNDILSRLDKVEAEVQIDRLITGRLQCLQTYVTQQLIRAAEIRASANLAATKMSECVLGQSKRVDFCGKGYHLMSFPQSAPHGVVFLHVTYVPAQEKNFTTAPAICHDGKAHFPREGVFVSNGTHWFVTQRNFYEPQIITTDNTFVSGNCDVVIGIVNNTVYDPLQPELDSGGGSGGGQIYEGKLTAEGLRFGIVASRFNHALVDRLVEGAIDAIVRHGGREEDITLVRVPGSWEIPVAAGELARKEDIDAVIAIGVLIRGATPHFDYIASEVSKGLADLSLELRKPITFGVITADTLEQAIERAGTKHGNKGWEAALSAIEMANLFKSLR

SEQ ID NO: 8375 - protein, 1307 aa, Artificial Sequence
  SARS-CoV-2/USA/WI-13/2020__EPI_ISL_417516 spike protein (1-1147)(Q965C_S1003C) LumSynth construct
MFVFLVLLPLVSSQCVNLTTRTQLPPAYTNSFTRGVYYPDKVFRSSVLHSTQDLFLPFFSNVTWFHAIHVSGTNGTKRFDNPVLPFNDGVYFASTEKSNIIRGWIFGTTLDSKTQSLLIVNNATNVVIKVCEFQFCNDPFLGVYYHKNNKSWMESEFRVYSSANNCTFEYVSQPFLMDLEGKQGNFKNLREFVFKNIDGYFKIYSKHTPINLVRDLPQGFSALEPLVDLPIGINITRFQTLLALHRSYLTPGDSSSGWTAGAAAYYVGYLQPRTFLLKYNENGTITDAVDCALDPLSETKCTLKSFTVEKGIYQTSNFRVLPTESIVRFPNITNLCPFGEVFNATRFASVYAWNRKRISNCVADYSVLYNSASFSTFKCYGVSPTKLNDLCFTNVYADSFVIRGDEVRQIAPGQTGKIADYNYKLPDDFTGCVIAWNSNNLDSKVGGNYNYLYRLFRKSNLKPFERDISTEIYQAGSTPCNGVEGFNCYFPLQSYGFQPTNGVGYQPYRVVVLSFELLHAPATVCGPKKSTNLVKNKCVNFNFNGLTGTGVLTESNKKFLPFQQFGRDIADTTDAVRDPQTLEILDITPCSFGGVSVITPGTNTSNQVAVLYQGVNCTEVPVAIHADQLTPTWRVYSTGSNVFQTRAGCLIGAEHVNNSYECDIPIGAGICASYQTQTNSPRRARSVASQSIIAYTMSLGAENSVAYSNNSIAIPTNFTISVTTEILPVSMTKTSVDCTMYICGDSTECSNLLLQYGSFCTQLNRALTGIAVEQDKNTQEVFAQVKQIYKTPPIKDFGGFNFSQILPDPSKPSKRSFIEDLLFNKVTLADAGFIKQYGDCLGDIAARDLICAQKFNGLTVLPPLLTDEMIAQYTSALLAGTITSGWTFGAGAALQIPFAMQMAYRFNGIGVTQNVLYENQKLIANQFNSAIGKIQDSLSSTASALGKLQDVVNQNAQALNTLVKCLSSNFGAISSVLNDILSRLDKVEAEVQIDRLITGRLQCLQTYVTQQLIRAAEIRASANLAATKMSECVLGQSKRVDFCGKGYHLMSFPQSAPHGVVFLHVTYVPAQEKNFTTAPAICHDGKAHFPREGVFVSNGTHWFVTQRNFYEPQIITTDNTFVSGNCDVVIGIVNNTVYDPLQPELDSGGGSGGGQIYEGKLTAEGLRFGIVASRFNHALVDRLVEGAIDAIVRHGGREEDITLVRVPGSWEIPVAAGELARKEDIDAVIAIGVLIRGATPHFDYIASEVSKGLADLSLELRKPITFGVITADTLEQAIERAGTKHGNKGWEAALSAIEMANLFKSLR

SEQ ID NO: 8376 - protein, 1306 aa, Artificial Sequence
  SARS-CoV-2/India/1-27/2020__EPI_ISL_413522 spike protein (1-1146)(Q964C_S1002C) LumSynth construct
MFVFLVLLPLVSSQCVNLTTRTQLPPAYTNSFTRGVYYPDKVFRSSVLHSTQDLFLPFFSNVTWFHAIHVSGTNGTKRFDNPVLPFNDGVYFASTEKSNIIRGWIFGTTLDSKTQSLLIVNNATNVVIKVCEFQFCNDPFLGVYHKNNKSWMESEFRVYSSANNCTFEYVSQPFLMDLEGKQGNFKNLREFVFKNIDGYFKIYSKHTPINLVRDLPQGFSALEPLVDLPIGINITRFQTLLALHRSYLTPGDSSSGWTAGAAAYYVGYLQPRTFLLKYNENGTITDAVDCALDPLSETKCTLKSFTVEKGIYQTSNFRVQPTESIVRFPNITNLCPFGEVFNATRFASVYAWNRKRISNCVADYSVLYNSASFSTFKCYGVSPTKLNDLCFTNVYADSFVIRGDEVIQIAPGQTGKIADYNYKLPDDFTGCVIAWNSNNLDSKVGGNYNYLYRLFRKSNLKPFERDISTEIYQAGSTPCNGVEGFNCYFPLQSYGFQPTNGVGYQPYRVVVLSFELLHAPATVCGPKKSTNLVKNKCVNFNFNGLTGTGVLTESNKKFLPFQQFGRDIADTTDAVRDPQTLEILDITPCSFGGVSVITPGTNTSNQVAVLYQDVNCTEVPVAIHADQLTPTWRVYSTGSNVFQTRAGCLIGAEHVNNSYECDIPIGAGICASYQTQTNSPRRARSVASQSIIAYTMSLGAENSVAYSNNSIAIPTNFTISVTTEILPVSMTKTSVDCTMYICGDSTECSNLLLQYGSFCTQLNRALTGIAVEQDKNTQEVFAQVKQIYKTPPIKDFGGFNFSQILPDPSKPSKRSFIEDLLFNKVTLADAGFIKQYGDCLGDIAARDLICAQKFNGLTVLPPLLTDEMIAQYTSALLAGTITSGWTFGAGAALQIPFAMQMAYRFNGIGVTQNVLYENQKLIANQFNSAIGKIQDSLSSTASALGKLQDVVNQNAQALNTLVKCLSSNFGAISSVLNDILSRLDKVEAEVQIDRLITGRLQCLQTYVTQQLIRAAEIRASANLAATKMSECVLGQSKRVDFCGKGYHLMSFPQSAPHGVVFLHVTYVPAQEKNFTTAPAICHDGKAHFPREGVFVSNGTHWFVTQRNFYEPQIITTDNTFVSGNCDVVIGIVNNTVYDPLQPELDSGGGSGGGQIYEGKLTAEGLRFGIVASRFNHALVDRLVEGAIDAIVRHGGREEDITLVRVPGSWEIPVAAGELARKEDIDAVIAIGVLIRGATPHFDYIASEVSKGLADLSLELRKPITFGVITADTLEQAIERAGTKHGNKGWEAALSAIEMANLFKSLR

SEQ ID NO: 8377 - protein, 1301 aa, Artificial Sequence
  SARS-CoV-2/pangolin/Guangxi/P4L/2017__EPI_ISL_410538 spike protein (1-1141)(Q959C_S997C) LumSynth construct
MFVFLFVLPLVSSQCVNLTTRTGIPPGYTNSSTRGVYYPDKVFRSSILHLTQDLFLPFFSNVTWFNTINYQGGFKKFDNPVLPFNDGVYFASTEKSNIIRGWIFGTTLDARTQSLLIVNNATNVVIKVCEFQFCTDPFLGVYYHNNNKTWVENEFRVYSSANNCTFEYISQPFLMDLEGKQGNFKNLREFVFKNVDGYFKIYSKHTPIDLVRDLPRGFAALEPLVDLPIGINITRFQTLLALHRSYLTPGNLESGWTTGAAAYYVGYLQQRTFLLSYNQNGTITDAVDCSLDPLSETKCTLKSLTVEKGIYQTSNFRVQPTISIVRFPNITNLCPFGEVFNASKFASVYAWNRKRISNCVADYSVLYNSTSFSTFKCYGVSPTKLNDLCFTNVYADSFVVKGDEVRQIAPGQTGVIADYNYKLPDDFTGCVIAWNSVKQDALTGGNYGYLYRLFRKSKLKPFERDISTEIYQAGSTPCNGQVGLNCYYPLERYGFHPTTGVNYQPFRVVVLSFELLNGPATVCGPKLSTTLVKDKCVNFNFNGLTGTGVLTTSKKQFLPFQQFGRDISDTTDAVRDPQTLEILDITPCSFGGVSVITPGTNTSNQVAVLYQDVNCTEVPMAIHAEQLTPAWRVYSAGANVFQTRAGCLVGAEHVNNSYECDIPVGAGICASYHSMSSLRSVNQRSIIAYTMSLGAENSVAYSNNSIAIPTNFTISVTTEILPVSMTKTSVDCTMYICGDSIECSNLLLQYGSFCTQLNRALTGIAVEQDKNTQEVFAQVKQIYKTPPIKDFGGFNFSQILPDPSKPSKRSFIEDLLFNKVTLADAGFIKQYGDCLGDIAARDLICAQKFNGLTVLPPLLTDEMIAQYTSALLAGTITSGWTFGAGAALQIPFAMQMAYRFNGIGVTQNVLYENQKLIANQFNSAIGKIQDSLSSTASALGKLQDVVNQNAQALNTLVKCLSSNFGAISSVLNDILSRLDKVEAEVQIDRLITGRLQCLQTYVTQQLIRAAEIRASANLAATKMSECVLGQSKRVDFCGKGYHLMSFPQSAPHGVVFLHVTYVPAQEKNFTTAPAICHEGKAHFPREGVFVSNGTHWFITQRNFYEPQIITTDNTFVSGSCDVVIGIVNNTVYDPLQPELDSGGGSGGGQIYEGKLTAEGLRFGIVASRFNHALVDRLVEGAIDAIVRHGGREEDITLVRVPGSWEIPVAAGELARKEDIDAVIAIGVLIRGATPHFDYIASEVSKGLADLSLELRKPITFGVITADTLEQAIERAGTKHGNKGWEAALSAIEMANLFKSLR

SEQ ID NO: 8378 - protein, 1301 aa, Artificial Sequence
  SARS-CoV-2/pangolin/Guangxi/P5L/2017__EPI_ISL_410540 spike protein (1-1141)(Q959C_S997C) LumSynth construct
MFVFLFVLPLVSSQCVNLTTRTGIPPGYTNSSTRGVYYPDKVFRSSILHLTQDLFLPFFSNVTWFNTINYQGGFKKFDNPVLPFNDGVYFASTEKSNIIRGWIFGTTLDARTQSLLIVNNATNVVIKVCEFQFCTDPFLGVYYHNNNKTWVENEFRVYSSANNCTFEYISQPFLMDLEGKQGNFKNLREFVFKNVDGYFKIYSKHTPIDLVRDLPRGFAALEPLVDLPIGINITRFQTLLALHRSYLTPGKLESGWTTGAAAYYVGYLQQRTFLLSYNQNGTITDAVDCSLDPLSETKCTLKSLTVEKGIYQTSNFRVQPTISIVRFPNITNLCPFGEVFNASKFASVYAWNRKRISNCVADYSVLYNSTSFSTFKCYGVSPTKLNDLCFTNVYADSFVVKGDEVRQIAPGQTGVIADYNYKLPDDFTGCVIAWNSVKQDALTGGNYGYLYRLFRKSKLKPFERDISTEIYQAGSTPCNGQVGLNCYYPLERYGFHPTTGVNYQPFRVVVLSFELLNGPATVCGPKLSTTLVKDKCVNFNFNGLTGTGVLTTSKKQFLPFQQFGRDISDTTDAVRDPQTLEILDITPCSFGGVSVITPGTNTSNQVAVLYQDVNCTEVPMAIHAEQLTPAWRVYSAGANVFQTRAGCLVGAEHVNNSYECDIPVGAGICASYHSMSSFRSVNQRSIIAYTMSLGAENSVAYSNNSIAIPTNFTISVTTEILPVSMTKTSVDCTMYICGDSIECSNLLLQYGSFCTQLNRALTGIAVEQDKNTQEVFAQVKQIYKTPPIKDFGGFNFSQILPDPSKPSKRSFIEDLLFNKVTLADAGFIKQYGDCLGDIAARDLICAQKFNGLTVLPPLLTDEMIAQYTSALLAGTITSGWTFGAGAALQIPFAMQMAYRFNGIGVTQNVLYENQKLIANQFNSAIGKIQDSLSSTASALGKLQDVVNQNAQALNTLVKCLSSNFGAISSVLNDILSRLDKVEAEVQIDRLITGRLQCLQTYVTQQLIRAAEIRASANLAATKMSECVLGQSKRVDFCGKGYHLMSFPQSAPHGVVFLHVTYVPAQEKNFTTAPAICHEGKAHFPREGVFVSNGTHWFITQRNFYEPQIITTDNTFVSGSCDVVIGIVNNTVYDPLQPELDSGGGSGGGQIYEGKLTAEGLRFGIVASRFNHALVDRLVEGAIDAIVRHGGREEDITLVRVPGSWEIPVAAGELARKEDIDAVIAIGVLIRGATPHFDYIASEVSKGLADLSLELRKPITFGVITADTLEQAIERAGTKHGNKGWEAALSAIEMANLFKSLR

SEQ ID NO: 8379 - protein, 1301 aa, Artificial Sequence
  SARS-CoV-2/pangolin/Guangxi/P5E/2017__EPI_ISL_410541 spike protein (1-1141)(Q959C_S997C) LumSynth construct
MFVFLFVLPLVSSQCVNLTTRTGIPPGYTNSSTRGVYYPDKVFRSSILHLTQDLFLPFFSNVTWFNTITYQGGSKKFDNPVLPFNDGVYFASTEKSNIIRGWIFGTTLDARTQSLLIVNNATNVVIKVCEFQFCTDPFLGVYYHNNNKTWVENEFRVYSSANNCTFEYISQPFLMDLEGKQGNFKNLREFVFKNVDGYFKIYSKHTPIDLVRDLPRGFAALEPLVDLPIGINITRFQTLLALHRSYLTPGKLESGWTTGAAAYYVGYLQQRTFLLSYNQNGTITDAVDCSLDPLSETKCTLKSLTVEKGIYQTSNFRVQPTISIVRFPNITNLCPFGEVFNASKFASVYAWNRKRISNCVADYSVLYNSTSFSTFKCYGVSPTKLNDLCFTNVYADSFVVKGDEVRQIAPGQTGVIADYNYKLPDDFTGCVIAWNSVKQDALTGDNYGYLYRLFRKSKLKPFERDISTEIYQAGSTPCNGQVGLNCYYPLERYGFHPTTGVNYQPFRVVVLSFELLNGPATVCGPKLSTTLVKDKCVNFNFNGLTGTGVLTTSKKQFLPFQQFGRDISDTTDAVRDPQTLEILDITPCSFGGVSVITPGTNTSNQVAVLYQDVNCTEVPMAIHAEQLTPAWRVYSAGANVFQTRAGCLVGAEHVNNSYECDIPVGAGICASYHSMSSFRSVNQRSIIAYTMSLGAENSVAYSNNSIAIPTNFTISVTTEILPVSMTKTSVDCTMYICGDSIECSNLLLQYGSFCTQLNRALTGIAVEQDKNTQEVFAQVKQIYKTPPIKDFGGFNFSQILPDPSKPSKRSFIEDLLFNKVTLADAGFIKQYGDCLGDIAARDLICAQKFNGLTVLPPLLTDEMIAQYTSALLAGTITSGWTFGAGAALQIPFAMQMAYRFNGIGVTQNVLYENQKLIANQFNSAIGKIQDSLSSTASALGKLQDVVNQNAQALNTLVKCLSSNFGAISSVLNDILSRLDKVEAEVQIDRLITGRLQCLQTYVTQQLIRAAEIRASANLAATKMSECVLGQSKRVDFCGKGYHLMSFPQSAPHGVVFLHVTYVPAQEKNFTTAPAICHEGKAHFPREGVFVSNGTHWFITQRNFYEPQIITTDNTFVSGSCDVVIGIVNNTVYDPLQPELDSGGGSGGGQIYEGKLTAEGLRFGIVASRFNHALVDRLVEGAIDAIVRHGGREEDITLVRVPGSWEIPVAAGELARKEDIDAVIAIGVLIRGATPHFDYIASEVSKGLADLSLELRKPITFGVITADTLEQAIERAGTKHGNKGWEAALSAIEMANLFKSLR

SEQ ID NO: 8380 - protein, 1299 aa, Artificial Sequence
  SARS-CoV-2/pangolin/Guangxi/P1E/2017__EPI_ISL_410539 spike protein (1-1139)(Q957C_S995C) LumSynth construct
MFVFLFVLPLVSSQCVNLTTRTGIQPGYTNSSTRGVYYPDKVFRSSILHLTQDLFLPFFSNVTWFNTINYQGGFKKFDNPVLPFNDGVYFASTEKSNIIRGWIFGTTLDARTQSLLIVNNATNVVIKVCEFQFCTDPFLGVYYHNNNKTWVENEFRVYSSANNCTFEYISQPFLMDLEGKQGNFKNLREFVFKNVDGYFKIYSKHTPIDLVRDLPRGFAALEPLVDLPIGINITRFQTLLALHRSYLTPGKLESGWTTGAAAYYVGYLQQRTFLLSYNQNGTITDAVDCSLDPLSETKCTLKSLTVEKGIYQTSNFRVQPTISIVRFPNITNLCPFGEVFNASKFASVYAWNRKRISNCVADYSVLYNSTSFSTFKCYGVSPTKLNDLCFTNVYADSFVVKGDEVRQIAPGQTGVIADYNYKLPDDFTGCVIAWNSVKQDALTGGNYLYRLFRKSKLKPFERDISTEIYQAGSTPCNGQVGLNCYYPLERYGFHPTTGVNYQPFRVVVLSFELLNGPATVCGPKLSTTLVKDKCVNFNFNGLTGTGVLTTSKKQFLPFQQFGRDISDTTDAVRDPQTLEILDITPCSFGGVSVITPGTNTSNQVAVLYQDVNCTEVPMAIHAEQLTPAWRVYSAGANVFQTRAGCLVGAEHVNNSYECDIPVGAGICASYHSMSSLRSVNQRSIIAYTMSLGAENSVAYSNNSIAIPTNFTISVTTEILPVSMTKTSVDCTMYICGDSIECSNLLLQYGSFCTQLNRALTGIAVEQDKNTQEVFAQVKQIYKTPPIKDFGGFNFSQILPDPSKPSKRSFIEDLLFNKVTLADAGFIKQYGDCLGDIAARDLICAQKFNGLTVLPPLLTDEMIAQYTSALLAGTITSGWTFGAGAALQIPFAMQMAYRFNGIGVTQNVLYENQKLIANQFNSAIGKIQDSLSSTASALGKLQDVVNQNAQALNTLVKCLSSNFGAISSVLNDILSRLDKVEAEVQIDRLITGRLQCLQTYVTQQLIRAAEIRASANLAATKMSECVLGQSKRVDFCGKGYHLMSFPQSAPHGVVFLHVTYVPAQEKNFTTAPAICHEGKAHFPREGVFVSNGTHWFITQRNFYEPQIITTDNTFVSGSCDVVIGIVNNTVYDPLQPELDSGGGSGGGQIYEGKLTAEGLRFGIVASRFNHALVDRLVEGAIDAIVRHGGREEDITLVRVPGSWEIPVAAGELARKEDIDAVIAIGVLIRGATPHFDYIASEVSKGLADLSLELRKPITFGVITADTLEQAIERAGTKHGNKGWEAALSAIEMANLFKSLR

SEQ ID NO: 8381 - protein, 1307 aa, Artificial Sequence
  SARS-CoV-2/Wuhan/WIV05/2019__EPI_ISL_402128 spike protein (1-1147)(F970C_G999C) LumSynth construct
MFVFLVLLPLVSSQCVNLTTRTQLPPAYTNSFTRGVYYPDKVFRSSVLHSTQDLFLPFFSNVTWFHAIHVSGTNGTKRFDNPVLPFNDGVYFASTEKSNIIRGWIFGTTLDSKTQSLLIVNNATNVVIKVCEFQFCNDPFLGVYYHKNNKSWMESEFRVYSSANNCTFEYVSQPFLMDLEGKQGNFKNLREFVFKNIDGYFKIYSKHTPINLVRDLPQGFSALEPLVDLPIGINITRFQTLLALHRSYLTPGDSSSGWTAGAAAYYVGYLQPRTFLLKYNENGTITDAVDCALDPLSETKCTLKSFTVEKGIYQTSNFRVQPTESIVRFPNITNLCPFGEVFNATRFASVYAWNRKRISNCVADYSVLYNSASFSTFKCYGVSPTKLNDLCFTNVYADSFVIRGDEVRQIAPGQTGKIADYNYKLPDDFTGCVIAWNSNNLDSKVGGNYNYLYRLFRKSNLKPFERDISTEIYQAGSTPCNGVEGFNCYFPLQSYGFQPTNGVGYQPYRVVVLSFELLHAPATVCGPKKSTNLVKNKCVNFNFNGLTGTGVLTESNKKFLPFQQFGRDIADTTDAVRDPQTLEILDITPCSFGGVSVITPGTNTSNQVAVLYQDVNCTEVPVAIHADQLTPTWRVYSTGSNVFQTRAGCLIGAEHVNNSYECDIPIGAGICASYQTQTNSPRRARSVASQSIIAYTMSLGAENSVAYSNNSIAIPTNFTISVTTEILPVSMTKTSVDCTMYICGDSTECSNLLLQYGSFCTQLNRALTGIAVEQDKNTQEVFAQVKQIYKTPPIKDFGGFNFSQILPDPSKPSKRSFIEDLLFNKVTLADAGFIKQYGDCLGDIAARDLICAQKFNGLTVLPPLLTDEMIAQYTSALLAGTITSGWTFGAGAALQIPFAMQMAYRFNGIGVTQNVLYENQKLIANQFNSAIGKIQDSLSSTASALGKLQDVVNQNAQALNTLVKQLSSNCGAISSVLNDILSRLDKVEAEVQIDRLITCRLQSLQTYVTQQLIRAAEIRASANLAATKMSECVLGQSKRVDFCGKGYHLMSFPQSAPHGVVFLHVTYVPAQEKNFTTAPAICHDGKAHFPREGVFVSNGTHWFVTQRNFYEPQIITTDNTFVSGNCDVVIGIVNNTVYDPLQPELDSGGGSGGGQIYEGKLTAEGLRFGIVASRFNHALVDRLVEGAIDAIVRHGGREEDITLVRVPGSWEIPVAAGELARKEDIDAVIAIGVLIRGATPHFDYIASEVSKGLADLSLELRKPITFGVITADTLEQAIERAGTKHGNKGWEAALSAIEMANLFKSLR

SEQ ID NO: 8382 - protein, 1303 aa, Artificial Sequence
  SARS-CoV-2/bat/Yunnan/RaTG13/2013__EPI_ISL_402131 spike protein (1-1143)(F966C_G995C) LumSynth construct
MFVFLVLLPLVSSQCVNLTTRTQLPPAYTNSSTRGVYYPDKVFRSSVLHLTQDLFLPFFSNVTWFHAIHVSGTNGIKRFDNPVLPFNDGVYFASTEKSNIIRGWIFGTTLDSKTQSLLIVNNATNVVIKVCEFQFCNDPFLGVYYHKNNKSWMESEFRVYSSANNCTFEYVSQPFLMDLEGKQGNFKNLREFVFKNIDGYFKIYSKHTPINLVRDLPPGFSALEPLVDLPIGINITRFQTLLALHRSYLTPGDSSSGWTAGAAAYYVGYLQPRTFLLKYNENGTITDAVDCALDPLSETKCTLKSFTVEKGIYQTSNFRVQPTDSIVRFPNITNLCPFGEVFNATTFASVYAWNRKRISNCVADYSVLYNSTSFSTFKCYGVSPTKLNDLCFTNVYADSFVITGDEVRQIAPGQTGKIADYNYKLPDDFTGCVIAWNSKHIDAKEGGNFNYLYRLFRKANLKPFERDISTEIYQAGSKPCNGQTGLNCYYPLYRYGFYPTDGVGHQPYRVVVLSFELLNAPATVCGPKKSTNLVKNKCVNFNFNGLTGTGVLTESNKKFLPFQQFGRDIADTTDAVRDPQTLEILDITPCSFGGVSVITPGTNASNQVAVLYQDVNCTEVPVAIHADQLTPTWRVYSTGSNVFQTRAGCLIGAEHVNNSYECDIPIGAGICASYQTQTNSRSVASQSIIAYTMSLGAENSVAYSNNSIAIPTNFTISVTTEILPVSMTKTSVDCTMYICGDSTECSNLLLQYGSFCTQLNRALTGIAVEQDKNTQEVFAQVKQIYKTPPIKDFGGFNFSQILPDPSKPSKRSFIEDLLFNKVTLADAGFIKQYGDCLGDIAARDLICAQKFNGLTVLPPLLTDEMIAQYTSALLAGTITSGWTFGAGAALQIPFAMQMAYRFNGIGVTQNVLYENQKLIANQFNSAIGKIQDSLSSTASALGKLQDVVNQNAQALNTLVKQLSSNCGAISSVLNDILSRLDKVEAEVQIDRLITCRLQSLQTYVTQQLIRAAEIRASANLAATKMSECVLGQSKRVDFCGKGYHLMSFPQSAPHGVVFLHVTYVPAQEKNFTTAPAICHDGKAHFPREGVFVSNGTHWFVTQRNFYEPQIITTDNTFVSGSCDVVIGIVNNTVYDPLQPELDSGGGSGGGQIYEGKLTAEGLRFGIVASRFNHALVDRLVEGAIDAIVRHGGREEDITLVRVPGSWEIPVAAGELARKEDIDAVIAIGVLIRGATPHFDYIASEVSKGLADLSLELRKPITFGVITADTLEQAIERAGTKHGNKGWEAALSAIEMANLFKSLR

SEQ ID NO: 8383 - protein, 1307 aa, Artificial Sequence
  SARS-CoV-2/Wuhan/HBCDC-HB-01/2019__EPI_ISL_402132 spike protein (1-1147)(F970C_G999C) LumSynth construct
MFVFLVLLPLVSSQCVNLTTRTQLPPAYTNSITRGVYYPDKVFRSSVLHSTQDLFLPFFSNVTWFHAIHVSGTNGTKRFDNPVLPFNDGVYFASTEKSNIIRGWIFGTTLDSKTQSLLIVNNATNVVIKVCEFQFCNDPFLGVYYHKNNKSWMESEFRVYSSANNCTFEYVSQPFLMDLEGKQGNFKNLREFVFKNIDGYFKIYSKHTPINLVRDLPQGFSALEPLVDLPIGINITRFQTLLALHRSYLTPGDSSSGWTAGAAAYYVGYLQPRTFLLKYNENGTITDAVDCALDPLSETKCTLKSFTVEKGIYQTSNFRVQPTESIVRFPNITNLCPFGEVFNATRFASVYAWNRKRISNCVADYSVLYNSASFSTFKCYGVSPTKLNDLCFTNVYADSFVIRGDEVRQIAPGQTGKIADYNYKLPDDFTGCVIAWNSNNLDSKVGGNYNYLYRLFRKSNLKPFERDISTEIYQAGSTPCNGVEGFNCYFPLQSYGFQPTNGVGYQPYRVVVLSFELLHAPATVCGPKKSTNLVKNKCVNFNFNGLTGTGVLTESNKKFLPFQQFGRDIADTTDAVRDPQTLEILDITPCSFGGVSVITPGTNTSNQVAVLYQDVNCTEVPVAIHADQLTPTWRVYSTGSNVFQTRAGCLIGAEHVNNSYECDIPIGAGICASYQTQTNSPRRARSVASQSIIAYTMSLGAENSVAYSNNSIAIPTNFTISVTTEILPVSMTKTSVDCTMYICGDSTECSNLLLQYGSFCTQLNRALTGIAVEQDKNTQEVFAQVKQIYKTPPIKDFGGFNFSQILPDPSKPSKRSFIEDLLFNKVTLADAGFIKQYGDCLGDIAARDLICAQKFNGLTVLPPLLTDEMIAQYTSALLAGTITSGWTFGAGAALQIPFAMQMAYRFNGIGVTQNVLYENQKLIANQFNSAIGKIQDSLSSTASALGKLQDVVNQNAQALNTLVKQLSSNCGAISSVLNDILSRLDKVEAEVQIDRLITCRLQSLQTYVTQQLIRAAEIRASANLAATKMSECVLGQSKRVDFCGKGYHLMSFPQSAPHGVVFLHVTYVPAQEKNFTTAPAICHDGKAHFPREGVFVSNGTHWFVTQRNFYEPQIITTDNTFVSGNCDVVIGIVNNTVYDPLQPELDSGGGSGGGQIYEGKLTAEGLRFGIVASRFNHALVDRLVEGAIDAIVRHGGREEDITLVRVPGSWEIPVAAGELARKEDIDAVIAIGVLIRGATPHFDYIASEVSKGLADLSLELRKPITFGVITADTLEQAIERAGTKHGNKGWEAALSAIEMANLFKSLR

SEQ ID NO: 8384 - protein, 1307 aa, Artificial Sequence
  SARS-CoV-2/Guangdong/20SF028/2020__EPI_ISL_403936 spike protein (1-1147)(F970C_G999C) LumSynth construct
MFVFLVLLPLVSSQCVNLTTRTQLPPAYTNSFTRGVYYPDKVFRSSVLYSTQDLFLPFFSNVTWFHAIHVSGTNGTKRFDNPVLPFNDGVYFASTEKSNIIRGWIFGTTLDSKTQSLLIVNNATNVVIKVCEFQFCNDPFLGVYYHKNNKSWMESEFRVYSSANNCTFEYVSQPFLMDLEGKQGNFKNLREFVFKNIDGYFKIYSKHTPINLVRDLPQGFSALEPLVDLPIGINITRFQTLLALHRSYLTPGDSSSGWTAGAAAYYVGYLQPRTFLLKYNENGTITDAVDCALDPLSETKCTLKSFTVEKGIYQTSNFRVQPTESIVRFPNITNLCPFGEVFNATRFASVYAWNRKRISNCVADYSVLYNSASFSTFKCYGVSPTKLNDLCFTNVYADSFVIRGDEVRQIAPGQTGKIADYNYKLPDDFTGCVIAWNSNNLDSKVGGNYNYLYRLFRKSNLKPFERDISTEIYQAGSTPCNGVEGFNCYFPLQSYGFQPTNGVGYQPYRVVVLSFELLHAPATVCGPKKSTNLVKNKCVNFNFNGLTGTGVLTESNKKFLPFQQFGRDIADTTDAVRDPQTLEILDITPCSFGGVSVITPGTNTSNQVAVLYQDVNCTEVPVAIHADQLTPTWRVYSTGSNVFQTRAGCLIGAEHVNNSYECDIPIGAGICASYQTQTNSPRRARSVASQSIIAYTMSLGAENSVAYSNNSIAIPTNFTISVTTEILPVSMTKTSVDCTMYICGDSTECSNLLLQYGSFCTQLNRALTGIAVEQDKNTQEVFAQVKQIYKTPPIKDFGGFNFSQILPDPSKPSKRSFIEDLLFNKVTLADAGFIKQYGDCLGDIAARDLICAQKFNGLTVLPPLLTDEMIAQYTSALLAGTITSGWTFGAGAALQIPFAMQMAYRFNGIGVTQNVLYENQKLIANQFNSAIGKIQDSLSSTASALGKLQDVVNQNAQALNTLVKQLSSNCGAISSVLNDILSRLDKVEAEVQIDRLITCRLQSLQTYVTQQLIRAAEIRASANLAATKMSECVLGQSKRVDFCGKGYHLMSFPQSAPHGVVFLHVTYVPAQEKNFTTAPAICHDGKAHFPREGVFVSNGTHWFVTQRNFYEPQIITTDNTFVSGNCDVVIGIVNNTVYDPLQPELDSGGGSGGGQIYEGKLTAEGLRFGIVASRFNHALVDRLVEGAIDAIVRHGGREEDITLVRVPGSWEIPVAAGELARKEDIDAVIAIGVLIRGATPHFDYIASEVSKGLADLSLELRKPITFGVITADTLEQAIERAGTKHGNKGWEAALSAIEMANLFKSLR

SEQ ID NO: 8385 - protein, 1307 aa, Artificial Sequence
  SARS-CoV-2/Shenzhen/SZTH-001/2020__EPI_ISL_406592 spike protein (1-1147)(F970C_G999C) LumSynth construct
MFVFLVLLPLVSSQCVNLTTRTQLPPAYTNSFTRGVYYPDKVFRSSVLHSTQDLFLPFFSNVTWFHAIHVSGTNGTKRFDNPVLPFNDGVYFASTEKSNIIRGWIFGTTLDSKTQSLLIVNNATNVVIKVCEFQFCNDPFLGVYYHKNNKSWMESEFRVYSSANNCTFEYVSQPFLMDLEGKQGNFKNLREFVFKNIDGYFKIYSKHTPINLVRDLPQGFSALEPLVDLPIGINITRFQTLLALHRSYLTPGDSSSGWTAGAAAYYVGYLQPRTFLLKYNENGTITDAVDCALDPLSETKCTLKSFTVEKGIYQTSNFRVQPTESIVRFPNITNLCPFGEVFNATRFASVYAWNRKRISNCVADYSVLYNSASFSTFKCYGVSPTKLNDLCFTNVYADSFVIRGDEVRQIAPGQTGKIADYNYKLPDDFTGCVIAWNSNNLDSKVGGNYNYLYRLFRKSNLKPFERDISTEIYQAGSTPCNGVEGFNCYFPLQSYGFQPTNGVGYQPYRVVVLSFELLHAPATVCGPKKSTNLVKNKCVNFNFNGLTGTGVLTESNKKFLPFQQFGRDIADTTDAVRDPQTLEILDITPCSFGGVSVITPGTNTSNQVAVLYQDVNCTEVPVAIHADQLTPTWRVYSTGSNVFQTRAGCLIGAEHVNNSYECDIPIGAGICASYQTQTNSPRRARSVASQSIIAYTMSLGAENSVAYSNNSIAIPTNFTISVTTEILPVSMTKTSVDCTMYICGDSTECSNLLLQYGSFCTQLNRALTGIAVEQDKNTQEVFAQVKQIYKTPPIKDFGGFNFSQILPDPSKPSKRSFIEDLLFNKVTLADAGFIKQYGDCLGDIAARDLICAQKFNGLTVLPPLLTDEMIAQYTSALLAGTITSGWTFGAGAALQIPFAMQMAYRFNGIGVTQNVLYENQKLIANQFNSAIGKIQDSLSSTASALGKLQDVVNQNAQALNTLVKQLSSNCGAISSVLNDILSRLDKVEAEVQIDRLITCRLQSLQTYVTQQLIRAAEIRASANLAATKMSECVLGQSKRVDFCGKGYHLMSFPQSAPHGVVFLHVTYVPAQEKNFTTAPAICHDGKAHFPREGVFVSNGTHWFVTQRNFYEPQIITTDNTFVSGNCDVLIGIVNNTVYDPLQPELDSGGGSGGGQIYEGKLTAEGLRFGIVASRFNHALVDRLVEGAIDAIVRHGGREEDITLVRVPGSWEIPVAAGELARKEDIDAVIAIGVLIRGATPHFDYIASEVSKGLADLSLELRKPITFGVITADTLEQAIERAGTKHGNKGWEAALSAIEMANLFKSLR

SEQ ID NO: 8386 - protein, 1307 aa, Artificial Sequence
  SARS-CoV-2/Shenzhen/SZTH-004/2020__EPI_ISL_406595 spike protein (1-1147)(F970C_G999C) LumSynth construct
MFVFLVLLPLVSSQCVNLTTRTQLPPAYTNSFTRGVYYPDKVFRSSVLHSTQDLFLPFFSNVTWFHAIHVSGTNGTKRFDNPVLPFNDGVYFASTEKSNIIRGWIFGTTLDSKTQSLLIVNNATNVVIKVCEFQFCNDPFLGVYYHKNNKSWMESEFRVYSSANNCTFEYVSQPFLMDLEGKQGNFKNLREFVFKNIDGYFKIYSKHTPINLVRDLPQGFSALEPLVDLPIGINITRFQTLLALHRSYLTPGDSSSGWTAGAAAYYVGYLQPRTFLLKYNENGTITDAVDCALDPLSETKCTLKSFTVEKGIYQTSNFRVQPTESIVRFPNITNLCPFGEVFNATRFASVYAWDRKRISNCVAYYSVLYNSASFSTFKCYGVSPTKLNDLCFTNVYADSFVIRGDEVRQIAPGQTGKIADYNYKLPDDFTGCVIAWNSNNLDSKVGGNYNYLYRLFRKSNLKPFERDISTEIYQAGSTPCNGVEGFNCYFPLQSYGFQPTNGVGYQPYRVVVLSFELLHAPATVCGPKKSTNLVKNKCVNFNFNGLTGTGVLTESNKKFLPFQQFGRDIADTTDAVRDPQTLEILDITPCSFGGVSVITPGTNTSNQVAVLYQDVNCTEVPVAIHADQLTPTWRVYSTGSNVFQTRAGCLIGAEHVNNSYECDIPIGAGICASYQTQTNSPRRARSVASQSIIAYTMSLGAENSVAYSNNSIAIPTNFTISVTTEILPVSMTKTSVDCTMYICGDSTECSNLLLQYGSFCTQLNRALTGIAVEQDKNTQEVFAQVKQIYKTPPIKDFGGFNFSQILPDPSKPSKRSFIEDLLFNKVTLADAGFIKQYGDCLGDIAARDLICAQKFNGLTVLPPLLTDEMIAQYTSALLAGTITSGWTFGAGAALQIPFAMQMAYRFNGIGVTQNVLYENQKLIANQFNSAIGKIQDSLSSTASALGKLQDVVNQNAQALNTLVKQLSSNCGAISSVLNDILSRLDKVEAEVQIDRLITCRLQSLQTYVTQQLIRAAEIRASANLAATKMSECVLGQSKRVDFCGKGYHLMSFPQSAPHGVVFLHVTYVPAQEKNFTTAPAICHDGKAHFPREGVFVSNGTHWFVTQRNFYEPQIITTDNTFVSGNCDVVIGIVNNTVYDPLQPELDSGGGSGGGQIYEGKLTAEGLRFGIVASRFNHALVDRLVEGAIDAIVRHGGREEDITLVRVPGSWEIPVAAGELARKEDIDAVIAIGVLIRGATPHFDYIASEVSKGLADLSLELRKPITFGVITADTLEQAIERAGTKHGNKGWEAALSAIEMANLFKSLR

SEQ ID NO: 8387 - protein, 1307 aa, Artificial Sequence
  SARS-CoV-2/France/IDF0372/2020__EPI_ISL_406596 spike protein (1-1147)(F970C_G999C) LumSynth construct
MFVFLVLLPLVSSQCVNLTTRTQLPPAYTNSFTRGVYYPDKVFRSSVLHSTQDLFLPFFSNVTWFHAIHVSGTNGTKRFDNPVLPFNDGVYFASTEKSNIIRGWIFGTTLDSKTQSLLIVNNATNVVIKVCEFQFCNDPFLGVYYHKNNKSWMESEFRVYSSANNCTFEYVSQPFLMDLEGKQGNFKNLREFVFKNIDGYFKIYSKHTPINLVRDLPQGFSALEPLVDLPIGINITRFQTLLALHRSYLTPGDSSSGWTAGAAAYYVGYLQPRTFLLKYNENGTITDAVDCALDPLSETKCTLKSFTVEKGIYQTSNFRVQPTESIVRFPNITNLCPFGEVFNATRFASVYAWNRKRISNCVADYSFLYNSASFSTFKCYGVSPTKLNDLCFTNVYADSFVIRGDEVRQIAPGQTGKIADYNYKLPDDFTGCVIAWNSNNLDSKVGGNYNYLYRLFRKSNLKPFERDISTEIYQAGSTPCNGVEGFNCYFPLQSYGFQPTNGVGYQPYRVVVLSFELLHAPATVCGPKKSTNLVKNKCVNFNFNGLTGTGVLTESNKKFLPFQQFGRDIADTTDAVRDPQTLEILDITPCSFGGVSVITPGTNTSNQVAVLYQDVNCTEVPVAIHADQLTPTWRVYSTGSNVFQTRAGCLIGAEHVNNSYECDIPIGAGICASYQTQTNSPRRARSVASQSIIAYTMSLGAENSVAYSNNSIAIPTNFTISVTTEILPVSMTKTSVDCTMYICGDSTECSNLLLQYGSFCTQLNRALTGIAVEQDKNTQEVFAQVKQIYKTPPIKDFGGFNFSQILPDPSKPSKRSFIEDLLFNKVTLADAGFIKQYGDCLGDIAARDLICAQKFNGLTVLPPLLTDEMIAQYTSALLAGTITSGWTFGAGAALQIPFAMQMAYRFNGIGVTQNVLYENQKLIANQFNSAIGKIQDSLSSTASALGKLQDVVNQNAQALNTLVKQLSSNCGAISSVLNDILSRLDKVEAEVQIDRLITCRLQSLQTYVTQQLIRAAEIRASANLAATKMSECVLGQSKRVDFCGKGYHLMSFPQSAPHGVVFLHVTYVPAQEKNFTTAPAICHDGKAHFPREGVFVSNGTHWFVTQRNFYEPQIITTDNTFVSGNCDVVIGIVNNTVYDPLQPELDSGGGSGGGQIYEGKLTAEGLRFGIVASRFNHALVDRLVEGAIDAIVRHGGREEDITLVRVPGSWEIPVAAGELARKEDIDAVIAIGVLIRGATPHFDYIASEVSKGLADLSLELRKPITFGVITADTLEQAIERAGTKHGNKGWEAALSAIEMANLFKSLR

SEQ ID NO: 8388 - protein, 1307 aa, Artificial Sequence
  SARS-CoV-2/Australia/VIC01/2020__EPI_ISL_406844 spike protein (1-1147)(F970C_G999C) LumSynth construct
MFVFLVLLPLVSSQCVNLTTRTQLPPAYTNSFTRGVYYPDKVFRSSVLHSTQDLFLPFFSNVTWFHAIHVSGTNGTKRFDNPVLPFNDGVYFASTEKSNIIRGWIFGTTLDSKTQSLLIVNNATNVVIKVCEFQFCNDPFLGVYYHKNNKSWMESEFRVYSSANNCTFEYVSQPFLMDLEGKQGNFKNLREFVFKNIDGYFKIYSKHTPINLVRDLPQGFSALEPLVDLPIGINITRFQTLLALHRRYLTPGDSSSGWTAGAAAYYVGYLQPRTFLLKYNENGTITDAVDCALDPLSETKCTLKSFTVEKGIYQTSNFRVQPTESIVRFPNITNLCPFGEVFNATRFASVYAWNRKRISNCVADYSVLYNSASFSTFKCYGVSPTKLNDLCFTNVYADSFVIRGDEVRQIAPGQTGKIADYNYKLPDDFTGCVIAWNSNNLDSKVGGNYNYLYRLFRKSNLKPFERDISTEIYQAGSTPCNGVEGFNCYFPLQSYGFQPTNGVGYQPYRVVVLSFELLHAPATVCGPKKSTNLVKNKCVNFNFNGLTGTGVLTESNKKFLPFQQFGRDIADTTDAVRDPQTLEILDITPCSFGGVSVITPGTNTSNQVAVLYQDVNCTEVPVAIHADQLTPTWRVYSTGSNVFQTRAGCLIGAEHVNNSYECDIPIGAGICASYQTQTNSPRRARSVASQSIIAYTMSLGAENSVAYSNNSIAIPTNFTISVTTEILPVSMTKTSVDCTMYICGDSTECSNLLLQYGSFCTQLNRALTGIAVEQDKNTQEVFAQVKQIYKTPPIKDFGGFNFSQILPDPSKPSKRSFIEDLLFNKVTLADAGFIKQYGDCLGDIAARDLICAQKFNGLTVLPPLLTDEMIAQYTSALLAGTITSGWTFGAGAALQIPFAMQMAYRFNGIGVTQNVLYENQKLIANQFNSAIGKIQDSLSSTASALGKLQDVVNQNAQALNTLVKQLSSNCGAISSVLNDILSRLDKVEAEVQIDRLITCRLQSLQTYVTQQLIRAAEIRASANLAATKMSECVLGQSKRVDFCGKGYHLMSFPQSAPHGVVFLHVTYVPAQEKNFTTAPAICHDGKAHFPREGVFVSNGTHWFVTQRNFYEPQIITTDNTFVSGNCDVVIGIVNNTVYDPLQPELDSGGGSGGGQIYEGKLTAEGLRFGIVASRFNHALVDRLVEGAIDAIVRHGGREEDITLVRVPGSWEIPVAAGELARKEDIDAVIAIGVLIRGATPHFDYIASEVSKGLADLSLELRKPITFGVITADTLEQAIERAGTKHGNKGWEAALSAIEMANLFKSLR

SEQ ID NO: 8389 - protein, 1307 aa, Artificial Sequence
  SARS-CoV-2/Germany/BavPat1/2020__EPI_ISL_406862 spike protein (1-1147)(F970C_G999C) LumSynth construct
MFVFLVLLPLVSSQCVNLTTRTQLPPAYTNSFTRGVYYPDKVFRSSVLHSTQDLFLPFFSNVTWFHAIHVSGTNGTKRFDNPVLPFNDGVYFASTEKSNIIRGWIFGTTLDSKTQSLLIVNNATNVVIKVCEFQFCNDPFLGVYYHKNNKSWMESEFRVYSSANNCTFEYVSQPFLMDLEGKQGNFKNLREFVFKNIDGYFKIYSKHTPINLVRDLPQGFSALEPLVDLPIGINITRFQTLLALHRSYLTPGDSSSGWTAGAAAYYVGYLQPRTFLLKYNENGTITDAVDCALDPLSETKCTLKSFTVEKGIYQTSNFRVQPTESIVRFPNITNLCPFGEVFNATRFASVYAWNRKRISNCVADYSVLYNSASFSTFKCYGVSPTKLNDLCFTNVYADSFVIRGDEVRQIAPGQTGKIADYNYKLPDDFTGCVIAWNSNNLDSKVGGNYNYLYRLFRKSNLKPFERDISTEIYQAGSTPCNGVEGFNCYFPLQSYGFQPTNGVGYQPYRVVVLSFELLHAPATVCGPKKSTNLVKNKCVNFNFNGLTGTGVLTESNKKFLPFQQFGRDIADTTDAVRDPQTLEILDITPCSFGGVSVITPGTNTSNQVAVLYQGVNCTEVPVAIHADQLTPTWRVYSTGSNVFQTRAGCLIGAEHVNNSYECDIPIGAGICASYQTQTNSPRRARSVASQSIIAYTMSLGAENSVAYSNNSIAIPTNFTISVTTEILPVSMTKTSVDCTMYICGDSTECSNLLLQYGSFCTQLNRALTGIAVEQDKNTQEVFAQVKQIYKTPPIKDFGGFNFSQILPDPSKPSKRSFIEDLLFNKVTLADAGFIKQYGDCLGDIAARDLICAQKFNGLTVLPPLLTDEMIAQYTSALLAGTITSGWTFGAGAALQIPFAMQMAYRFNGIGVTQNVLYENQKLIANQFNSAIGKIQDSLSSTASALGKLQDVVNQNAQALNTLVKQLSSNCGAISSVLNDILSRLDKVEAEVQIDRLITCRLQSLQTYVTQQLIRAAEIRASANLAATKMSECVLGQSKRVDFCGKGYHLMSFPQSAPHGVVFLHVTYVPAQEKNFTTAPAICHDGKAHFPREGVFVSNGTHWFVTQRNFYEPQIITTDNTFVSGNCDVVIGIVNNTVYDPLQPELDSGGGSGGGQIYEGKLTAEGLRFGIVASRFNHALVDRLVEGAIDAIVRHGGREEDITLVRVPGSWEIPVAAGELARKEDIDAVIAIGVLIRGATPHFDYIASEVSKGLADLSLELRKPITFGVITADTLEQAIERAGTKHGNKGWEAALSAIEMANLFKSLR

SEQ ID NO: 8390 - protein, 1307 aa, Artificial Sequence
  SARS-CoV-2/Wuhan/HBCDC-HB-02/2020__EPI_ISL_412978 spike protein (1-1147)(F970C_G999C) LumSynth construct
MFVFLVLLPLVSSQCVNLTTRTQLPPAYTNSFTRGVYYPDKVFRSSVLHSTQDLFLPFFSNVTWFHAIHVSGTNGTKRFDNPVLPFNDGVYFASTEKSNIIRGWIFGTTLDSKTQSLLIVNNATNVVIKVCEFQFCNDPFLGVYYHKNNKSWMESEFRVYSSANNCTFEYVSQPFLMDLEGKQGNFKNLREFVFKNIDGYFKIYSKHTPINLVRDLPQGFSALEPLVDLPIGINITRFQTLLALHRSYLTPGDSSSGWTAGAAAYYVGYLQPRTFLLKYNENGTITDAVDCALDPLSETKCTLKSFTVEKGIYQTSNFRVQPTESIVRFPNITNLCPFGEVFNATRFASVYAWNRKRISNCVADYSVLYNSASFSTFKCYGVSPTKLNDLCFTNVYADSFVIRGDEVRQIAPGQTGKIADYNYKLPDDFTGCVIAWNSNNLDSKVGGNYNYLYRLFRKSNLKPFERDISTEIYQAGSTPCNGVEGFNCYFPLQSYGFQPTNGVGYQPYRVVVLSFELLHAPATVCGPKKSTNLVKNKCVNFNFNGLTGTGVLTESNKKFLPFQQFGRDIADTTDAVRDPQTLEILDITPCSFGGVSVITPGTNTSNQVAVLYQDVNCTEVPVAIHADQLTPTWRVYSTGSNVFQTRAGCLIGAEHVNNSYECDIPIGAGICASYQTQTNSPRRARSVASQSIIAYTMSLGAENSVAYSNNSIAIPTNFTISVTTEILPVSMTKTSVDCTMYICGDSTECSNFLLQYGSFCTQLNRALTGIAVEQDKNTQEVFAQVKQIYKTPPIKDFGGFNFSQILPDPSKPSKRSFIEDLLFNKVTLADAGFIKQYGDCLGDIAARDLICAQKFNGLTVLPPLLTDEMIAQYTSALLAGTITSGWTFGAGAALQIPFAMQMAYRFNGIGVTQNVLYENQKLIANQFNSAIGKIQDSLSSTASALGKLQDVVNQNAQALNTLVKQLSSNCGAISSVLNDILSRLDKVEAEVQIDRLITCRLQSLQTYVTQQLIRAAEIRASANLAATKMSECVLGQSKRVDFCGKGYHLMSFPQSAPHGVVFLHVTYVPAQEKNFTTAPAICHDGKAHFPREGVFVSNGTHWFVTQRNFYEPQIITTDNTFVSGNCDVVIGIVNNTVYDPLQPELDSGGGSGGGQIYEGKLTAEGLRFGIVASRFNHALVDRLVEGAIDAIVRHGGREEDITLVRVPGSWEIPVAAGELARKEDIDAVIAIGVLIRGATPHFDYIASEVSKGLADLSLELRKPITFGVITADTLEQAIERAGTKHGNKGWEAALSAIEMANLFKSLR

SEQ ID NO: 8391 - protein, 1307 aa, Artificial Sequence
  SARS-CoV-2/Australia/QLD02/2020__EPI_ISL_407896 spike protein (1-1147)(F970C_G999C) LumSynth construct
MFVFLVLLPLVSSQCVNLTTRTQLPPAYTNSFTRGVYYPDKVFRSSVLHSTQDLFLPFFSNVTWFHAIHVSGTNGTKRFDNPVLPFNDGVYFASTEKSNIIRGWIFGTTLDSKTQSLLIVNNATNVVIKVCEFQFCNDPFLGVYYHKNNKSWMESEFRVYSSANNCTFEYVSQPFLMDLEGKQGNFKNLREFVFKNIDGYFKIYSKHTPINLVRDLPQGFSALEPLVDLPIGINITRFQTLLALHRSYLTPGDSSSGWTAGAAAYYVGYLQPRTFLLKYNENGTITDAVDCALDPLSETKCTLKSFTVEKGIYQTSNFRVQPTESIVRFPNITNLCPFGEVFNATRFASVYAWNRKRISNCVADYSVLYNSASFSTFKCYGVSPTKLNDLCFTNVYADSFVIRGDEVRQIAPGQTGKIADYNYKLPDDFTGCVIAWNSNNLDSKVGGNYNYLYRLFRKSNLKPFERDISTEIYQAGSTPCNGVEGFNCYFPLQSYGFQPTNGVGYQPYRVVVLSFELLHAPATVCGPKKSTNLVKNKCVNFNFNGLTGTGVLTESNKKFLPFQQFGRDIADTTDAVRDPQTLEILDITPCSFGGVSVITPGTNTSNQVAVLYQDVNCTEVPVAIHADQLTPTWRVYSTGSNVFQTRAGCLIGAEHVNNSYECDIPIGAGICASYQTQTNSPRRARSVASQSIIAYTMSLGAENSVAYSNNSIAIPTNFTISVTTEILPVSMTKTSVDCTMYICGDSTECSNLLLQYGSFCTQLNRALTGIAVEQDKNTQEVFAQVKQIYKTPPIKDFGGFNFSQILPDPSKPSKRSFIEDLLFNKVTLADAGFIKQYGDCLGDIAARDLICAQKFNGLTVLPPLLTDEMIAQYTSALLAGTITSGWTFGAGAALQIPFAMQMAYRFNGIGVTQNVLYENQKLIANQFNSAIGKIQDSLSSTASALGKLQDVVNQNAQALNTLVKQLSSNCGAISSVLNDILSRLDKVEAEVQIDRLITCRLQSLQTYVTQQLIRAAEIRASANLAATKMSECVLGQSKRVDFCGKGYHLMSFPQSAPHGVVFLHVTYVPAQEKNFTTAPAICHDGKAHFPREGVFVSNGTHWFVTQRNFYEPQIITTDNTFVSGNCDVVIGIVNNTVYDPLQLELDSGGGSGGGQIYEGKLTAEGLRFGIVASRFNHALVDRLVEGAIDAIVRHGGREEDITLVRVPGSWEIPVAAGELARKEDIDAVIAIGVLIRGATPHFDYIASEVSKGLADLSLELRKPITFGVITADTLEQAIERAGTKHGNKGWEAALSAIEMANLFKSLR

SEQ ID NO: 8392 - protein, 1307 aa, Artificial Sequence
  SARS-CoV-2/India/1-31/2020__EPI_ISL_413523 spike protein (1-1147)(F970C_G999C) LumSynth construct
MFVFLVLLPLVSSQCVNLTTRTQLPPAYTNSFTRGVYYPDKVFRSSVLHSTQDLFLPFFSNVTWFHAIHVSGTNGTKRFDNPVLPFNDGVYFASTEKSNIIRGWIFGTTLDSKTQSLLIVNNATNVVIKVCEFQFCNDPFLGVYYHKNNKSWMESEFRVYSSANNCTFEYVSQPFLMDLEGKQGNFKNLREFVFKNIDGYFKIYSKHTPINLVRDLPQGFSALEPLVDLPIGINITRFQTLLALHRSYLTPGDSSSGWTAGAAAYYVGYLQPRTFLLKYNENGTITDAVDCALDPLSETKCTLKSFTVEKGIYQTSNFRVQPTESIVRFPNITNLCPFGEVFNATRFASVYAWNRKRISNCVADYSVLYNSASFSTFKCYGVSPTKLNDLCFTNVYADSFVIRGDEVRQIAPGQTGKIADYNYKLPDDFTGCVIAWNSNNLDSKVGGNYNYLYRLFRKSNLKPFERDISTEIYQAGSTPCNGVEGFNCYFPLQSYGFQPTNGVGYQPYRVVVLSFELLHAPATVCGPKKSTNLVKNKCVNFNFNGLTGTGVLTESNKKFLPFQQFGRDIADTTDAVRDPQTLEILDITPCSFGGVSVITPGTNTSNQVAVLYQDVNCTEVPVAIHADQLTPTWRVYSTGSNVFQTRAGCLIGAEHVNNSYECDIPIGAGICASYQTQTNSPRRARSVASQSIIAYTMSLGAENSVAYSNNSIAIPTNFTISVTTEILPVSMTKTSVDCTMYICGDSTECSNLLLQYGSFCTQLNRALTGIAVEQDKNTQEVFAQVKQIYKTPPIKDFGGFNFSQILPDPSKPSKRSFIEDLLFNKVTLADAGFIKQYGDCLGDIAARDLICAQKFNGLTVLPPLLTDEMIAQYTSALLAGTITSGWTFGAGAALQIPFAMQMAYRFNGIGVTQNVLYENQKLIANQFNSVIGKIQDSLSSTASALGKLQDVVNQNAQALNTLVKQLSSNCGAISSVLNDILSRLDKVEAEVQIDRLITCRLQSLQTYVTQQLIRAAEIRASANLAATKMSECVLGQSKRVDFCGKGYHLMSFPQSAPHGVVFLHVTYVPAQEKNFTTAPAICHDGKAHFPREGVFVSNGTHWFVTQRNFYEPQIITTDNTFVSGNCDVVIGIVNNTVYDPLQPELDSGGGSGGGQIYEGKLTAEGLRFGIVASRFNHALVDRLVEGAIDAIVRHGGREEDITLVRVPGSWEIPVAAGELARKEDIDAVIAIGVLIRGATPHFDYIASEVSKGLADLSLELRKPITFGVITADTLEQAIERAGTKHGNKGWEAALSAIEMANLFKSLR

SEQ ID NO: 8393 - protein, 1307 aa, Artificial Sequence
  SARS-CoV-2/Guangdong/GD2020087-P0008/2020__EPI_ISL_413863 spike protein (1-1147)(F970C_G999C) LumSynth construct
MFVFLVLLPLVSSQCVNLTTRTQLPPAYTNSFTRGVYYPDKVFRSSVLHSTQDLFLPFFSNVTWFHAIHVSGTNGTKRFDNPVLPFNDGVYFASTEKSNIIRGWIFGTTLDSKTQSLLIVNNATNVVIKVCEFQFCNDPFLGVYYHKNNKSWMESEFRVYSSANNCTFEYVSQPFLMDLEGKQGNFKNLREFVFKNIDGYFKIYSKHTPINLVRDLPQGFSALEPLVDLPIGINITRFQTLLALHRSYLTPGDSSSGWTAGAAAYYVGYLQPRTFLLKYNENGTITDAVDCALDPLSETKCTLKSFTVEKGIYQTSNFRVQPTESIVRFPNITNLCPFGEVFNATRFASVYAWNRKRISNCVADYSVLYNSASFSTFKCYGVSPTKLNDLCFTNVYADSFVIRGDEVREIAPGQTGKIADYNYKLPDDFTGCVIAWNSNNLDSKVGGNYNYLYRLFRKSNLKPFERDISTEIYQAGSTPCNGVEGFNCYFPLQSYGFQPTNGVGYQPYRVVVLSFELLHAPATVCGPKKSTNLVKNKCVNFNFNGLTGTGVLTESNKKFLPFQQFGRDIADTTDAVRDPQTLEILDITPCSFGGVSVITPGTNTSNQVAVLYQDVNCTEVPVAIHADQLTPTWRVYSTGSNVFQTRAGCLIGAEHVNNSYECDIPIGAGICASYQTQTNSPRRARSVASQSIIAYTMSLGAENSVAYSNNSIAIPTNFTISVTTEILPVSMTKTSVDCTMYICGDSTECSNLLLQYGSFCTQLNRALTGIAVEQDKNTQEVFAQVKQIYKTPPIKDFGGFNFSQILPDPSKPSKRSFIEDLLFNKVTLADAGFIKQYGDCLGDIAARDLICAQKFNGLTVLPPLLTDEMIAQYTSALLAGTITSGWTFGAGAALQIPFAMQMAYRFNGIGVTQNVLYENQKLIANQFNSAIGKIQDSLSSTASALGKLQDVVNQNAQALNTLVKQLSSNCGAISSVLNDILSRLDKVEAEVQIDRLITCRLQSLQTYVTQQLIRAAEIRASANLAATKMSECVLGQSKRVDFCGKGYHLMSFPQSAPHGVVFLHVTYVPAQEKNFTTAPAICHDGKAHFPREGVFVSNGTHWFVTQRNFYEPQIITTDNTFVSGNCDVVIGIVNNTVYDPLQPELDSGGGSGGGQIYEGKLTAEGLRFGIVASRFNHALVDRLVEGAIDAIVRHGGREEDITLVRVPGSWEIPVAAGELARKEDIDAVIAIGVLIRGATPHFDYIASEVSKGLADLSLELRKPITFGVITADTLEQAIERAGTKHGNKGWEAALSAIEMANLFKSLR

SEQ ID NO: 8394 - protein, 1307 aa, Artificial Sequence
  SARS-CoV-2/Sweden/01/2020__EPI_ISL_411951 spike protein (1-1147)(F970C_G999C) LumSynth construct
MFVFLVLLPLVSSQCVNLTTRTQLPPAYTNSFTRGVYYPDKVFRSSVLHSTQDLFLPFFSNVTWFHAIHVSGTNGTKRFDNPVLPFNDGVYFASTEKSNIIRGWIFGTTLDSKTQSLLIVNNATNVVIKVCEFQFCNDPFLGVYYHKNNKSWMESEFRVYSSANNCTFEYVSQPFLMDLEGKQGNFKNLREFVFKNIDGYFKIYSKHTPINLVRDLPQGFSALEPLVDLPIGINITRFQTLLALHRSYLTPGDSSSGWTAGAAAYYVGYLQPRTFLLKYNENGTITDAVDCALDPLSETKCTLKSFTVEKGIYQTSNFRVQPTESIVRFPNITNLCPFGEVFNATRFASVYAWNRKRISNCVADYSVLYNSASFSTFKCYGVSPTKLNDLCFTNVYADSFVIRGDEVRQIAPGQTGKIADYNYKLPDDFTGCVIAWNSNNLDSKVGGNYNYLYRLFRKSNLKPFERDISTEIYQAGSTPCNGVEGFNCYFPLQSYGFQPTNGVGYQPYRVVVLSFELLHAPATVCGPKKSTNLVKNKCVNFNFNGLTGTGVLTESNKKFLPFQQFGRDIADTTDAVRDPQTLEILDITPCSFGGVSVITPGTNTSNQVAVLYQDVNCTEVPVAIHADQLTPTWRVYSTGSNVFQTRAGCLIGAEHVNNSYECDIPIGAGICASYQTQTNSPRRARSVASQSIIAYTMSLGAENSVAYSNNSIAIPTNFTISVTTEILPVSMTKTSVDCTMYICGDSTECSNLLLQYGSFCTQLNRALTGIAVEQDKNTQEVFAQVKQIYKTPPIKDCGGFNFSQILPDPSKPSKRSFIEDLLFNKVTLADAGFIKQYGDCLGDIAARDLICAQKFNGLTVLPPLLTDEMIAQYTSALLAGTITSGWTFGAGAALQIPFAMQMAYRFNGIGVTQNVLYENQKLIANQFNSAIGKIQDSLSSTASALGKLQDVVNQNAQALNTLVKQLSSNCGAISSVLNDILSRLDKVEAEVQIDRLITCRLQSLQTYVTQQLIRAAEIRASANLAATKMSECVLGQSKRVDFCGKGYHLMSFPQSAPHGVVFLHVTYVPAQEKNFTTAPAICHDGKAHFPREGVFVSNGTHWFVTQRNFYEPQIITTDNTFVSGNCDVVIGIVNNTVYDPLQPELDSGGGSGGGQIYEGKLTAEGLRFGIVASRFNHALVDRLVEGAIDAIVRHGGREEDITLVRVPGSWEIPVAAGELARKEDIDAVIAIGVLIRGATPHFDYIASEVSKGLADLSLELRKPITFGVITADTLEQAIERAGTKHGNKGWEAALSAIEMANLFKSLR

SEQ ID NO: 8395 - protein, 1307 aa, Artificial Sequence
  SARS-CoV-2/Tianmen/HBCDC-HB-07/2020__EPI_ISL_412983 spike protein (1-1147)(F970C_G999C) LumSynth construct
MFVFLVLLPLVSSQCVNLTTRTQLPPAYTNSFTRGVYYPDKVFRSSVLHSTQDLFLPFFSNVTWFHAIHVSGTNGTKRFDNPVLPFNDGVYFASTEKSNIIRGWIFGTTLDSKTQSLLIVNNATNVVIKVCEFQFCNDPFLGVYYHKNNKSWMESEFRVYSSANNCTFEYVSQPFLMDLEGKQGNFKNLREFVFKNIDGYFKIYSKHTPINLVRDLPQGFSALEPLVDLPIGINITRFQTLLALHRSYLTPGDSSSGWTAGAAAYYVGYLQPRTFLLKYNENGTITDAVDCALDPLSETKCTLKSFTVEKGIYQTSNFRVQPTESIVRFPNITNLCPFGEVFNATRFASVYAWNRKRISNCVADYSVLYNSASFSTFKCYGVSPTKLNDLCFTNVYADSFVIRGDEVRQIAPGQTGKIADYNYKLPDDFTGCVIAWNSNNLDSKVGGNYNYLYRLFRKSNLKPFERDISTEIYQAGSTPCNGVEGFNCYFPLQSYGFQPTNGVGYQPYRVVVLSFELLHAPATVCGPKKSTNLVKNKCVNFNFNGLTGTGVLTESNKKFLPFQQFGRDIADTTDAVRDPQTLEILDITPCSFGGVSVITPGTNTSNQVAVLYQDLNCTEVPVAIHADQLTPTWRVYSTGSNVFQTRAGCLIGAEHVNNSYECDIPIGAGICASYQTQTNSPRRARSVASQSIIAYTMSLGAENSVAYSNNSIAIPTNFTISVTTEILPVSMTKTSVDCTMYICGDSTECSNLLLQYGSFCTQLNRALTGIAVEQDKNTQEVFAQVKQIYKTPPIKDFGGFNFSQILPDPSKPSKRSFIEDLLFNKVTLADAGFIKQYGDCLGDIAARDLICAQKFNGLTVLPPLLTDEMIAQYTSALLAGTITSGWTFGAGAALQIPFAMQMAYRFNGIGVTQNVLYENQKLIANQFNSAIGKIQDSLSSTASALGKLQDVVNQNAQALNTLVKQLSSNCGAISSVLNDILSRLDKVEAEVQIDRLITCRLQSLQTYVTQQLIRAAEIRASANLAATKMSECVLGQSKRVDFCGKGYHLMSFPQSAPHGVVFLHVTYVPAQEKNFTTAPAICHDGKAHFPREGVFVSNGTHWFVTQRNFYEPQIITTDNTFVSGNCDVVIGIVNNTVYDPLQPELDSGGGSGGGQIYEGKLTAEGLRFGIVASRFNHALVDRLVEGAIDAIVRHGGREEDITLVRVPGSWEIPVAAGELARKEDIDAVIAIGVLIRGATPHFDYIASEVSKGLADLSLELRKPITFGVITADTLEQAIERAGTKHGNKGWEAALSAIEMANLFKSLR

SEQ ID NO: 8396 - protein, 1307 aa, Artificial Sequence
  SARS-CoV-2/Hong Kong/case42_VM20002493/2020__EPI_ISL_414527 spike protein (1-1147)(F970C_G999C) LumSynth construct
MFVFLVLLPLVSSQCVNLTTRTQLPPAYTNSFTRGVYYPDKVFRSSVLHSTQDLFLPFFSNVTWFHAIHVSGTNGTKRFDNPVLPFNDGVYFASTEKSNIIRGWIFGTTLDSKTQSLLIVNNATNVVIKVCEFQFCNDPFLGVYYHKNNKSWMESEFRVYSSANNCTFEYVSQPFLMDLEGKQGNFKNLREFVFKNIDGYFKIYSKHTPINLVRDLPQGFSALEPLVDLPIGINITRFQTLLALHRSYLTPGDSSSGWTAGAAAYYVGYLQPRTFLLKYNENGTITDAVDCALDPLSETKCTLKSFTVEKGIYQTSNFRVQPTESIVRFPNITNLCPFGEVFNATRFASVYAWNRKRISNCVADYSVLYNSASFSTFKCYGVSPTKLNDLCFTNVYADSFVIRGDEVRQIAPGQTGKIADYNYKLPDDFTGCVIAWNSNNLDSKVGGNYNYLYRLFRKSNLKPFERDISTEIYQAGSTPCNGVEGFNCYFPLQSYGFQPTNGVGYQPYRVVVLSFELLHAPATVCGPKKSTNLVKNKCVNFNFNGLTGTGVLTESNKKFLPFQQFGRDIADTTDAVRDPQTLEILDITPCSFGGVSVITPGTNTSNQVAVLYQDVNCTEVPVAIHADQLTPTWRVYSTGSNVFQTRAGCLIGAEHVNNSYECDIPIGAGICASYQTQTNSPRRARSVASQSIIAYTMSLGAENSVAYSNNSIAIPTNFAISVTTEILPVSMTKTSVDCTMYICGDSTECSNLLLQYGSFCTQLNRALTGIAVEQDKNTQEVFAQVKQIYKTPPIKDFGGFNFSQILPDPSKPSKRSFIEDLLFNKVTLADAGFIKQYGDCLGDIAARDLICAQKFNGLTVLPPLLTDEMIAQYTSALLAGTITSGWTFGAGAALQIPFAMQMAYRFNGIGVTQNVLYENQKLIANQFNSAIGKIQDSLSSTASALGKLQDVVNQNAQALNTLVKQLSSNCGAISSVLNDILSRLDKVEAEVQIDRLITCRLQSLQTYVTQQLIRAAEIRASANLAATKMSECVLGQSKRVDFCGKGYHLMSFPQSAPHGVVFLHVTYVPAQEKNFTTAPAICHDGKAHFPREGVFVSNGTHWFVTQRNFYEPQIITTDNTFVSGNCDVVIGIVNNTVYDPLQPELDSGGGSGGGQIYEGKLTAEGLRFGIVASRFNHALVDRLVEGAIDAIVRHGGREEDITLVRVPGSWEIPVAAGELARKEDIDAVIAIGVLIRGATPHFDYIASEVSKGLADLSLELRKPITFGVITADTLEQAIERAGTKHGNKGWEAALSAIEMANLFKSLR

SEQ ID NO: 8397 - protein, 1307 aa, Artificial Sequence
  SARS-CoV-2/USA/CruiseA-23/2020__EPI_ISL_414482 spike protein (1-1147)(F970C_G999C) LumSynth construct
MFVFLVLLPLVSSQCVNLTTRTQLPPAYTNSFTRGVYYPDKVFRSSVLHSTQDLFLPFFSNVTWFHAIHVSGTNGTKRFDNPVLPFNDGVYFASTEKSNIIRGWIFGTTLDSKTQSLLIVNNATNVVIKVCEFQFCNDPFLGVYYHKNNKSWMESEFRVYSSANNCTFEYVSQPFLMDLEVKQGNFKNLREFVFKNIDGYFKIYSKHTPINLVRDLPQGFSALEPLVDLPIGINITRFQTLLALHRSYLTPGDSSSGWTAGAAAYYVGYLQPRTFLLKYNENGTITDAVDCALDPLSETKCTLKSFTVEKGIYQTSNFRVQPTESIVRFPNITNLCPFGEVFNATRFASVYAWNRKRISNCVADYSVLYNSASFSTFKCYGVSPTKLNDLCFTNVYADSFVIRGDEVRQIAPGQTGKIADYNYKLPDDFTGCVIAWNSNNLDSKVGGNYNYLYRLFRKSNLKPFERDISTEIYQAGSTPCNGVEGFNCYFPLQSYGFQPTNGVGYQPYRVVVLSFELLHAPATVCGPKKSTNLVKNKCVNFNFNGLTGTGVLTESNKKFLPFQQFGRDIADTTDAVRDPQTLEILDITPCSFGGVSVITPGTNTSNQVAVLYQDVNCTEVPVAIHADQLTPTWRVYSTGSNVFQTRAGCLIGAEHVNNSYECDIPIGAGICASYQTQTNSPRRARSVASQSIIAYTMSLGAENSVAYSNNSIAIPTNFTISVTTEILPVSMTKTSVDCTMYICGDSTECSNLLLQYGSFCTQLNRALTGIAVEQDKNTQEVFAQVKQIYKTPPIKDFGGFNFSQILPDPSKPSKRSFIEDLLFNKVTLADAGFIKQYGDCLGDIAARDLICAQKFNGLTVLPPLLTDEMIAQYTSALLAGTITSGWTFGAGAALQIPFAMQMAYRFNGIGVTQNVLYENQKLIANQFNSAIGKIQDSLSSTASALGKLQDVVNQNAQALNTLVKQLSSNCGAISSVLNDILSRLDKVEAEVQIDRLITCRLQSLQTYVTQQLIRAAEIRASANLAATKMSECVLGQSKRVDFCGKGYHLMSFPQSAPHGVVFLHVTYVPAQEKNFTTAPAICHDGKAHFPREGVFVSNGTHWFVTQRNFYEPQIITTDNTFVSGNCDVVIGIVNNTVYDPLQPELDSGGGSGGGQIYEGKLTAEGLRFGIVASRFNHALVDRLVEGAIDAIVRHGGREEDITLVRVPGSWEIPVAAGELARKEDIDAVIAIGVLIRGATPHFDYIASEVSKGLADLSLELRKPITFGVITADTLEQAIERAGTKHGNKGWEAALSAIEMANLFKSLR

SEQ ID NO: 8398 - protein, 1307 aa, Artificial Sequence
  SARS-CoV-2/Hong Kong/case85_VM20002868/2020__EPI_ISL_414519 spike protein (1-1147)(F970C_G999C) LumSynth construct
MFVFLVLVPLVSSQCVNLTTRTQLPPAYTNSFTRGVYYPDKVFRSSVLHSTQDLFLPFFSNVTWFHAIHVSGTNGTKRFDNPVLPFNDGVYFASTEKSNIIRGWIFGTTLDSKTQSLLIVNNATNVVIKVCEFQFCNDPFLGVYYHKNNKSWMESEFRVYSSANNCTFEYVSQPFLMDLEGKQGNFKNLREFVFKNIDGYFKIYSKHTPINLVRDLPQGFSALEPLVDLPIGINITRFQTLLALHRSYLTPGDSSSGWTAGAAAYYVGYLQPRTFLLKYNENGTITDAVDCALDPLSETKCTLKSFTVEKGIYQTSNFRVQPTESIVRFPNITNLCPFGEVFNATRFASVYAWNRKRISNCVADYSVLYNSASFSTFKCYGVSPTKLNDLCFTNVYADSFVIRGDEVRQIAPGQTGKIADYNYKLPDDFTGCVIAWNSNNLDSKVGGNYNYLYRLFRKSNLKPFERDISTEIYQAGSTPCNGVEGFNCYFPLQSYGFQPTNGVGYQPYRVVVLSFELLHAPATVCGPKKSTNLVKNKCVNFNFNGLTGTGVLTESNKKFLPFQQFGRDIADTTDAVRDPQTLEILDITPCSFGGVSVITPGTNTSNQVAVLYQDVNCTEVPVAIHADQLTPTWRVYSTGSNVFQTRAGCLIGAEHVNNSYECDIPIGAGICASYQTQTNSPRRARSVASQSIIAYTMSLGAENSVAYSNNSIAIPTNFTISVTTEILPVSMTKTSVDCTMYICGDSTECSNLLLQYGSFCTQLNRALTGIAVEQDKNTQEVFAQVKQIYKTPPIKDFGGFNFSQILPDPSKPSKRSFIEDLLFNKVTLADAGFIKQYGDCLGDIAARDLICAQKFNGLTVLPPLLTDEMIAQYTSALLAGTITSGWTFGAGAALQIPFAMQMAYRFNGIGVTQNVLYENQKLIANQFNSAIGKIQDSLSSTASALGKLQDVVNQNAQALNTLVKQLSSNCGAISSVLNDILSRLDKVEAEVQIDRLITCRLQSLQTYVTQQLIRAAEIRASANLAATKMSECVLGQSKRVDFCGKGYHLMSFPQSAPHGVVFLHVTYVPAQEKNFTTAPAICHDGKAHFPREGVFVSNGTHWFVTQRNFYEPQIITTDNTFVSGNCDVVIGIVNNTVYDPLQPELDSGGGSGGGQIYEGKLTAEGLRFGIVASRFNHALVDRLVEGAIDAIVRHGGREEDITLVRVPGSWEIPVAAGELARKEDIDAVIAIGVLIRGATPHFDYIASEVSKGLADLSLELRKPITFGVITADTLEQAIERAGTKHGNKGWEAALSAIEMANLFKSLR

SEQ ID NO: 8399 - protein, 1307 aa, Artificial Sequence; identical to SEQ ID NO: 8389
  SARS-CoV-2/England/200990660/2020__EPI_ISL_414523 spike protein (1-1147)(F970C_G999C) LumSynth construct

SEQ ID NO: 8400 - protein, 1307 aa, Artificial Sequence
  SARS-CoV-2/Australia/NSW09/2020__EPI_ISL_413595 spike protein (1-1147)(F970C_G999C) LumSynth construct
MFVFLVLLPLVSSQCVNLTTRTQLPPAYTNSFTRGVYYPDKVFRSSVLHSTQDLFLPFFSNVTWFHAIHVSGTNGTKRFDNPVLPFNDGVYFASTEKSNIIRGWIFGTTLDSKTQSLLIVNNATNVVIKVCEFQFCNDPFLGVYYHKNNKSWMESEFRVYSSANNCTFEYVSQPFLMDLEGKQGNFKNLREFVFKNIDGYFKIYSKHTPINLVRDLPQGFSALEPLVDLPIGINITRFQTLLALHRSYLTPGDSSSGWTAGAAAYYVGYLQPRTFLLKYNENGTITDAVDCALDPLSETKCTLKSFTVEKGIYQTSNFRVQPTESIVRFPNITNLCPFGEVFNATRFASVYAWNRKRISNCVADYSVLYNSASFSTFKCYGVSPTKLNDLCFTNVYADSFVIRGDEVRQIAPGQTGKIADYNYKLPDDFTGCVIAWNSNNLDSKVGGNYNYLYRLFRKSNLKPFERDISTEIYQAGSTPCNGVEGFNCYFPLQSYGFQPTNGVGYQPYRVVVLSFELLHAPATVCGPKKSTNLVKNKCVNFNFNGLTGTGVLTESNKKFLPFQQFGRDIADTTDAVRDPQTLEILDITPCSFGGVSVITPGTNTSNQVAVLYQDVNCTEVPVAIHADQLTPTWRVYSTGSNVFQTRAGCLIGAEHVNNSYECDIPIGAGICASYQTQTNSPRRARSVASQSIIAYTMSLGAENSVAYSNNSIAIPTNFTISVTTEILPVSMTKTSVDCTMYICGDSTECSNLLLQYGSFCTQLNRALTGIAVEQDKNTQEVFAQVKQIYKTPPIKDFGGFNFSQILPDPSKPSKRSFIEDLLFNKVTLADAGFIKQYGDCLGDIAARDLICAQKFNGLTVLPPLLTDEMIAQYTSALLAGTITSGWTFGAGAALQIPFAMQMAYRFNGIGVTQNVLYENQKLIANQFNSAIGKIQDSLSFTASALGKLQDVVNQNAQALNTLVKQLSSNCGAISSVLNDILSRLDKVEAEVQIDRLITCRLQSLQTYVTQQLIRAAEIRASANLAATKMSECVLGQSKRVDFCGKGYHLMSFPQSAPHGVVFLHVTYVPAQEKNFTTAPAICHDGKAHFPREGVFVSNGTHWFVTQRNFYEPQIITTDNTFVSGNCDVVIGIVNNTVYDPLQPELDSGGGSGGGQIYEGKLTAEGLRFGIVASRFNHALVDRLVEGAIDAIVRHGGREEDITLVRVPGSWEIPVAAGELARKEDIDAVIAIGVLIRGATPHFDYIASEVSKGLADLSLELRKPITFGVITADTLEQAIERAGTKHGNKGWEAALSAIEMANLFKSLR

SEQ ID NO: 8401 - protein, 1307 aa, Artificial Sequence; identical to SEQ ID NO: 8381
  SARS-CoV-2/Australia/NSW10/2020__EPI_ISL_413596 spike protein (1-1147)(F970C_G999C) LumSynth construct

SEQ ID NO: 8402 - protein, 1307 aa, Artificial Sequence
  SARS-CoV-2/Switzerland/1000477797/2020__EPI_ISL_413023 spike protein (1-1147)(F970C_G999C) LumSynth construct
MFVFLVLLPLVSSQCVNLTTRTQLPPAYTNSFTRGVYYPDKVFRSSVLHSTQDLFLPFFSNVTWFHAIHVSGTNGTKRFDNPVLPFNDGVYFASTEKSNIIRGWIFGTTLDSKTQSLLIVNNATNVVIKVCEFQFCNDPFLGVYYHKNNKSWMESEFRVYSSANNCTFEYVSQPFLMDLEGKQGNFKNLREFVFKNIDGYFNIYSKHTPINLVRDLPQGFSALEPLVDLPIGINITRFQTLLALHRSYLTPGDSSSGWTAGAAAYYVGYLQPRTFLLKYNENGTITDAVDCALDPLSETKCTLKSFTVEKGIYQTSNFRVQPTESIVRFPNITNLCPFGEVFNATRFASVYAWNRKRISNCVADYSVLYNSASFSTFKCYGVSPTKLNDLCFTNVYADSFVIRGDEVRQIAPGQTGKIADYNYKLPDDFTGCVIAWNSNNLDSKVGGNYNYLYRLFRKSNLKPFERDISTEIYQAGSTPCNGVEGFNCYFPLQSYGFQPTNGVGYQPYRVVVLSFELLHAPATVCGPKKSTNLVKNKCVNFNFNGLTGTGVLTESNKKFLPFQQFGRDIADTTDAVRDPQTLEILDITPCSFGGVSVITPGTNTSNQVAVLYQGVNCTEVPVAIHADQLTPTWRVYSTGSNVFQTRAGCLIGAEHVNNSYECDIPIGAGICASYQTQTNSPRRARSVASQSIIAYTMSLGAENSVAYSNNSIAIPTNFTISVTTEILPVSMTKTSVDCTMYICGDSTECSNLLLQYGSFCTQLNRALTGIAVEQDKNTQEVFAQVKQIYKTPPIKDFGGFNFSQILPDPSKPSKRSFIEDLLFNKVTLADAGFIKQYGDCLGDIAARDLICAQKFNGLTVLPPLLTDEMIAQYTSALLAGTITSGWTFGAGAALQIPFAMQMAYRFNGIGVTQNVLYENQKLIANQFNSAIGKIQDSLSSTASALGKLQDVVNQNAQALNTLVKQLSSNCGAISSVLNDILSRLDKVEAEVQIDRLITCRLQSLQTYVTQQLIRAAEIRASANLAATKMSECVLGQSKRVDFCGKGYHLMSFPQSAPHGVVFLHVTYVPAQEKNFTTAPAICHDGKAHFPREGVFVSNGTHWFVTQRNFYEPQIITTDNTFVSGNCDVVIGIVNNTVYDPLQPELDSGGGSGGGQIYEGKLTAEGLRFGIVASRFNHALVDRLVEGAIDAIVRHGGREEDITLVRVPGSWEIPVAAGELARKEDIDAVIAIGVLIRGATPHFDYIASEVSKGLADLSLELRKPITFGVITADTLEQAIERAGTKHGNKGWEAALSAIEMANLFKSLR

SEQ ID NO: 8403 - protein, 1307 aa, Artificial Sequence
  SARS-CoV-2/Belgium/BA-02291/2020__EPI_ISL_415159 spike protein (1-1147)(F970C_G999C) LumSynth construct
MFVFLVLLPLVSSQCVNLTTRTQLPPAYTNSFTRGVYYPDKVFRSSVLHSTQDLFLPFFSNVTWFHAIHVSGTNGTKRFDNPVLPFNDGVYFASTEKSNIIRGWIFGTTLDSKTQSLLIVNNATNVVIKVCEFQFCNDPFLGVYYHKNNKSWMESEFRVYSSANNCTFEYVSQPFLMDLEGKQGNFKNLREFVFKNIDGYFKIYSKHTPINLVRDLPQGFSALEPLVDLPIGINITRFQTLLALHRSYLTPGDSSSGWTAGAAAYYVGYLQPRTFLLKYNENGTITDAVDCALDPLSETKCTLKSFTVEKGIYQTSNFRVQPTESIVRFPNITNLCPFGEVFNATRFASVYAWNRKRISNCVADYSVLYNSASFSTFKCYGVSPTKLNDLCFTNVYADSFVIRGDEVRQIAPGQTGKIADYNYKLPDDFTGCVIAWNSNNLDSKVGGNYNYLYRLFRRSNLKPFERDISTEIYQAGSTPCNGVEGFNCYFPLQSYGFQPTNGVGYQPYRVVVLSFELLPAPATVCGPKKSTNLVKNKCVNFNFNGLTGTGVLTESNKKFLPFQQFGRDIADTTDAVRDPQTLEILDITPCSFGGVSVITPGTNTSNQVAVLYQGVNCTEVPVAIHADQLTPTWRVYSTGSNVFQTRAGCLIGAEHVNNSYECDIPIGAGICASYQTQTNSPRRARSVASQSIIAYTMSLGAENSVAYSNNSIAIPTNFTISVTTEILPVSMTKTSVDCTMYICGDSTECSNLLLQYGSFCTQLNRALTGIAVEQDKNTQEVFAQVKQIYKTPPIKDFGGFNFSQILPDPSKPSKRSFIEDLLFNKVTLADAGFIKQYGDCLGDIAARDLICAQKFNGLTVLPPLLTDEMIAQYTSALLAGTITSGWTFGAGAALQIPFAMQMAYRFNGIGVTQNVLYENQKLIANQFNSAIGKIQDSLSSAAPALGKLQDVVNQNAQALNTLVKQLSSNCGAISSVLNDILSRLDKVEAEVQIDRLITCRLQSLQTYVTQQLIRAAEIRASANLAATKMSECVLGQSKRVDFCGKGYHLMSFPQSAPHGVVFLHVTYVPAQEKNFTTAPAICHDGKAHFPREGVFVSNGTHWFVTQRNFYEPQIITTDNTFVSGNCDVVIGIVNNTVYDPLQPELDSGGGSGGGQIYEGKLTAEGLRFGIVASRFNHALVDRLVEGAIDAIVRHGGREEDITLVRVPGSWEIPVAAGELARKEDIDAVIAIGVLIRGATPHFDYIASEVSKGLADLSLELRKPITFGVITADTLEQAIERAGTKHGNKGWEAALSAIEMANLFKSLR

SEQ ID NO: 8404 - protein, 1307 aa, Artificial Sequence
  SARS-CoV-2/USA/WA8-UW5/2020__EPI_ISL_413486 spike protein (1-1147)(F970C_G999C) LumSynth construct
MFVFLVLLPLVSSQCVNLTTRTQLPPAYTNSFTRGVYYPDKVFRSSVLHSTQDLFLPFFSNVTWFHAIHVSGTNGTKRFDNPVLPFNDGVYFASTEKSNIIRGWIFGTTLDSKTQSLLIVNNATNVVIKVCEFQFCNDPFLGVYYHKNNKSWMESEFRVYSSANNCTFEYVSQPFLMDLEGKQGNFKNLREFVFKNIDGYFKIYSKHTPINLVRDLPQGFSALEPLVDLPIGINITRFQTLLALHRSYLTPGDSSSGWTAGAAAYYVGYLQPRTFLLKYNENGTITDAVDCALDPLSETKCTLKSFTVEKGIYQTSNFRVQPTESIVRFPNITNLCPFGEVFNATRFASVYAWNRKRISNCVADYSVLYNSASFSTFKCYGVSPTKLNDLCFTNVYADSFVIRGDEVRQIAPGQTGKIADYNYKLPDDFTGCVIAWNSNNLDSKVGGNYNYLYRLFRKSNLKPFERDISTEIYQAGSTPCNGVEGFNCYFPLQSYGFQPTNGVGYQPYRVVVLSFELLHAPATVCGPKKSTNLVKNKCVNFNFNGLTGTGVLTESNKKFLPFQQFGRDIADTTDAVRDPQTLEILDITPCSFGGVSVITPGTNTSNQVAVLYQDVNCTEVPVAIHADQLTPTWRVYSTGSNVFQTRAGCLIGAEYVNNSYECDIPIGAGICASYQTQTNSPRRARSVASQSIIAYTMSLGAENSVAYSNNSIAIPTNFTISVTTEILPVSMTKTSVDCTMYICGDSTECSNLLLQYGSFCTQLNRALTGIAVEQDKNTQEVFAQVKQIYKTPPIKDFGGFNFSQILPDPSKPSKRSFIEDLLFNKVTLADAGFIKQYGDCLGDIAARDLICAQKFNGLTVLPPLLTDEMIAQYTSALLAGTITSGWTFGAGAALQIPFAMQMAYRFNGIGVTQNVLYENQKLIANQFNSAIGKIQDSLSSTASALGKLQDVVNQNAQALNTLVKQLSSNCGAISSVLNDILSRLDKVEAEVQIDRLITCRLQSLQTYVTQQLIRAAEIRASANLAATKMSECVLGQSKRVDFCGKGYHLMSFPQSAPHGVVFLHVTYVPAQEKNFTTAPAICHDGKAHFPREGVFVSNGTHWFVTQRNFYEPQIITTDNTFVSGNCDVVIGIVNNTVYDPLQPELDSGGGSGGGQIYEGKLTAEGLRFGIVASRFNHALVDRLVEGAIDAIVRHGGREEDITLVRVPGSWEIPVAAGELARKEDIDAVIAIGVLIRGATPHFDYIASEVSKGLADLSLELRKPITFGVITADTLEQAIERAGTKHGNKGWEAALSAIEMANLFKSLR

SEQ ID NO: 8405 - protein, 1307 aa, Artificial Sequence
  SARS-CoV-2/England/20102000506/2020__EPI_ISL_415147 spike protein (1-1147)(F970C_G999C) LumSynth construct
MFVFLVLLPLVSSQCVNLTTRTQLPPAYTNSFTRGVYYPDKVFRSSVLHSTQDLFLPFFSNVTWFHAIHVSGTNGTKRFDNPVLPFNDGVYFASTEKSNIIRGWIFGTTLDSKTQSLLIVNNATNVVIKVCEFQFCNDPFLGVYYHKNNKSWMESEFRVYSSANNCTFEYVSQPFLMDLEGKQGNFKNLREFVFKNIDGYFKIYSKHTPINLVRDLPQGFSALEPLVDLPIGINITRFQTLLALHRSYLTPGDSSSGWTAGAAAYYVGYLQPRTFLLKYNENGTITDAVDCALDPLSETKCTLKSFTVEKGIYQTSNFRVQPTESIVRFPNITNLCPFGEVFNATRFASVYAWNRKRISNCVADYSVLYNSASFSTFKCYGVSPTKLNDLCFTNVYADSFVIRGDEVRQIAPGQTGKIADYNYKLPDDFTGCVIAWNSNNLDSKVGGNYNYLYRLFRKSNLKPFERDISTEIYQAGSTPCNGVEGFNCYFPLQSYGFQPTNGVGYQPYRVVVLSFELLHAPATVCGPKKSTNLVKNKCVNFNFNGLTGTGVLTESNKKFLPFQQFGRDIADTTDAVRDPQTLEILDITPCSFGGVSVITPGTNTSNQVAVLYQGVNCTEVPVAIHADQLTPTWRVYSTGSNVFQTRAGCLIGAEHVNNSYECDIPIGAGICASYQTQTNSPRRARSVASQSIIAYTMSLGAENSVAYSNNSIAIPTNFTISVTTEILPVSMTKTSVDCTMYICGDSTECSNLLLQYGSFCTQLNRALTGIAVEQDKNTQEVFAQVKQIYKTPPIKDFGGFNFSQILPDPSKPSKRSFIEDLLFNKVTLADAGFIKQYGYCLGDIAARDLICAQKFNGLTVLPPLLTDEMIAQYTSALLAGTITSGWTFGAGAALQIPFAMQMAYRFNGIGVTQNVLYENQKLIANQFNSAIGKIQDSLSSTASALGKLQDVVNQNAQALNTLVKQLSSNCGAISSVLNDILSRLDKVEAEVQIDRLITCRLQSLQTYVTQQLIRAAEIRASANLAATKMSECVLGQSKRVDFCGKGYHLMSFPQSAPHGVVFLHVTYVPAQEKNFTTAPAICHDGKAHFPREGVFVSNGTHWFVTQRNFYEPQIITTDNTFVSGNCDVVIGIVNNTVYDPLQPELDSGGGSGGGQIYEGKLTAEGLRFGIVASRFNHALVDRLVEGAIDAIVRHGGREEDITLVRVPGSWEIPVAAGELARKEDIDAVIAIGVLIRGATPHFDYIASEVSKGLADLSLELRKPITFGVITADTLEQAIERAGTKHGNKGWEAALSAIEMANLFKSLR

SEQ ID NO: 8406 - protein, 1307 aa, Artificial Sequence
  SARS-CoV-2/Belgium/VAG-03013/2020__EPI_ISL_415155 spike protein (1-1147)(F970C_G999C) LumSynth construct
MFVFLVLLPLVSSQCVNLTTRTQLPPAYTNSFTRGVYYPDKVFRSSVLHSTQDLFLPFFSNVTWFHAIHVSGTNGTKRFDNPVLPFNDGVYFASTEKSNIIRGWIFGTTLDSKTQSLLIVNNATNVVIKVCEFQFCNDPFLGVYYHKNNKSWMESEFRVYSSANNCTFEYVSQPFLMDLEGKQGNFKNLREFVFKNIDGYFKIYSKHTPINLVRDLPQGFSALEPLVDLPIGINITRFQTLLALHRSYLTPGDSSSGWTAGAAAYYVGYLQPRTFLLKYNENGTITDAVDCALDPLSETKCTLKSFTVEKGIYQTSNFRVQPTESIVRFPNITNLCPFGEVFNATRFASVYAWNRKRISNCVADYSVLYNSASFSTFKCYGVSPTKLNDLCFTNVYADSFVIRGDEVRQIAPGQTGKIADYNYKLPDDFTGCVIAWNSNNLDSKVGGNYNYLYRLFRKSNLKPFERDISTEIYQAGSTPCNGVEGFNCYFPLQSYGFQPTNGVGYQPYRVVVLSFELLHAPATVCGPKKSTNLVKNKCVNFNFNGLTGTGVLTESNKKFLPFQQFGRDIADTTDAVRDPQTLEILDITPCSFGGVSVITPGTNTSNQVAVLYQGVNCTEVPVAIHADQLTPTWRVYSTGSNVFQTRAGCLIGAEHVNNSYECDIPIGAGICASYQTQTNSPRRARSVASQSIIAYTMSLGAENSVAYSNNSIAIPTNFTISVTTEILPVSMTKTSVDCTMYICGDSTECSNLLLQYGSFCTQLNRALTGIAVEQDKNTQEVFAQVKQIYKTPPIKDFGGFNFSQILPDPSKPSKRSFIEDLLFNKVTLADAGFIKQYGDCLGDIAARDLICAQKFNGLTVLPPLLTDEMIAQYTSALLAGTITSGWTFGAGAALQIPFAMQMAYRFNGIGVTQNVLYENQKLIANQFNSAIGKIQDSLSSTATALGKLQDVVNQNAQALNTLVKQLSSNCGAISSVLNDILSRLDKVEAEVQIDRLITCRLQSLQTYVTQQLIRAAEIRASANLAATKMSECVLGQSKRVDFCGKGYHLMSFPQSAPHGVVFLHVTYVPAQEKNFTTAPAICHDGKAHFPREGVFVSNGTHWFVTQRNFYEPQIITTDNTFVSGNCDVVIGIVNNTVYDPLQPELDSGGGSGGGQIYEGKLTAEGLRFGIVASRFNHALVDRLVEGAIDAIVRHGGREEDITLVRVPGSWEIPVAAGELARKEDIDAVIAIGVLIRGATPHFDYIASEVSKGLADLSLELRKPITFGVITADTLEQAIERAGTKHGNKGWEAALSAIEMANLFKSLR

SEQ ID NO: 8407 - protein, 1307 aa, Artificial Sequence
  SARS-CoV-2/Belgium/BC-03016/2020__EPI_ISL_415157 spike protein (1-1147)(F970C_G999C) LumSynth construct
MFVFLVLLPLVSSQCVNLTTRTQLPPAYTNSFTRGVYYPDKVFRSSVLHSTQDLFLPFFSNVTWFHAIHVSGTNGTKRFDNPVLPFNDGVYFASTEKSNIIRGWIFGTTLDSKTQSLLIVNNATNVVIKVCEFQFCNDPFLGVYYHKNNKSWMESEFRVYSSANNCTFEYVSQPFLMDLEGKQGNFKNLREFVFKNIDGYFKIYSKHTPINLVRDLPQGFSALEPLVDLPIGINITRFQTLLALHRSYLTPGDSSSGWTAGAAAYYVGYLQPRTFLLKYNENGTITDAVDCALDPLSETKCTLKSFTVEKGIYQTSNFRVQPTESIVRFPNITNLCPFGEVFNATRFASVYAWNRKRISNCVADYSVLYNSASFSTFKCYGVSPTKLNDLCFTNVYADSFVIRGDEVRQIAPGQTGKIADYNYKLPDDFTGCVIAWNSNNLDSKVGGNYNYLYRLFRKSNLKPFERDISTEIYQAGSTPCNGVEGFNCYFPLQSYGFQPTNGVGYQPYRVVVLSFELLHAPATVCGPKKSTNLVKNKCVNFNFNGLTGTGVLTESNKKFLPFQQFGRDIADTTDAVRDPQTLEILDITPCSFGGVSVITPGTNTSNQVAVLYQGVNCTEVPVAIHADQLTPTWRVYSTGSNVFQTRAGCLIGAEHVNNSYECDIPIGAGICASYQTQTNSPRRARSVASQSIIAYTMSLGAENSVAYSNNSIAIPTNFTISVTTEILPVSMTKTSVDCTMYICGDSTECSNLLLQYGSFCTQLNRALTGIAVEQDKNTQEVFAQVKQIYKTPPIKDFGGFNFSQILPDPSKPSKRSFIEDLLFNKVTLADAGFIKQYGDCLGDIAARDLICAQKFNGLTVLPPLLTDEMIAQYTSALLAGTITSGWTFGAGAALQIPFAMQMAYRFNGIGVTQNVLYENQKLIANQFNSAIGKIQDSLSSTAPALGKLQDVVNQNAQALNTLVKQLSSNCGAISSVLNDILSRLDKVEAEVQIDRLITCRLQSLQTYVTQQLIRAAEIRASANLAATKMSECVLGQSKRVDFCGKGYHLMSFPQSAPHGVVFLHVTYVPAQEKNFTTAPAICHDGKAHFPREGVFVSNGTHWFVTQRNFYEPQIITTDNTFVSGNCDVVIGIVNNTVYDPLQPELDSGGGSGGGQIYEGKLTAEGLRFGIVASRFNHALVDRLVEGAIDAIVRHGGREEDITLVRVPGSWEIPVAAGELARKEDIDAVIAIGVLIRGATPHFDYIASEVSKGLADLSLELRKPITFGVITADTLEQAIERAGTKHGNKGWEAALSAIEMANLFKSLR

SEQ ID NO: 8408 - protein, 1307 aa, Artificial Sequence
  SARS-CoV-2/Germany/BavPat3/2020__EPI_ISL_414521 spike protein (1-1147)(F970C_G999C) LumSynth construct
MFVFLVLLPLVSSQCVNLTTRTQLPPAYTNSFTRGVYYPDKVFRSSVLHSTQDLFLPFFSNVTWFHAIHVSGTNGTKRFDNPVLPFNDGVYFASTEKSNIIRGWIFGTTLDSKTQSLLIVNNATNVVIKVCEFQFCNDPFLGVYYHKNNKSWMESEFRVYSSANNCTFEYVSQPFLMDLEGKQGNFKNLREFVFKNIDGYFKIYSKHTPINLVRDLPQGFSALEPLVDLPIGINITRFQTLLALHRSYLTPGDSSSGWTAGAAAYYVGYLQPRTFLLKYNENGTITDAVDCALDPLSETKCTLKSFTVEKGIYQTSNFRVQPTESIVRFPNITNLCPFGEVFNATRFASVYAWNRKRISNCVADYSVLYNSASFSTFKCYGVSPTKLNDLCFTNVYADSFVIRGDEVRQIAPGQTGKIADYNYKLPDDFTGCVIAWNSNNLDSKVGGNYNYLYRLFRKSNLKPFERDISTEIYQAGSTPCNGVEGFNCYFPLQSYGFQPTNGVGYQPYRVVVLSFELLHAPATVCGPKKSTNLVKNKCVNFNFNGLTGTGVLTESNKKFLPFQQFGRDIADTTDAVRDPQTLEILDITPCSFGGVSVITPGTNTSNQVAVLYQDVNCTEVPVAIHADQLTPTWRVYSTGSNVFQTRAGCLIGAEHVNNSYECDIPIGAGICASYQTQTNSPRRARSVASQSIIAYTMSLGAENSVAYSNNSIAIPTNFTISVTTEILPVSMTKTSVDCTMYICGDSTECSNLLLQYGSFCTQLNRALTGIAVEQDKNTQQVFAQVKQIYKTPPIKDFGGFNFSQILPDPSKPSKRSFIEDLLFNKVTLADAGFIKQYGDCLGDIAARDLICAQKFNGLTVLPPLLTDEMIAQYTSALLAGTITSGWTFGAGAALQIPFAMQMAYRFNGIGVTQNVLYENQKLIANQFNSAIGKIQDSLSSTASALGKLQDVVNQNAQALNTLVKQLSSNCGAISSVLNDILSRLDKVEAEVQIDRLITCRLQSLQTYVTQQLIRAAEIRASANLAATKMSECVLGQSKRVDFCGKGYHLMSFPQSAPHGVVFLHVTYVPAQEKNFTTAPAICHDGKAHFPREGVFVSNGTHWFVTQRNFYEPQIITTDNTFVSGNCDVVIGIVNNTVYDPLQPELDSGGGSGGGQIYEGKLTAEGLRFGIVASRFNHALVDRLVEGAIDAIVRHGGREEDITLVRVPGSWEIPVAAGELARKEDIDAVIAIGVLIRGATPHFDYIASEVSKGLADLSLELRKPITFGVITADTLEQAIERAGTKHGNKGWEAALSAIEMANLFKSLR

SEQ ID NO: 8409 - protein, 1307 aa, Artificial Sequence
  SARS-CoV-2/France/HF1805/2020__EPI_ISL_414628 spike protein (1-1147)(F970C_G999C) LumSynth construct
MFVFLVLLPLVSSQCVNLTTRTQLPPAYTNSFTRGVYYPDKVFRSSVLHSTQDLFLPFFSNVTWFHAIHVSGTNGTKRFDNPVLPFNDGVYFASTEKSNIIRGWIFGTTLDSKTQSLLIVNNATNVVIKVCEFQFCNDPFLGVYYHKNNKSWMESEFRVYSSANNCTFEYVSQPFLMDLEGKQGNFKNLREFVFKNIDGYFKIYSKHTPINLVRDLPQGFSALEPLVDLPIGINITRFQTLLALHRSYLTPGDSSSGWTAGAAAYYVGYLQPRTFLLKYNENGTITDAVDCALDPLSETKCTLKSFTVEKGIYQTSNFRVQPTESIVRFPNITNLCPFGEVFNATRFASVYAWNRKRISNCVADYSVLYNSASFSTFKCYGVSPTKLNDLCFTNVYADSFVIRGDEVRQIAPGQTGKIADYNYKLPDDFTGCVIAWNSNNLDSKVGGNYNYLYRLFRKSNLKPFERDISTEIYQAGSTPCNGVEGFNCYFPLQSYGFQPTNGVGYQPYRVVVLSFELLHAPATVCGPKKSTNLVKNKCVNFNFNGLTGTGVLTESNKKFLPFQQFGRDIADTTDAVRDPQTLEILDITPCSFGGVSVITPGTNTSNQVAVLYQGVNCTEVPVAIHADQLTPTWRVYSTGSNVFQTRAGCLIGAEHVNNSYECDIPIGAGICASYQTQTNSPRRARSVASQSIIAYTMSLGAENSVAYSNNSIAIPTNFTISVTTEILPVSMTKTSVDCTMYICGDSTECSNLLLQYGSFCTQLNRALTGIAVEQDKNTQEVFAQVKQIYKTPPIKDFGGFNFSQILPDPSKPSKRSFIEDLLFNKVTLADAGFIKQYGDCLGDIAARDLICAQKFNGLTVLPPLLTDEMIAQYTSALLAGTITSGWTFGAGAALQIPFAMQMAYRFNGIGVTQNVLYENQKLIANQFNSAIGKIQDSLSSTASALGKLQDVVNQNAQALNTLVKQLSSNCGAISSVLNDILSRLDKVEAEVQIDRLITCRLQSLQTYVTQQLIRAAEIRASANLAATKMSECVLGQSKRVDFCGKGYHLMSFPQSAPHGVVFLHVTYVPAQEKNFTTAPAICHDGKAHFPREGVFVSNGTHWFVTQRNFYEPQIITTDNTFVSGNCDVVIGVVNNTVYDPLQPELDSGGGSGGGQIYEGKLTAEGLRFGIVASRFNHALVDRLVEGAIDAIVRHGGREEDITLVRVPGSWEIPVAAGELARKEDIDAVIAIGVLIRGATPHFDYIASEVSKGLADLSLELRKPITFGVITADTLEQAIERAGTKHGNKGWEAALSAIEMANLFKSLR

SEQ ID NO: 8410 - protein, 1307 aa, Artificial Sequence
  SARS-CoV-2/Netherlands/ZuidHolland_9/2020__EPI_ISL_414445 spike protein (1-1147)(F970C_G999C) LumSynth construct
MFVFLVLLPLVSSQCVNLTTRTQLPPAYTNSFTRGVYYPDKVFRSSVLHSTQDLFLPFFSNVTWFHAIHVSGTNGTKRFDNPVLPFNDGVYFASTEKSNIIRGWIFGTTLDSKTQSLLIVNNATNVVIKVCEFQFCNDPFLGVYYHKNNKSWMESEFRVYSSANNCTFEYVSQPFLMDLEGKQGNFKNLREFVFKNIDGYFKIYSKHTPINLVRDLPQGFSALEPLVDLPIGINITRFQTLLALHRSYLTPGDSSSGWTAGAAAYYVGYLQPRTFLLKYNENGTITDAVDCALDPLSETKCTLKSFTVEKGIYQTSNFRVQPTESIVRFPNITNLCPFGEVFNATRFASVYAWNRKRISNCVADYSVLYNSASFSTFKCYGVSPTKLNDLCFTNVYADSFVIRGDEVRQIAPGQTGKIADYNYKLPDDFTGCVIAWNSNNLDSKVGGNYNYLYRLFRKSNLKPFERDISTEIYQAGSTPCNGVEGFNCYFPLQSYGFQPTNGVGYQPYRVVVLSFELLHAPATVCGPKKSTNLVKNKCVNFNFNGLTGTGVLTESNKKFLPFQQFGRDIADTTDAVRDPQTLEILDITPCSFGGVSVITPGTNTSNQVAVLYQGVNCTEVPVAIHADQLTPTWRVYSTGSNVFQTRAGCLIGAEHVNNSYECDIPIGAGICASYQTQTNSPRRARSVASQSIIAYTMSLGAENSVAYSNNSIAIPTNFTISVTTEILPVSMTKTSVDCTMYICGDSTECSNLLLQYGSFCTQLNRALTGIAVEQDKNTQEVFAQVKQIYKTPPIKDFGGFNFSQILPDPSKPSKRSFIEDLLFNKVTLADAGFIKQYGDCLGDIAARDLICVQKFNGLTVLPPLLTDEMIAQYTSALLAGTITSGWTFGAGAALQIPFAMQMAYRFNGIGVTQNVLYENQKLIANQFNSAIGKIQDSLSSTASALGKLQDVVNQNAQALNTLVKQLSSNCGAISSVLNDILSRLDKVEAEVQIDRLITCRLQSLQTYVTQQLIRAAEIRASANLAATKMSECVLGQSKRVDFCGKGYHLMSFPQSAPHGVVFLHVTYVPAQEKNFTTAPAICHDGKAHFPREGVFVSNGTHWFVTQRNFYEPQIITTDNTFVSGNCDVVIGIVNNTVYDPLQPELDSGGGSGGGQIYEGKLTAEGLRFGIVASRFNHALVDRLVEGAIDAIVRHGGREEDITLVRVPGSWEIPVAAGELARKEDIDAVIAIGVLIRGATPHFDYIASEVSKGLADLSLELRKPITFGVITADTLEQAIERAGTKHGNKGWEAALSAIEMANLFKSLR

SEQ ID NO: 8411 - protein, 1307 aa, Artificial Sequence
  SARS-CoV-2/Finland/FIN03032020A/2020__EPI_ISL_413602 spike protein (1-1147)(F970C_G999C) LumSynth construct
MFVFLVLLPLVSSQCVNLTTRTQLPPAYTNSFTRGVYYPDKVFRSSVLHSTQDLFLPFFSNVTWFHAIHVSGTNGTKRFDNPVLPFNDGVYFASTEKSNIIRGWIFGTTLDSKTQSLLIVNNATNVVIKVCEFQFCNDPFLGVYYHKNNKSWMESEFRVYSSANNCTFEYVSQPFLMDLEGKQGNFKNLREFVFKNIDGYFKIYSKHTPINLVRDLPQGFSALEPLVDLPIGINITRFQTLLALHRSYLTPGDSSSGWTAGAAAYYVGYLQPRTFLLKYNENGTITDAVDCALDPLSETKCTLKSFTVEKGIYQTSNFRVQPTESIVRFPNITNLCPFGEVFNATRFASVYAWNRKRISNCVADYSVLYNSASFSTFKCYGVSPTKLNDLCFTNVYADSFVIRGDEVRQIAPGQTGKIADYNYKLPDDFTGCVISWNSNNLDSKVGGNYNYLYRLFRKSNLKPFERDISTEIYQAGSTPCNGVEGFNCYFPLQSYGFQPTNGVGYQPYRVVVLSFELLHAPATVCGPKKSTNLVKNKCVNFNFNGLTGTGVLTESNKKFLPFQQFGRDIADTTDAVRDPQTLEILDITPCSFGGVSVITPGTNTSNQVAVLYQGVNCTEVPVAIHADQLTPTWRVYSTGSNVFQTRAGCLIGAEHVNNSYECDIPIGAGICASYQTQTNSPRRARSVASQSIIAYTMSLGAENSVAYSNNSIAIPTNFTISVTTEILPVSMTKTSVDCTMYICGDSTECSNLLLQYGSFCTQLNRALTGIAVEQDKNTQEVFAQVKQIYKTPPIKDFGGFNFSQILPDPSKPSKRSFIEDLLFNKVTLADAGFIKQYGDCLGDIAARDLICAQKFNGLTVLPPLLTDEMIAQYTSALLAGTITSGWTFGAGAALQIPFAMQMAYRFNGIGVTQNVLYENQKLIANQFNSAIGKIQDSLSSTASALGKLQDVVNQNAQALNTLVKQLSSNCGAISSVLNDILSRLDKVEAEVQIDRLITCRLQSLQTYVTQQLIRAAEIRASANLAATKMSECVLGQSKRVDFCGKGYHLMSFPQSAPHGVVFLHVTYVPAQEKNFTTAPAICHDGKAHFPREGVFVSNGTHWFVTQRNFYEPQIITTDNTFVSGNCDVVIGIVNNTVYDPLQPELDSGGGSGGGQIYEGKLTAEGLRFGIVASRFNHALVDRLVEGAIDAIVRHGGREEDITLVRVPGSWEIPVAAGELARKEDIDAVIAIGVLIRGATPHFDYIASEVSKGLADLSLELRKPITFGVITADTLEQAIERAGTKHGNKGWEAALSAIEMANLFKSLR

SEQ ID NO: 8412 - protein, 1307 aa, Artificial Sequence
  SARS-CoV-2/France/GE1977/2020__EPI_ISL_414632 spike protein (1-1147)(F970C_G999C) LumSynth construct
MFVFLVLLPLVSSQCVNLTTRTQLPPAYTNSFTRGVYYPDKVFRSSVLHSTQDLFLPFFSNVTWFHAIHVSGTNGTKRFDNPVLPFNDGVYFASTEKSNIIRGWIFGTTLDSKTQSLLIVNNATNVVIKVCEFQFCNDPFLGVYYHKNNKSWMESEFRVYSSANNCTFEYVSQPFLMDLEGKQGNFKNLREFVFKNIDGYFKIYSKHTPINLVRDLPQGFSALEPLVDLPIGINITRFQTLLALHRSYLTPGDSSSGWTAGAAAYYVGYLQPRTFLLKYNENGTITDAVDCALDPLSETKCTLKSFTVEKGIYQTSNFRVQPTESIVRFPNITNLCPFGEVFNATRFASVYAWNRKRISNCVADYSVLYNSASFSTFKCYGVSPTKLNDLCFTNVYADSFVIRGDEVRQIAPGQTGKIADYNYKLPDDFTGCVIAWNSNNLDSKVGGNYNYLYRLFRKSNLKPFERDISTEIYQAGSTPCNGVEGFNCYFPLQSYGFQPTNGVGYQPYRVVVLSFELLHAPATVCGPKKSTNLVKNKCVNFNFNGLTGTGVLTESNKKFLPFQQFGRDIADTTDAVRDPQTLEILDITPCSFGGVSVITPGTNTSNQVAVLYQGVNCTEVPVAIHADQLTPTWRVYSTGSNVFQTRAGCLIGAEHVNNSYECDIPIGAGICASYQTQTNSPRRARSVASQSIIAYTMSLGAENSVAYSNNSIAIPTNFTISVTTEILPVSMTKTSVDCTMYICGDSTECSNLLLQYGSFCTQLNRALTGIAVEQDKNTQEVFAQVKQIYKTPPIKDFGGFNFSQILPDPSKPSKRSFIEDLLFNKVTLADAGFIKQYGDCLGDIAARDLICAQKFNGLTVLPPLLTDEMIAQYTSALLAGTITSGWTFGAGAALQIPFAMQMAYRFNGIGVTQNVLYENQKLIANQFNSAIGKIQDSLFSTASALGKLQDVVNQNAQALNTLVKQLSSNCGAISSVLNDILSRLDKVEAEVQIDRLITCRLQSLQTYVTQQLIRAAEIRASANLAATKMSECVLGQSKRVDFCGKGYHLMSFPQSAPHGVVFLHVTYVPAQEKNFTTAPAICHDGKAHFPREGVFVSNGTHWFVTQRNFYEPQIITTDNTFVSGNCDVVIGIVNNTVYDPLQPELDSGGGSGGGQIYEGKLTAEGLRFGIVASRFNHALVDRLVEGAIDAIVRHGGREEDITLVRVPGSWEIPVAAGELARKEDIDAVIAIGVLIRGATPHFDYIASEVSKGLADLSLELRKPITFGVITADTLEQAIERAGTKHGNKGWEAALSAIEMANLFKSLR

SEQ ID NO: 8413 - protein, 1307 aa, Artificial Sequence
  SARS-CoV-2/Finland/FIN-313/2020__EPI_ISL_414641 spike protein (1-1147)(F970C_G999C) LumSynth construct
MFVFLVLLPLVSSQCVNLTTRTQLPPAYTNSFTRGVYYPDKVFRSSVLHSTQDLFLPFFSNVTWFHAIHVSGTNGTKRFDNPVLPFNDGVYFASTEKSNIIRGWIFGTTLDSKTQSLLIVNNATNVVIKVCEFQFCNDPFLGVYYHKNNKSWMESEFRVYSSANNCTFEYVSQPFLMDLEGKQGNFKNLREFVFKNIDGYFKIYSKHTPINLVRDLPQGFSALEPLVDLPIGINITRFKTLLALHRSYLTPGDSSSGWTAGAAAYYVGYLQPRTFLLKYNENGTITDAVDCALDPLSETKCTLKSFTVEKGIYQTSNFRVQPTESIVRFPNITNLCPFGEVFNATRFASVYAWNRKRISNCVADYSVLYNSASFSTFKCYGVSPTKLNDLCFTNVYADSFVIRGDEVRQIAPGQTGKIADYNYKLPDDFTGCVIAWNSNNLDSKVGGNYNYLYRLFRKSNLKPFERDISTEIYQAGSTPCNGVEGFNCYFPLQSYGFQPTNGVGYQPYRVVVLSFELLHAPATVCGPKKSTNLVKNKCVNFNFNGLTGTGVLTESNKKFLPFQQFGRDIADTTDAVRDPQTLEILDITPCSFGGVSVITPGTNTSNQVAVLYQGVNCTEVPVAIHADQLTPTWRVYSTGSNVFQTRAGCLIGAEHVNNSYECDIPIGAGICASYQTQTNSPRRARSVASQSIIAYTMSLGAENSVAYSNNSIAIPTNFTISVTTEILPVSMTKTSVDCTMYICGDSTECSNLLLQYGSFCTQLNRALTGIAVEQDKNTQEVFAQVKQIYKTPPIKDFGGFNFSQILPDPSKPSKRSFIEDLLFNKVTLADAGFIKQYGDCLGDIAARDLICAQKFNGLTVLPPLLTDEMIAQYTSALLAGTITSGWTFGAGAALQIPFAMQMAYRFNGIGVTQNVLYENQKLIANQFNSAIGKIQDSLSSTASALGKLQDVVNQNAQALNTLVKQLSSNCGAISSVLNDILSRLDKVEAEVQIDRLITCRLQSLQTYVTQQLIRAAEIRASANLAATKMSECVLGQSKRVDFCGKGYHLMSFPQSAPHGVVFLHVTYVPAQEKNFTTAPAICHDGKAHFPREGVFVSNGTHWFVTQRNFYEPQIITTDNTFVSGNCDVVIGIVNNTVYDPLQPELDSGGGSGGGQIYEGKLTAEGLRFGIVASRFNHALVDRLVEGAIDAIVRHGGREEDITLVRVPGSWEIPVAAGELARKEDIDAVIAIGVLIRGATPHFDYIASEVSKGLADLSLELRKPITFGVITADTLEQAIERAGTKHGNKGWEAALSAIEMANLFKSLR

SEQ ID NO: 8414 - protein, 1307 aa, Artificial Sequence
  SARS-CoV-2/Netherlands/ZuidHolland_2/2020__EPI_ISL_414556 spike protein (1-1147)(F970C_G999C) LumSynth construct
MFVFLVLLPLVSSQCVNLTTRTQLPPAYTNSFTRGVYYPDKVFRSSVLHSTQDLFLPFFSNVTWFHAIHVSGTNGTKRFDNPVLPFNDGVYFASTEKSNIIRGWIFGTTLDSKTQSLLIVNNATNVVIKVCEFQFCNDPFLGVYYHKNNKSWMESEFRVYSSANNCTFEYVSQPFLMDLEGKQGNFKNLREFVFKNIDGYFKIYSKHTPINLVRDLPQGFSALEPLVDLPIGINITRFQTLLALHRSYLTPGDSSSGWTAGAAAYYVGYLQPRTFLLKYNENGTITDAVDCALDPLSETKCTLKSFTVEKGIYQTSNFRVQPTESIVRFPNITNLCPFGEVFNATRFASVYAWNRKRISNCVADYSVLYNSASFSTFKCYGVSPTKLNDLCFTNVYADSFVIRGDEVRQIAPGQTGKIADYNYKLPDDFTGCVIAWNSNNLDSKVGGNYNYLYRLFRKSNLKPFERDISTEIYQAGSTPCNGVEGFNCYFPLQSYGFQPTNGVGYQPYRVVVLSFELLHAPATVCGPKKSTNLVKNKCVNFNFNGLTGTGVLTESNKKFLPFQQFGRDIADTTDAVRDPQTLEILDITPCSFGGVSVITPGTNTSNQVAVLYQGVNCTEVPVAIHADQLTPTWRVYSTGSNVFQTRAGCLIGAEHVNNSYECDIPIGAGICASYQTQTNSPRRARSVASQSIIAYTMSLGAENSVAYSNNSIAIPTNFTISVTTEILPVSMTKTSVDCTMYICGDSTECSNLLLQYGSFCTQLNRALTGIALEQDKNTQEVFAQVKQIYKTPPIKDFGGFNFSQILPDPSKPSKRSFIEDLLFNKVTLADAGFIKQYGDCLGDIAARDLICAQKFNGLTVLPPLLTDEMIAQYTSALLAGTITSGWTFGAGAALQIPFAMQMAYRFNGIGVTQNVLYENQKLIANQFNSAIGKIQDSLSSTASALGKLQDVVNQNAQALNTLVKQLSSNCGAISSVLNDILSRLDKVEAEVQIDRLITCRLQSLQTYVTQQLIRAAEIRASANLAATKMSECVLGQSKRVDFCGKGYHLMSFPQSAPHGVVFLHVTYVPAQEKNFTTAPAICHDGKAHFPREGVFVSNGTHWFVTQRNFYEPQIITTDNTFVSGNCDVVIGIVNNTVYDPLQPELDSGGGSGGGQIYEGKLTAEGLRFGIVASRFNHALVDRLVEGAIDAIVRHGGREEDITLVRVPGSWEIPVAAGELARKEDIDAVIAIGVLIRGATPHFDYIASEVSKGLADLSLELRKPITFGVITADTLEQAIERAGTKHGNKGWEAALSAIEMANLFKSLR

SEQ ID NO: 8415 - protein, 1307 aa, Artificial Sequence
  SARS-CoV-2/USA/WA-UW31/2020__EPI_ISL_414618 spike protein (1-1147)(F970C_G999C) LumSynth construct
MFVFLVLLPLVSSQCVNLTTRTQLPPAYTNSFTRGVYYPDKVFRSSVLHSTQDLFLPFFSNVTWFHAIHVSGTNGTKRFDNPVLPFNDGVYFASTEKSNIIRGWIFGTTLDSKTQSLLIVNNATNVVIKVCEFQFCNDPFLGVYYHKNNKSWMESEFRVYSSANNCTFEYVSQPFLMDLEGKQGNFKNLREFVFKNIDGYFKIYSKHTPINLVRDLPQGFSALEPLVDLPIGINITRFQTLLALHRSYLTPGDSSSGWTAGAAAYYVGYLQPRTFLLKYNENGTITDAVDCALDPLSETKCTLKSFTVEKGIYQTSNFRVQPTESIVRFPNITNLCPFGEVFNATRFASVYAWNRKRISNCVADYSVLYNSASFSTFKCYGVSPTKLNDLCFTNVYADSFVIRGDEVRQIAPGQTGKIADYNYKLPDDFTGCVIAWNSNNLDSKVGGNYNYLYRLFRKSNLKPFERDISTEIYQAGSTPCNGAEGFNCYFPLQSYGFQPTNGVGYQPYRVVVLSFELLHAPATVCGPKKSTNLVKNKCVNFNFNGLTGTGVLTESNKKFLPFQQFGRDIADTTDAVRDPQTLEILDITPCSFGGVSVITPGTNTSNQVAVLYQDVNCTEVPVAIHADQLTPTWRVYSTGSNVFQTRAGCLIGAEHVNNSYECDIPIGAGICASYQTQTNSPRRARSVASQSIIAYTMSLGAENSVAYSNNSIAIPTNFTISVTTEILPVSMTKTSVDCTMYICGDSTECSNLLLQYGSFCTQLNRALTGIAVEQDKNTQEVFAQVKQIYKTPPIKDFGGFNFSQILPDPSKPSKRSFIEDLLFNKVTLADAGFIKQYGDCLGDIAARDLICAQKFNGLTVLPPLLTDEMIAQYTSALLAGTITSGWTFGAGAALQIPFAMQMAYRFNGIGVTQNVLYENQKLIANQFNSAIGKIQDSLSSTASALGKLQDVVNQNAQALNTLVKQLSSNCGAISSVLNDILSRLDKVEAEVQIDRLITCRLQSLQTYVTQQLIRAAEIRASANLAATKMSECVLGQSKRVDFCGKGYHLMSFPQSAPHGVVFLHVTYVPAQEKNFTTAPAICHDGKAHFPREGVFVSNGTHWFVTQRNFYEPQIITTDNTFVSGNCDVVIGIVNNTVYDPLQPELDSGGGSGGGQIYEGKLTAEGLRFGIVASRFNHALVDRLVEGAIDAIVRHGGREEDITLVRVPGSWEIPVAAGELARKEDIDAVIAIGVLIRGATPHFDYIASEVSKGLADLSLELRKPITFGVITADTLEQAIERAGTKHGNKGWEAALSAIEMANLFKSLR

SEQ ID NO: 8416 - protein, 1307 aa, Artificial Sequence
  SARS-CoV-2/South Korea/SNU01/2020__EPI_ISL_411929 spike protein (1-1147)(F970C_G999C) LumSynth construct
MFVFLVLLPLVSSQCVNLTTRTQLPPAYTNSFTRGVYYPDKVFRSSVLHSTQDLFLPFFSNVTWFHAIHVSGTNGTKRFDNPVLPFNDGVYFASTEKSNIIRGWIFGTTLDSKTQSLLIVNNATNVVIKVCEFQFCNDPFLGVYYHKNNKSWMESEFRVYSSANNCTFEYVSQPFLMDLEGKQGNFKNLREFVFKNIDGYFKIYSKHTPINLVRDLPQGFWALEPLVDLPIGINITRFQTLLALHRSYLTPGDSSSGWTAGAAAYYVGYLQPRTFLLKYNENGTITDAVDCALDPLSETKCTLKSFTVEKGIYQTSNFRVQPTESIVRFPNITNLCPFGEVFNATRFASVYAWNRKRISNCVADYSVLYNSASFSTFKCYGVSPTKLNDLCFTNVYADSFVIRGDEVRQIAPGQTGKIADYNYKLPDDFTGCVIAWNSNNLDSKVGGNYNYLYRLFRKSNLKPFERDISTEIYQAGSTPCNGVEGFNCYFPLQSYGFQPTNGVGYQPYRVVVLSFELLHAPATVCGPKKSTNLVKNKCVNFNFNGLTGTGVLTESNKKFLPFQQFGRDIADTTDAVRDPQTLEILDITPCSFGGVSVITPGTNTSNQVAVLYQDVNCTEVPVAIHADQLTPTWRVYSTGSNVFQTRAGCLIGAEHVNNSYECDIPIGAGICASYQTQTNSPRRARSVASQSIIAYTMSLGAENSVAYSNNSIAIPTNFTISVTTEILPVSMTKTSVDCTMYICGDSTECSNLLLQYGSFCTQLNRALTGIAVEQDKNTQEVFAQVKQIYKTPPIKDFGGFNFSQILPDPSKPSKRSFIEDLLFNKVTLADAGFIKQYGDCLGDIAARDLICAQKFNGLTVLPPLLTDEMIAQYTSALLAGTITSGWTFGAGAALQIPFAMQMAYRFNGIGVTQNVLYENQKLIANQFNSAIGKIQDSLSSTASALGKLQDVVNQNAQALNTLVKQLSSNCGAISSVLNDILSRLDKVEAEVQIDRLITCRLQSLQTYVTQQLIRAAEIRASANLAATKMSECVLGQSKRVDFCGKGYHLMSFPQSAPHGVVFLHVTYVPAQEKNFTTAPAICHDGKAHFPREGVFVSNGTHWFVTQRNFYEPQIITTDNTFVSGNCDVVIGIVNNTVYDPLQPELDSGGGSGGGQIYEGKLTAEGLRFGIVASRFNHALVDRLVEGAIDAIVRHGGREEDITLVRVPGSWEIPVAAGELARKEDIDAVIAIGVLIRGATPHFDYIASEVSKGLADLSLELRKPITFGVITADTLEQAIERAGTKHGNKGWEAALSAIEMANLFKSLR

SEQ ID NO: 8417 - protein, 1307 aa, Artificial Sequence
  SARS-CoV-2/China/WF0004/2020__EPI_ISL_413694 spike protein (1-1147)(F970C_G999C) LumSynth construct
MFVFLVLLPLVSSQCVNLTTRTQLPPAYTNSFTRGVYYPDKVFRSSVLHSTQDLFLPFFSNVTWFHAIHVSGTNGTKRFDNPVLPFNDGVYFASTEKSNIIRGWIFGTTLDSKTQSLLIVNNATNVVIKVCEFQFCNDPFLGVYYHKNNKSWTESEFRVYSSANNCTFEYVSQPFLMDLEGKQGNFKNLREFVFKNIDGYFKIYSKHTPINLVRDLPQGFSALEPLVDLPIGINITRFQTLLALHRSYLTPGDSSSGWTAGAAAYYVGYLQPRTFLLKYNENGTITDAVDCALDPLSETKCTLKSFTVEKGIYQTSNFRVQPTESIVRFPNITNLCPFGEVFNATRFASVYAWNRKRISNCVADYSVLYNSASFSTFKCYGVSPTKLNDLCFTNVYADSFVIRGDEVRQIAPGQTGKIADYNYKLPDDFTGCVIAWNSNNLDSKVGGNYNYLYRLFRKSNLKPFERDISTEIYQAGSTPCNGVEGFNCYFPLQSYGFQPTNGVGYQPYRVVVLSFELLHAPATVCGPKKSTNLVKNKCVNFNFNGLTGTGVLTESNKKFLPFQQFGRDIADTTDAVRDPQTLEILDITPCSFGGVSVITPGTNTSNQVAVLYQDVNCTEVPVAIHADQLTPTWRVYSTGSNVFQTRAGCLIGAEHVNNSYECDIPIGAGICASYQTQTNSPRRARSVASQSIIAYTMSLGAENSVAYSNNSIAIPTNFTISVTTEILPVSMTKTSVDCTMYICGDSTECSNLLLQYGSFCTQLNRALTGIAVEQDKNTQEVFAQVKQIYKTPPIKDFGGFNFSQILPDPSKPSKRSFIEDLLFNKVTLADAGFIKQYGDCLGDIAARDLICAQKFNGLTVLPPLLTDEMIAQYTSALLAGTITSGWTFGAGAALQIPFAMQMAYRFNGIGVTQNVLYENQKLIANQFNSAIGKIQDSLSSTASALGKLQDVVNQNAQALNTLVKQLSSNCGAISSVLNDILSRLDKVEAEVQIDRLITCRLQSLQTYVTQQLIRAAEIRASANLAATKMSECVLGQSKRFDFCGKGYHLMSFPQSAPHGVVFLHVTYVPAQEKNFTTAPAICHDGKAHFPREGVFVSNGTHWFVTQRNFYEPQIITTDNTFVSGNCDVVIGIVNNTVYDPLQPELDSGGGSGGGQIYEGKLTAEGLRFGIVASRFNHALVDRLVEGAIDAIVRHGGREEDITLVRVPGSWEIPVAAGELARKEDIDAVIAIGVLIRGATPHFDYIASEVSKGLADLSLELRKPITFGVITADTLEQAIERAGTKHGNKGWEAALSAIEMANLFKSLR

SEQ ID NO: 8418 - protein, 1307 aa, Artificial Sequence
  SARS-CoV-2/China/WF0028/2020__EPI_ISL_413791 spike protein (1-1147)(F970C_G999C) LumSynth construct
MFVFLVLLPLVSSQCVNLTTRTQLPPAYTNSFTRGVYYPDKVFRSSVLHSTQDLFLPFFSNVTWFHAIHVSGTNGTKRFDNPVLPFNDGVYFASTEKSNIIRGWIFGTTLDSKTQSLLIVNNATNVVIKVCEFQFCNDPFLGVYYHKNNKSWMESEFRVYSSANNCTFEYVSQPFLMDLEGKQGNFKNLREFVFKNIDGYFKIYSKHTPINLVRDLPQGFSALEPLVDLPIGINITRFQTLLALHRSYLTPGDSSSGWTAGAAAYYVGYLQPRTFLLKYNENGTITDAVDCALDPLSETKCTLKSFTVEKGIYQTSNFRVQPTESIVRFPNITNLCPFGEVFNATRFASVYAWNRKRISNCVADYSVLYNSASFSTFKCYGVSPTKLNDLCFTNVYADSFVIRGDEVRQIAPGQTGKIADYNYKLPDDFTGCVIAWNSNNLDSKVGGNYNYLYRLFRKSNLKPFERDISTEIYQAGSTPCNGVEGFNCYFPLQSYGFQPTNGVGYQPYRVVVLSFELLHAPATVCGPKKSTNLVKNKCVNFNFNGLTGTGVLTESNKKFLPFQQFGRDIADTTDAVRDPQTLEILDITPCSFGGVSVITPGTNTSNQVAVLYQDVNCTEVPVAIHADQLTPTWRVYSTGSNVFQTRAGCLIGAEHVNNSYECDIPIGAGICASYQTQTNSPRRARSVASQSIIAYTMSLGAENSVAYSNNSIAIPTNFTISVTTEILPVSMTKTSVDCTMYICGDSTECSNLLLQYGSFCTQLNRALTGIAVEQDKNTQEVFAQVKQIYKTPPIKDFGGFNFSQILPDPSKPSKRSFIEDLLFNKVTLADAGFIKQYGDCLGDIAARDLICAQKFNGLTVLPPLLTDEMIAQYTSALLAGTITSGWTFGAGAALQIPFAMQMAYRFNGIGVTQNVLYENQKLIANQFNSAIGKIQDSLSSTASALGKLQDVVNQNAQALNTLVKQLSSNCGAISSVLNDILSRLDKVEAEVQIDRLITCRLQSLQTYVTQQLIRAAEIRASANLAATKMSECVLGQSKRVDFCGKGYHLMSFPQSAPHGVVFLHVTYVPAQEKNFTTAPAICHDGKAHFPREGVFVSNGTHWFVTQRNFYEPQIITTDNTFVSGNCDVVIGIVNNTVYDPLQPELESGGGSGGGQIYEGKLTAEGLRFGIVASRFNHALVDRLVEGAIDAIVRHGGREEDITLVRVPGSWEIPVAAGELARKEDIDAVIAIGVLIRGATPHFDYIASEVSKGLADLSLELRKPITFGVITADTLEQAIERAGTKHGNKGWEAALSAIEMANLFKSLR

SEQ ID NO: 8419 - protein, 1307 aa, Artificial Sequence
  SARS-CoV-2/2019-nCoV/USA-CruiseA-18/2020__MT159716.1 spike protein (1-1147)(F970C_G999C) LumSynth construct
MFVFLVLLPLVSSQCVNLTTRTQLPPAYTNSFTRGVYYPDKVFRSSVLHSTQDLFLPFFSNVTWFHAIHVSGTNGTKRFDNPVLPFNDGVYFASTEKSNIIRGWIFGTTLDSKTQSLLIVNNATNVVIKVCEFQFCNDPFLGVYYHKNNKSWMESELRVYSSANNCTFEYVSQPFLMDLEGKQGNFKNLREFVFKNIDGYFKIYSKHTPINLVRDLPQGFSALEPLVDLPIGINITRFQTLLALHRSYLTPGDSSSGWTAGAAAYYVGYLQPRTFLLKYNENGTITDAVDCALDPLSETKCTLKSFTVEKGIYQTSNFRVQPTESIVRFPNITNLCPFGEVFNATRFASVYAWNRKRISNCVADYSVLYNSASFSTFKCYGVSPTKLNDLCFTNVYADSFVIRGDEVRQIAPGQTGKIADYNYKLPDDFTGCVIAWNSNNLDSKVGGNYNYLYRLFRKSNLKPFERDISTEIYQAGSTPCNGVEGFNCYFPLQSYGFQPTNGVGYQPYRVVVLSFELLHAPATVCGPKKSTNLVKNKCVNFNFNGLTGTGVLTESNKKFLPFQQFGRDIADTTDAVRDPQTLEILDITPCSFGGVSVITPGTNTSNQVAVLYQDVNCTEVPVAIHADQLTPTWRVYSTGSNVFQTRAGCLIGAEHVNNSYECDIPIGAGICASYQTQTNSPRRARSVASQSIIAYTMSLGAENSVAYSNNSIAIPTNFTISVTTEILPVSMTKTSVDCTMYICGDSTECSNLLLQYGSFCTQLNRALTGIAVEQDKNTQEVFAQVKQIYKTPPIKDFGGFNFSQILPDPSKPSKRSFIEDLLFNKVTLADAGFIKQYGDCLGDIAARDLICAQKFNGLTVLPPLLTDEMIAQYTSALLAGTITSGWTFGAGAALQIPFAMQMAYRFNGIGVTQNVLYENQKLIANQFNSAIGKIQDSLSSTASALGKLQDVVNQNAQALNTLVKQLSSNCGAISSVLNDILSRLDKVEAEVQIDRLITCRLQSLQTYVTQQLIRAAEIRASANLAATKMSECVLGQSKRVDFCGKGYHLMSFPQSAPHGVVFLHVTYVPAQEKNFTTAPAICHDGKAHFPREGVFVSNGTHWFVTQRNFYEPQIITTDNTFVSGNCDVVIGIVNNTVYDPLQPELDSGGGSGGGQIYEGKLTAEGLRFGIVASRFNHALVDRLVEGAIDAIVRHGGREEDITLVRVPGSWEIPVAAGELARKEDIDAVIAIGVLIRGATPHFDYIASEVSKGLADLSLELRKPITFGVITADTLEQAIERAGTKHGNKGWEAALSAIEMANLFKSLR

SEQ ID NO: 8420 - protein, 1307 aa, Artificial Sequence
  SARS-CoV-2/SARS-CoV-2/Yunnan-01/human/2020/CHN__MT049951.1 spike protein (1-1147)(F970C_G999C) LumSynth construct
MFVFLVLLPLVSSQCVNLTTRTQLPPANTNSFTRGVYYPDKVFRSSVLHSTQDLFLPFFSNVTWFHAIHVSGTNGTKRFDNPVLPFNDGVYFASTEKSNIIRGWIFGTTLDSKTQSLLIVNNATNVVIKVCEFQFCNDPFLGVYYHKNNKSWMESEFRVYSSANNCTFEYVSQPFLMDLEGKQGNFKNLREFVFKNIDGYFKIYSKHTPINLVRDLPQGFSALEPLVDLPIGINITRFQTLLALHRSYLTPGDSSSGWTAGAAAYYVGYLQPRTFLLKYNENGTITDAVDCALDPLSETKCTLKSFTVEKGIYQTSNFRVQPTESIVRFPNITNLCPFGEVFNATRFASVYAWNRKRISNCVADYSVLYNSASFSTFKCYGVSPTKLNDLCFTNVYADSFVIRGDEVRQIAPGQTGKIADYNYKLPDDFTGCVIAWNSNNLDSKVGGNYNYLYRLFRKSNLKPFERDISTEIYQAGSTPCNGVEGFNCYFPLQSYGFQPTNGVGYQPYRVVVLSFELLHAPATVCGPKKSTNLVKNKCVNFNFNGLTGTGVLTESNKKFLPFQQFGRDIADTTDAVRDPQTLEILDITPCSFGGVSVITPGTNTSNQVAVLYQDVNCTEVPVAIHADQLTPTWRVYSTGSNVFQTRAGCLIGAEHVNNSYECDIPIGAGICASYQTQTNSPRRARSVASQSIIAYTMSLGAENSVAYSNNSIAIPTNFTISVTTEILPVSMTKTSVDCTMYICGDSTECSNLLLQYGSFCTQLNRALTGIAVEQDKNTQEVFAQVKQIYKTPPIKDFGGFNFSQILPDPSKPSKRSFIEDLLFNKVTLADAGFIKQYGDCLGDIAARDLICAQKFNGLTVLPPLLTDEMIAQYTSALLAGTITSGWTFGAGAALQIPFAMQMAYRFNGIGVTQNVLYENQKLIANQFNSAIGKIQDSLSSTASALGKLQDVVNQNAQALNTLVKQLSSNCGAISSVLNDILSRLDKVEAEVQIDRLITCRLQSLQTYVTQQLIRAAEIRASANLAATKMSECVLGQSKRVDFCGKGYHLMSFPQSAPHGVVFLHVTYVPAQEKNFTTAPAICHDGKAHFPREGVFVSNGTHWFVTQRNFYEPQIITTDNTFVSGNCDVVIGIVNNTVYDPLQPELDSGGGSGGGQIYEGKLTAEGLRFGIVASRFNHALVDRLVEGAIDAIVRHGGREEDITLVRVPGSWEIPVAAGELARKEDIDAVIAIGVLIRGATPHFDYIASEVSKGLADLSLELRKPITFGVITADTLEQAIERAGTKHGNKGWEAALSAIEMANLFKSLR

SEQ ID NO: 8421 - protein, 1307 aa, Artificial Sequence
  SARS-CoV-2/USA/WA-UW292/2020__EPI_ISL_418077 spike protein (1-1147)(F970C_G999C) LumSynth construct
MFVFLVLLPLVSSQCVNLTTRTQLPPAYTNSFTRGVYYPDKVFRSSVLHSTQDLFLPFFSNVTWFHAIHVSGTNGTKRFDNPVLPFNDGVYFASTEKSNIIRGWIFGTTLDSKTQSLLIVNNATNVVIKVCEFQFCNDPFLGVYYHKNNKSWMESEFRVYSSANNCTFEYVSQPFLMDLEGKQGNFKNLREFVFKNIDGYFKIYSKHTPINLVRDLPQGFSALEPLVDLPIGINITRFQTLLALHRSYLTPGDSSSGWTAGAAAYYVGYLQPRTFLLKYNENGTITDAVDCALDPLSETKCTLKSFTVEKGIYQTSNFRVQPTESIVRFPNITNLCPFGEVFNATRFASVYAWNRKRISNCVADYSVLYNSASFSTFKCYGVSPTKLNDLCFTNVYADSFVIRGDEVRQIAPGQTGKIADYNYKLPDDFTGCVIAWNSNNLDSKVGGNYNYLYRLFRKSNLKPFERDISTEIYQASSTPCNGVEGFNCYFPLQSYGFQPTNGVGYQPYRVVVLSFELLHAPATVCGPKKSTNLVKNKCVNFNFNGLTGTGVLTESNKKFLPFQQFGRDIADTTDAVRDPQTLEILDITPCSFGGVSVITPGTNTSNQVAVLYQDVNCTEVPVAIHADQLTPTWRVYSTGSNVFQTRAGCLIGAEHVNNSYECDIPIGAGICASYQTQTNSPRRARSVASQSIIAYTMSLGAENSVAYSNNSIAIPTNFTISVTTEILPVSMTKTSVDCTMYICGDSTECSNLLLQYGSFCTQLNRALTGIAVEQDKNTQEVFAQVKQIYKTPPIKDFGGFNFSQILPDPSKPSKRSFIEDLLFNKVTLADAGFIKQYGDCLGDIAARDLICAQKFNGLTVLPPLLTDEMIAQYTSALLAGTITSGWTFGAGAALQIPFAMQMAYRFNGIGVTQNVLYENQKLIANQFNSAIGKIQDSLSSTASALGKLQDVVNQNAQALNTLVKQLSSNCGAISSVLNDILSRLDKVEAEVQIDRLITCRLQSLQTYVTQQLIRAAEIRASANLAATKMSECVLGQSKRVDFCGKGYHLMSFPQSAPHGVVFLHVTYVPAQEKNFTTAPAICHDGKAHFPREGVFVSNGTHWFVTQRNFYEPQIITTDNTFVSGNCDVVIGIVNNTVYDPLQPELDSGGGSGGGQIYEGKLTAEGLRFGIVASRFNHALVDRLVEGAIDAIVRHGGREEDITLVRVPGSWEIPVAAGELARKEDIDAVIAIGVLIRGATPHFDYIASEVSKGLADLSLELRKPITFGVITADTLEQAIERAGTKHGNKGWEAALSAIEMANLFKSLR

SEQ ID NO: 8422 - protein, 1307 aa, Artificial Sequence
  SARS-CoV-2/Iceland/192/2020__EPI_ISL_417819 spike protein (1-1147)(F970C_G999C) LumSynth construct
MFVFFVLLPLVSSQCVNLTTRTQLPPAYTNSFTRGVYYPDKVFRSSVLHSTQDLFLPFFSNVTWFHAIHVSGTNGTKRFDNPVLPFNDGVYFASTEKSNIIRGWIFGTTLDSKTQSLLIVNNATNVVIKVCEFQFCNDPFLGVYYHKNNKSWMESEFRVYSSANNCTFEYVSQPFLMDLEGKQGNFKNLREFVFKNIDGYFKIYSKHTPINLVRDLPQGFSALEPLVDLPIGINITRFQTLLALHRSYLTPGDSSSGWTAGAAAYYVGYLQPRTFLLKYNENGTITDAVDCALDPLSETKCTLKSFTVEKGIYQTSNFRVQPTESIVRFPNITNLCPFGEVFNATRFASVYAWNRKRISNCVADYSVLYNSASFSTFKCYGVSPTKLNDLCFTNVYADSFVIRGDEVRQIAPGQTGKIADYNYKLPDDFTGCVIAWNSNNLDSKVGGNYNYLYRLFRKSNLKPFERDISTEIYQAGSTPCNGVEGFNCYFPLQSYGFQPTNGVGYQPYRVVVLSFELLHAPATVCGPKKSTNLVKNKCVNFNFNGLTGTGVLTESNKKFLPFQQFGRDIADTTDAVRDPQTLEILDITPCSFGGVSVITPGTNTSNQVAVLYQGVNCTEVPVAIHADQLTPTWRVYSTGSNVFQTRAGCLIGAEHVNNSYECDIPIGAGICASYQTQTNSPRRARSVASQSIIAYTMSLGAENSVAYSNNSIAIPTNFTISVTTEILPVSMTKTSVDCTMYICGDSTECSNLLLQYGSFCTQLNRALTGIAVEQDKNTQEVFAQVKQIYKTPPIKDFGGFNFSQILPDPSKPSKRSFIEDLLFNKVTLADAGFIKQYGDCLGDIAARDLICAQKFNGLTVLPPLLTDEMIAQYTSALLAGTITSGWTFGAGAALQIPFAMQMAYRFNGIGVTQNVLYENQKLIANQFNSAIGKIQDSLSSTASALGKLQDVVNQNAQALNTLVKQLSSNCGAISSVLNDILSRLDKVEAEVQIDRLITCRLQSLQTYVTQQLIRAAEIRASANLAATKMSECVLGQSKRVDFCGKGYHLMSFPQSAPHGVVFLHVTYVPAQEKNFTTAPAICHDGKAHFPREGVFVSNGTHWFVTQRNFYEPQIITTDNTFVSGNCDVVIGIVNNTVYDPLQPELDSGGGSGGGQIYEGKLTAEGLRFGIVASRFNHALVDRLVEGAIDAIVRHGGREEDITLVRVPGSWEIPVAAGELARKEDIDAVIAIGVLIRGATPHFDYIASEVSKGLADLSLELRKPITFGVITADTLEQAIERAGTKHGNKGWEAALSAIEMANLFKSLR

SEQ ID NO: 8423 - protein, 1307 aa, Artificial Sequence
  SARS-CoV-2/Belgium/ULG-6939/2020__EPI_ISL_417020 spike protein (1-1147)(F970C_G999C) LumSynth construct
MFVFLVLLPLVSSQCVNLTTRTQLPPAYTNSFTRGVYYPDKVFRSSVLHSTQDLFLPFFSNVTWFHAIHVSGTNGTKRFDNPVLPFNDGVYFASTEKSNIIRGWIFGTTLDSKTQSLLIVNNATNVVIKVCEFQFCNDPFLGVYYHKNNKSWMESEFRVYSSANNCTFEYVSQPFLMDLEGKQGNFKNLREFVFKNIDGYFKIYSKHTPINLVRDLPQGFSALEPLVDLPIGINITRFQTLLALHRSYLTPGDSSSGWTAGAAAYYVGYLQPRTFLLKYNENGTITDAVDCALDPLSETKCTLKSFTVEKGIYQTSNFRVQPTESIVRFPNITNLCPFGEVFNATRFASVYAWNRKRISNCVADYSVLYNSASFSTFKCYGVSPTKLNDLCFTNVYADSFVIRGDEVRQIAPGQTGKIADYNYKLPDDFTGCVIAWNSNNLDSKVGGNYNYLYRLFRKSNLKPFERDISTEIYQAGSTPCNGVEGFNCYFPLQSYGFQPTNGVGYQPYRVVVLSFELLHAPATVCGPKKSTNLVKNKCVNFNFNGLTGTGVLTESNKKFLPFQQFGRDIADTTDAVRDPQTLEILDITPCSFGGVSVITPGTNTSNQVAVLYQGVNCTEVPVAIHADQLTPTWRVYSTGSNVFQTRAGCLIGAEHVNNSYECDIPIGAGICASYQTQTNSPRRARSVASQSIIAYTMSLGAENSVVYSNNSIAIPTNFTISVTTEILPVSMTKTSVDCTMYICGDSTECSNLLLQYGSFCTQLNRALTGIAVEQDKNTQEVFAQVKQIYKTPPIKDFGGFNFSQILPDPSKPSKRSFIEDLLFNKVTLADAGFIKQYGDCLGDIAARDLICAQKFNGLTVLPPLLTDEMIAQYTSALLAGTITSGWTFGAGAALQIPFAMQMAYRFNGIGVTQNVLYENQKLIANQFNSAIGKIQDSLSSTASALGKLQDVVNQNAQALNTLVKQLSSNCGAISSVLNDILSRLDKVEAEVQIDRLITCRLQSLQTYVTQQLIRAAEIRASANLAATKMSECVLGQSKRVDFCGKGYHLMSFPQSAPHGVVFLHVTYVPAQEKNFTTAPAICHDGKAHFPREGVFVSNGTHWFVTQRNFYEPQIITTDNTFVSGNCDVVIGIVNNTVYDPLQPELDSGGGSGGGQIYEGKLTAEGLRFGIVASRFNHALVDRLVEGAIDAIVRHGGREEDITLVRVPGSWEIPVAAGELARKEDIDAVIAIGVLIRGATPHFDYIASEVSKGLADLSLELRKPITFGVITADTLEQAIERAGTKHGNKGWEAALSAIEMANLFKSLR

SEQ ID NO: 8424 - protein, 1307 aa, Artificial Sequence
  SARS-CoV-2/France/HF2496/2020__EPI_ISL_418231 spike protein (1-1147)(F970C_G999C) LumSynth construct
MFVFLVLLPLVSSQCVNLTTRTQLPPAYTNSFTRGVYYPDKVFRSSVLHSTQDLFLPFFSNVTWFHAIHVSGTNGTKRFDNPVLPFNDGVYFASTEKSNIIRGWIFGTTLDSKTQSLLIVNNATNVVIKVCEFQFCNDPFLGVYYHKNNKSWMESEFRVYSSANNCTFEYVSQPFLMDLEGKQGNFKNLREFVFKNIDGYFKIYSKHTPINLVRDLPQGFSALEPLVDLPIGINITRFQTLLALHRSYLTPGDSSSGWTAGAAAYYVGYLQPRTFLLKYNENGTITDAVDCALDPLSETKCTLKSFTVEKGIYQTSNFRVQPTESIVRFPNITNLCPFGEVFNATRFASVYAWNRKRISNCVADYSVLYNSASFSTFKCYGVSPTKLNDLCFTNVYADSFVIRGDEVRQIAPGQTGKIADYNYKLPDDFTGCVIAWNSNNLDSKVGGNYNYLYRLFRKSNLKPFERDISTEIYQAGSTPCNGVEGFNCYFPLQSYGFQPTNGVGYQPYRVVVLSFELLHAPATVCGPKKSTNLVKNKCVNFNFNGLTGTGVLTESNKKFLPFQQFGRDIADTTDAVRDPQTLEILDITPCSFGGVSVITPGTNTSNQVAVLYQGVNCTEVPVAIHADQLTPTWRVYSTGSNVFQTRAGCLIGAEHVNNSYECDIPIGAGICASYQTQTNSPRRARSVASQSIIAYTMSLGAENSVAYSNNSIAIPTNFTISVTTEILPVSMTKTSVDCTMYICGDSTECSNLLLQYGSFCTQLNRALTGIAVEQDKNTQEVFAQVKQIYKTPPIKDFGGFNFSQILPDPSKPSKRSFIEDLLFNKVTLADAGFIKQYGDCLGDIVARDLICAQKFNGLTVLPPLLTDEMIAQYTSALLAGTITSGWTFGAGAALQIPFAMQMAYRFNGIGVTQNVLYENQKLIANQFNSAIGKIQDSLSSTASALGKLQDVVNQNAQALNTLVKQLSSNCGAISSVLNDILSRLDKVEAEVQIDRLITCRLQSLQTYVTQQLIRAAEIRASANLAATKMSECVLGQSKRVDFCGKGYHLMSFPQSAPHGVVFLHVTYVPAQEKNFTTAPAICHDGKAHFPREGVFVSNGTHWFVTQRNFYEPQIITTDNTFVSGNCDVVIGIVNNTVYDPLQPELDSGGGSGGGQIYEGKLTAEGLRFGIVASRFNHALVDRLVEGAIDAIVRHGGREEDITLVRVPGSWEIPVAAGELARKEDIDAVIAIGVLIRGATPHFDYIASEVSKGLADLSLELRKPITFGVITADTLEQAIERAGTKHGNKGWEAALSAIEMANLFKSLR

SEQ ID NO: 8425 - protein, 1307 aa, Artificial Sequence
  SARS-CoV-2/USA/WA-UW291/2020__EPI_ISL_418076 spike protein (1-1147)(F970C_G999C) LumSynth construct
MFVFLVLLPLVSSQCVNLTTRTQLPPAYTNSFTRGVYYPDKVFRSSVLHSTQDLFLPFFSNVTWFHAIHVSGTNGTKRFDNPVLPFNDGVYFASTEKSNIIRGWIFGTTLDSKTQSLLIVNNATNVVIKVCEFQFCNDPFLGVYYHKNNKSWMESEFRVYSSANNCTFEYVSQPFLMDLEGKQGNFKNLREFVFKNIDGYFKIYSKHTPINLVRDLPQGFSALEPLVDLPIGINITRFQTLLALHRSYLTPGDSSSGWTAGAAAYYVGYLQPRTFLLKYNENGTITDAVDCALDPLSETKCTLKSFTVEKGIYQTSNFRVQPTESIVRFPNITNLCPFGEVFNATRFASVYAWNRKRISNCVADYSVLYNSASFSTFKCYGVSPTKLNDLCFTNVYADSFVIRGDEVRQIAPGQTGKIADYNYKLPDDFTGCVIAWNSNNLDSKVGGNYNYLYRLFRKSNLKPFERDISTEIYQAGSTPCNGVEGFNCYFPLQSYGFQPTNGVGYQPYRVVVLSFELLHAPATVCGPKKSTNLVKNKCVNFNFNGLTGTGVLTESNKKFLPFQQFGRDIADTTDAVRDPQTLEILDITPCSFGGVSVITPGTNTSNQVAVLYQGVNCTEVPVAIHADQLTPTWRVYSTGSNVFQTRAGCLIGAEHVNNSYECDIPIGAGICASYQTQTNSPRRARSVASQSIIAYTMSLGAENSVAYSNNSIAIPTNFTISVTTEILPVSMTKTSVDCTMYICGDSTECSNLLLQYGSFCTQLNRALTGIAVEQDKNTQEVFAQVKQIYKTPPIKDFGGFNFSQILPDPSKPSKRSFIEDLLFNKVTLADAGFIKQYGDCLGDIAARDLICAQKFNGLTVLPPLLTDEMIAQYTSALLAGTITSGWTFGAGAALQIPFAMQMAYRFNGIGVTQNVLYENQKLIANQFNSAIGKIQYSLSSTASALGKLQDVVNQNAQALNTLVKQLSSNCGAISSVLNDILSRLDKVEAEVQIDRLITCRLQSLQTYVTQQLIRAAEIRASANLAATKMSECVLGQSKRVDFCGKGYHLMSFPQSAPHGVVFLHVTYVPAQEKNFTTAPAICHDGKAHFPREGVFVSNGTHWFVTQRNFYEPQIITTDNTFVSGNCDVVIGIVNNTVYDPLQPELDSGGGSGGGQIYEGKLTAEGLRFGIVASRFNHALVDRLVEGAIDAIVRHGGREEDITLVRVPGSWEIPVAAGELARKEDIDAVIAIGVLIRGATPHFDYIASEVSKGLADLSLELRKPITFGVITADTLEQAIERAGTKHGNKGWEAALSAIEMANLFKSLR

SEQ ID NO: 8426 - protein, 1307 aa, Artificial Sequence; identical to SEQ ID NO: 8389
  SARS-CoV-2/Portugal/PT0034/2020__EPI_ISL_418019 spike protein (1-1147)(F970C_G999C) LumSynth construct

SEQ ID NO: 8427 - protein, 1307 aa, Artificial Sequence; identical to SEQ ID NO: 8381
  SARS-CoV-2/Iceland/202/2020__EPI_ISL_417750 spike protein (1-1147)(F970C_G999C) LumSynth construct

SEQ ID NO: 8428 - protein, 1307 aa, Artificial Sequence
  SARS-CoV-2/USA/WA-UW261/2020__EPI_ISL_418046 spike protein (1-1147)(F970C_G999C) LumSynth construct
MFVFLVLLPLVSSQCVNLTTRTQLPPAYTNSFTRGVYYPDKVFRSSVLHSTQDLFLPFFSNVTWFHAIHVSGTNGTKRFDNPVLPFNDGVYFASTEKSNIIRGWIFGTTLDSKTQSLLIVNNATNVVIKVCEFQFCNDPFLGVYYHKNNKSWMESEFRVYSSANNCTFEYVSQPFLMDLEGKQGNFKNLREFVFKNIDGYFKIYSKHTPINLVRDLPQGFSALEPLVDLPIGINITRFQTLLALHRSYLTPGDSSSGWTAGAAAYYVGYLQPRTFLLKYNENGTITDAVDCALDPLSETKCTLKSFTVEKGIYQTSNFRVQPTESIVRFPNITNLCPFGEVFNATRFTSVYAWNRKRISNCVADYSVLYNSASFSTFKCYGVSPTKLNDLCFTNVYADSFVIRGDEVRQIAPGQTGKIADYNYKLPDDFTGCVIAWNSNNLDSKVGGNYNYLYRLFRKSNLKPFERDISTEIYQAGSTPCNGVEGFNCYFPLQSYGFQPTNGVGYQPYRVVVLSFELLHAPATVCGPKKSTNLVKNKCVNFNFNGLTGTGVLTESNKKFLPFQQFGRDIADTTDAVRDPQTLEILDITPCSFGGVSVITPGTNTSNQVAVLYQDVNCTEVPVAIHADQLTPTWRVYSTGSNVFQTRAGCLIGAEHVNNSYECDIPIGAGICASYQTQTNSPRRARSVASQSIIAYTMSLGAENSVAYSNNSIAIPTNFTISVTTEILPVSMTKTSVDCTMYICGDSTECSNLLLQYGSFCTQLNRALTGIAVEQDKNTQEVFAQVKQIYKTPPIKDFGGFNFSQILPDPSKPSKRSFIEDLLFNKVTLADAGFIKQYGDCLGDIAARDLICAQKFNGLTVLPPLLTDEMIAQYTSALLAGTITSGWTFGAGAALQIPFAMQMAYRFNGIGVTQNVLYENQKLIANQFNSAIGKIQDSLSSTASALGKLQDVVNQNAQALNTLVKQLSSNCGAISSVLNDILSRLDKVEAEVQIDRLITCRLQSLQTYVTQQLIRAAEIRASANLAATKMSECVLGQSKRVDFCGKGYHLMSFPQSAPHGVVFLHVTYVPAQEKNFTTAPAICHDGKAHFPREGVFVSNGTHWFVTQRNFYEPQIITTDNTFVSGNCDVVIGIVNNTVYDPLQPELDSGGGSGGGQIYEGKLTAEGLRFGIVASRFNHALVDRLVEGAIDAIVRHGGREEDITLVRVPGSWEIPVAAGELARKEDIDAVIAIGVLIRGATPHFDYIASEVSKGLADLSLELRKPITFGVITADTLEQAIERAGTKHGNKGWEAALSAIEMANLFKSLR

SEQ ID NO: 8429 - protein, 1307 aa, Artificial Sequence
  SARS-CoV-2/Portugal/PT0035/2020__EPI_ISL_418020 spike protein (1-1147)(F970C_G999C) LumSynth construct
MFVFLVLLPLVSSQCVNLTTRTQLPPAYTNSFTRGVYYPDKVFRSSVLHSTQDLFLPFFSNVTWFHAIHVSGTNGTKRFDNPVLPFNDGVYFASTEKSNIIRGWIFGTTLDSKTQSLLIVNNATNVVIKVCEFQFCNDPFLGVYYHKNNKSWMESEFRVYSSANNCTFEYVSQPFLMDLEGKQGNFKNLREFVFKNIDGYFKIYSKHTPINLVRDLPQGFSALEPLVDLPIGINITRFQTLLALHRSYLTPGDSSSGWTAGAAAYYVGYLQPRTFLLKYNENGTITDAVDCALDPLSETKCTLKSFTVEKGIYQTSNFRVQPTESIVRFPNITNLCPFGEVFNATRFASVYAWNRKRISNCVADYSVLYNSASFSTFKCYGVSPTKLNDLCFTNVYADSFVIRGDEVRQIAPGQTGKIADYNYKLPDDFTGCVIAWNSNNLDSKVGGNYNYLYRLFRKSNLKPFERDISTEIYQAGSTPCNGVEGFNCYFPLQSYGFQPTNGVGYQPYRVVVLSFELLHAPATVCGPKKSTNLVKNKCVNFNFNGLTGTGVLTESNKKFLPFQQFGRDIADTTDAVRDPQTLEILDITPCSFGGVSVITPGTNTSNQVAVLYQDVNCTEVPVAIHADQLTPTWRVYSTGSNVFQTRAGCLIGAEHVNNSYECDIPIGAGICASYQTQTNSPRRARSVASQSIIAYTMSLGAENSVAYSNNSIAIPTNFTISVTTEILPVSMTKTSVDCTMYICGDSTECSNLLLQYGSFCTQLNRALTGIAVEQDKNTQEVFAQVKQIYKTPPIKDFGGFNFSQILPDPSKPSKRSFIEDLLFNKVTLADAGFIKQYGDCLGDISARDLICAQKFNGLTVLPPLLTDEMIAQYTSALLAGTITSGWTFGAGAALQIPFAMQMAYRFNGIGVTQNVLYENQKLIANQFNSAIGKIQDSLSSTASALGKLQDVVNQNAQALNTLVKQLSSNCGAISSVLNDILSRLDKVEAEVQIDRLITCRLQSLQTYVTQQLIRAAEIRASANLAATKMSECVLGQSKRVDFCGKGYHLMSFPQSAPHGVVFLHVTYVPAQEKNFTTAPAICHDGKAHFPREGVFVSNGTHWFVTQRNFYEPQIITTDNTFVSGNCDVVIGIVNNTVYDPLQPELDSGGGSGGGQIYEGKLTAEGLRFGIVASRFNHALVDRLVEGAIDAIVRHGGREEDITLVRVPGSWEIPVAAGELARKEDIDAVIAIGVLIRGATPHFDYIASEVSKGLADLSLELRKPITFGVITADTLEQAIERAGTKHGNKGWEAALSAIEMANLFKSLR

SEQ ID NO: 8430 - protein, 1307 aa, Artificial Sequence
  SARS-CoV-2/USA/NY-NYUMC7/2020__EPI_ISL_418192 spike protein (1-1147)(F970C_G999C) LumSynth construct
MFVFLVLLPLVSSQCVNLTTRTQLPPAYTNSFTRGVYYPDKVFRSSVLHSTQDLFLPFFSNVTWFHAIHVSGTNGTKRFDNPVLPFNDGVYFASTEKSNIIRGWIFGTTLDSKTQSLLIVNNATNVVIKVCEFQFCNDPFLGVYHHKNNKSWMESEFRVYSSANNCTFEYVSQPFLMDLEGKQGNFKNLREFVFKNIDGYFKIYSKHTPINLVRDLPQGFSALEPLVDLPIGINITRFQTLLALHRSYLTPGDSSSGWTAGAAAYYVGYLQPRTFLLKYNENGTITDAVDCALDPLSETKCTLKSFTVEKGIYQTSNFRVQPTESIVRFPNITNLCPFGEVFNATRFASVYAWNRKRISNCVADYSVLYNSASFSTFKCYGVSPTKLNDLCFTNVYADSFVIRGDEVRQIAPGQTGKIADYNYKLPDDFTGCVIAWNSNNLDSKVGGNYNYLYRLFRKSNLKPFERDISTEIYQAGSTPCNGVEGFNCYFPLQSYGFQPTNGVGYQPYRVVVLSFELLHAPATVCGPKKSTNLVKNKCVNFNFNGLTGTGVLTESNKKFLPFQQFGRDIADTTDAVRDPQTLEILDITPCSFGGVSVITPGTNTSNQVAVLYQGVNCTEVPVAIHADQLTPTWRVYSTGSNVFQTRAGCLIGAEHVNNSYECDIPIGAGICASYQTQTNSPRRARSVASQSIIAYTMSLGAENSVAYSNNSIAIPTNFTISVTTEILPVSMTKTSVDCTMYICGDSTECSNLLLQYGSFCTQLNRALTGIAVEQDKNTQEVFAQVKQIYKTPPIKDFGGFNFSQILPDPSKPSKRSFIEDLLFNKVTLADAGFIKQYGDCLGDIAARDLICAQKFNGLTVLPPLLTDEMIAQYTSALLAGTITSGWTFGAGAALQIPFAMQMAYRFNGIGVTQNVLYENQKLIANQFNSAIGKIQDSLSSTASALGKLQDVVNQNAQALNTLVKQLSSNCGAISSVLNDILSRLDKVEAEVQIDRLITCRLQSLQTYVTQQLIRAAEIRASANLAATKMSECVLGQSKRVDFCGKGYHLMSFPQSAPHGVVFLHVTYVPAQEKNFTTAPAICHDGKAHFPREGVFVSNGTHWFVTQRNFYEPQIITTDNTFVSGNCDVVIGIVNNTVYDPLQPELDSGGGSGGGQIYEGKLTAEGLRFGIVASRFNHALVDRLVEGAIDAIVRHGGREEDITLVRVPGSWEIPVAAGELARKEDIDAVIAIGVLIRGATPHFDYIASEVSKGLADLSLELRKPITFGVITADTLEQAIERAGTKHGNKGWEAALSAIEMANLFKSLR

SEQ ID NO: 8431 - protein, 1307 aa, Artificial Sequence
  SARS-CoV-2/Iceland/189/2020__EPI_ISL_417709 spike protein (1-1147)(F970C_G999C) LumSynth construct
MFVFLVLLPLVSSQCVNLTTRTQLPPAYTNSFTRGVYYPDKVFRSSVLHSTQDLFLPFFSNVTWFHAIHVSGTNGTKRFDNPVLPFNDGVYFASTEKSNIIRGWIFGTTLDSKTQSLLIVNNATNVVIKVCEFQFCNDPFLGVYYHKNNKSWMESEFRVYSSANNCTFEYVSQPFLMDLEGKQGNFKNLREFVFKNIDGYFKIYSKHTPINLVRDLPQGFSALEPLVDLPIGINITRFQTLLALHRSYLTPGDSSSGWTAGAAAYYVGYLQPRTFLLKYNENGTITDAVDCALDPLSETKCTLKSFTVEKGIYQTSNFRVQPTESIVRFPNITNLCPFGEVFNATRFASVYAWNRKRISNCVADYSVLYNSASFSTFKCYGVSPTKLNDLCFTNVYADSFVIRGDEVRQIAPGQTGKIADYNYKLPDDFTGCVIAWNSNNLDSKVGGNYNYLYRLFRKSNLKPFERDISTEIYQAGSTPCNGVEGFNCYFPLQSYGFQPTNGVGYQPYRVVVLSFELLHAPATVCGPKKSTNLVKNKCVNFNFNGLTGTGVLTESNKKFLPFQQFGRDIADTTDAVRDPQTLEILDITPCSFGGVSVITPGTNTSNQVAVLYQGVNCTEVPVAIHADQLTPTWRVYSTGSNVFQTRAGCLIGAEHVNNSYECDIPIGAGICASYQTQTNSPRRARSVASQSIIAYTMSLGAENSVAYSNNSIAIPTNFTISVTTEILPVSMTKTSVDCTMYICGDSTECSNLLLQYGSFCTQLNRALTGIAVEQDKNTQEVFAQVKQIYKTPPIKDFGGFNFSQILPDPSKPSKRSFIEDLLFNKVTLADAGFTKQYGDCLGDIAARDLICAQKFNGLTVLPPLLTDEMIAQYTSALLAGTITSGWTFGAGAALQIPFAMQMAYRFNGIGVTQNVLYENQKLIANQFNSAIGKIQDSLSSTASALGKLQDVVNQNAQALNTLVKQLSSNCGAISSVLNDILSRLDKVEAEVQIDRLITCRLQSLQTYVTQQLIRAAEIRASANLAATKMSECVLGQSKRVDFCGKGYHLMSFPQSAPHGVVFLHVTYVPAQEKNFTTAPAICHDGKAHFPREGVFVSNGTHWFVTQRNFYEPQIITTDNTFVSGNCDVVIGIVNNTVYDPLQPELDSGGGSGGGQIYEGKLTAEGLRFGIVASRFNHALVDRLVEGAIDAIVRHGGREEDITLVRVPGSWEIPVAAGELARKEDIDAVIAIGVLIRGATPHFDYIASEVSKGLADLSLELRKPITFGVITADTLEQAIERAGTKHGNKGWEAALSAIEMANLFKSLR

SEQ ID NO: 8432 - protein, 1307 aa, Artificial Sequence
  SARS-CoV-2/Australia/NSW56/2020__EPI_ISL_417408 spike protein (1-1147)(F970C_G999C) LumSynth construct
MFVFLVLLPLVSSQCVNLTTRTQLPPAYTNSFTRGVYYPDKVFRSSVLHSTQDLFLPFFSNVTWFHAIHVSGTNGTKRFDNPVLPFNDGVYFASTEKSNIIRGWIFGTTLDSKTQSLLIVNNATNVVIKVCEFQFCNDPFLGVYYHKNNKSWMESEFRVYSSANNCTFEYVSQPFLMDLEGKQGNFKNLREFVFKNIDGYFKIYSKHTPINLVRDLPQGFSALEPLVDLPIGINITRFQTLLALHRSYLTPGDSSSGWTAGAAAYYVGYLQPRTFLLKYNENGTITDAVDCALDPLSETKCTLKSFTVEKGIYQTSNFRVQPTESIVRFPNITNLCPFGEVFNATRFASVYAWNRKRISNCVADYSVLYNSASFSTFKCYGVSPTKLNDLCFTNVYADSFVIRGDEVRQIAPGQTGKIADYNYKLPDDFTGCVIAWNSNNLDSKVGGNYNYLYRLFRKSNLKPFERDISTEIYQAGSTPCNGVEGFNCYFPLQSYGFQPTNGVGYQPYRVVVLSFELLHAPATVCGPKKSTNLVKNKCVNFNFNGLTGTGVLTESNKKFLPFQQFGRDIADTTDAVRDPQTLEILDITPCSFGGVSVITPGTNTSNQVAVLYQDVNCTEVPVAIHADQLTPTWRVYSTGSNVFQTRAGCLIGAEHVNNSYECDIPIGAGICASYQTQTNSPRRARSVASQSIIAYTMSLGAENSVAYSNNSIAIPTNFTISVTTEILPVSMTKTSVDCTMYICGDSTECSNLLLQYGSFCTQLNRALTGIAVEQDKNTQEVFAQVKQIYKTPPIKDFGGFNFSQILPDSSKPSKRSFIEDLLFNKVTLADAGFIKQYGDCLGDIAARDLICAQKFNGLTVLPPLLTDEMIAQYTSALLAGTITSGWTFGAGAALQIPFAMQMAYRFNGIGVTQNVLYENQKLIANQFNSAIGKIQDSLSSTASALGKLQDVVNQNAQALNTLVKQLSSNCGAISSVLNDILSRLDKVEAEVQIDRLITCRLQSLQTYVTQQLIRAAEIRASANLAATKMSECVLGQSKRVDFCGKGYHLMSFPQSAPHGVVFLHVTYVPAQEKNFTTAPAICHDGKAHFPREGVFVSNGTHWFVTQRNFYEPQIITTDNTFVSGNCDVVIGIVNNTVYDPLQPELDSGGGSGGGQIYEGKLTAEGLRFGIVASRFNHALVDRLVEGAIDAIVRHGGREEDITLVRVPGSWEIPVAAGELARKEDIDAVIAIGVLIRGATPHFDYIASEVSKGLADLSLELRKPITFGVITADTLEQAIERAGTKHGNKGWEAALSAIEMANLFKSLR

SEQ ID NO: 8433 - protein, 1307 aa, Artificial Sequence
  SARS-CoV-2/Iceland/280/2020__EPI_ISL_417608 spike protein (1-1147)(F970C_G999C) LumSynth construct
MFVFLVLLPLVSSQCVNLTTRTQLPPAYTNSFTRGVYYPDKVFRSSVLHSTQDLFLPFFSNVTWFHAIHVSGTNGTKRFDNPVLPFNDGVYFASTEKSNIIRGWIFGTTLDSKTQSLLIVNNATNVVIKVCEFQFCNDPFLGVYYHKNNKSWMESEFRVYSSANNCTFEYVSQPFLMDLEGKQGNFKNLREFVFKNIDGYFKIYSKHTPINLVRDLPQGFSALEPLVDLPIGINITRFQTLLALHRSYLTPGDSSSGWTAGAAAYYVGYLQPRTFLLKYNENGTITDAVDCALDPLSETKCTLKSFTVEKGIYQTSNFRVQPTESIVRFPNITNLCPFGEVFNATRFASVYAWNRKRISNCVADYSVLYNSASFSTFKCYGVSPTKLNDLCFTNVYADSFVIRGDEVRQIAPGQTGKIADYNYKLPDDFTGCVIAWNSNNLDSKVGGNYNYLYRLFRKSNLKPFERDISTEIYQAGSTPCNGVEGFNCYFPLQSYGFQPTNGVGYQPYRVVVLSFELLHAPATVCGPKKSTNLVKNKCVNFNFNGLTGTGVLTESNKKFLPFQQFGRDIADTTDAVRDPQTLEILDITPCSFGGVSVITPGTNTSNQVAVLYQGVNCTEVPVAIHADQLTPTWRVYSTGSNVFQTRAGCLIGAEHVNNSYECDIPIGAGICASYHTQTNSPRRARSVASQSIIAYTMSLGAENSVAYSNNSIAIPTNFTISVTTEILPVSMTKTSVDCTMYICGDSTECSNLLLQYGSFCTQLNRALTGIAVEQDKNTQEVFAQVKQIYKTPPIKDFGGFNFSQILPDPSKPSKRSFIEDLLFNKVTLADAGFIKQYGDCLGDIAARDLICAQKFNGLTVLPPLLTDEMIAQYTSALLAGTITSGWTFGAGAALQIPFAMQMAYRFNGIGVTQNVLYENQKLIANQFNSAIGKIQDSLSSTASALGKLQDVVNQNAQALNTLVKQLSSNCGAISSVLNDILSRLDKVEAEVQIDRLITCRLQSLQTYVTQQLIRAAEIRASANLAATKMSECVLGQSKRVDFCGKGYHLMSFPQSAPHGVVFLHVTYVPAQEKNFTTAPAICHDGKAHFPREGVFVSNGTHWFVTQRNFYEPQIITTDNTFVSGNCDVVIGIVNNTVYDPLQPELDSGGGSGGGQIYEGKLTAEGLRFGIVASRFNHALVDRLVEGAIDAIVRHGGREEDITLVRVPGSWEIPVAAGELARKEDIDAVIAIGVLIRGATPHFDYIASEVSKGLADLSLELRKPITFGVITADTLEQAIERAGTKHGNKGWEAALSAIEMANLFKSLR

SEQ ID NO: 8434 - protein, 1307 aa, Artificial Sequence; identical to SEQ ID NO: 8389
  SARS-CoV-2/Iceland/247/2020__EPI_ISL_417575 spike protein (1-1147)(F970C_G999C) LumSynth construct

SEQ ID NO: 8435 - protein, 1307 aa, Artificial Sequence
  SARS-CoV-2/Iceland/238/2020__EPI_ISL_417566 spike protein (1-1147)(F970C_G999C) LumSynth construct
MFVFLVLLPLVSSQCVNLTTRTQLPPAYTNSFTRGVYYPDKVFRSSVLHSTQDLFLPFFSNVTWFHAIHVSGTNGTKRFDNPVLPFNDGVYFASTEKSNIIRGWIFGTTLDSKTQSLLIVNNATNVVIKVCEFQFCNDPFLGVYYHKNNKSWMESEFRVYSSANNCTFEYVSQPFLMDLEGKQGNFKNLREFVFKNIDGYFKIYSKHTPINLVRDLPQGFSALEPLVDLPIGINITRFQTLLALHRSYLTPGDSSSGWTAGAAAYYVGYLQPRTFLLKYNENGTITDAVDCALDPLSETKCTLKSFTVEKGIYQTSNFRVQPTESIVRFPNITNLCPFGEVFNATRFASVYAWNRKRISNCVADYSVLYNSASFSTFKCYGVSPTKLNDLCFTNVYADSFVIRGDEVRQIAPGQTGKIADYNYKLPDDFTGCVIAWNSNNLDSKVGGNYNYLYRLFRKSNLKPFERDISTEIYQAGSTPCNGVEGFNCYFPLQSYGFQPTNGVGYQPYRVVVLSFELLHAPATVCGPKKSTNLVKNKCVNFNFNGLTGTGVLTESNKKFLPFQQFGRDIADTTDAVRDPQTLEILDITPCSFGGVSVITPGTNTSNQVAVLYQGVNCTEVPVAIHADQLTPTWRVYSTGSNVFQTRAGCLIGAEHVNNSYECDIPIGAGICASYQTQTNSPRRARSVASQSIIAYTMSLGAENSVAYSNNSIAIPTNFTISVTTEILPVSMTKTSVDCTMYICGDSTECSNLLLQYGSFCTQLNRALTGIAVEQDKNTQEVFAQVKQIYKTPPIKDFGGFNFSQILPDPSKPSKRSFIEDLLFNKVTLADVGFIKQYGDCLGDIAARDLICAQKFNGLTVLPPLLTDEMIAQYTSALLAGTITSGWTFGAGAALQIPFAMQMAYRFNGIGVTQNVLYENQKLIANQFNSAIGKIQDSLSSTASALGKLQDVVNQNAQALNTLVKQLSSNCGAISSVLNDILSRLDKVEAEVQIDRLITCRLQSLQTYVTQQLIRAAEIRASANLAATKMSECVLGQSKRVDFCGKGYHLMSFPQSAPHGVVFLHVTYVPAQEKNFTTAPAICHDGKAHFPREGVFVSNGTHWFVTQRNFYEPQIITTDNTFVSGNCDVVIGIVNNTVYDPLQPELDSGGGSGGGQIYEGKLTAEGLRFGIVASRFNHALVDRLVEGAIDAIVRHGGREEDITLVRVPGSWEIPVAAGELARKEDIDAVIAIGVLIRGATPHFDYIASEVSKGLADLSLELRKPITFGVITADTLEQAIERAGTKHGNKGWEAALSAIEMANLFKSLR

SEQ ID NO: 8436 - protein, 1307 aa, Artificial Sequence
  SARS-CoV-2/Greece/16/2020__EPI_ISL_418265 spike protein (1-1147)(F970C_G999C) LumSynth construct
MFVFLVLLPLVSSQCVNLTTRTQLPPAYTNSFTRGVYYPDKVFRSSVLHSTQDLFLPFFSNVTWFHAIHVSGTNGTKRFDNPVLPFNDGVYFASTEKSNIIRGWIFGTTLDSKTQSLLIVNNATNVVIKVCEFQFCNDPFLGVYYHKNNKSWMESEFRVYSSANNCTFEYVSQPFLMDLEGKQGNFKNLREFVFKNVDGYFKIYSKHTPINLVRDLPQGFSALEPLVDLPIGINITRFQTLLALHRSYLTPGDSSSGWTAGAAAYYVGYLQPRTFLLKYNENGTITDAVDCALDPLSETKCTLKSFTVEKGIYQTSNFRVQPTESIVRFPNITNLCPFGEVFNATRFASVYAWNRKRISNCVADYSVLYNSASFSTFKCYGVSPTKLNDLCFTNVYADSFVIRGDEVRQIAPGQTGKIADYNYKLPDDFTGCVIAWNSNNLDSKVGGNYNYLYRLFRKSNLKPFERDISTEIYQAGSTPCNGVEGFNCYFPLQSYGFQPTNGVGYQPYRVVVLSFELLHAPATVCGPKKSTNLVKNKCVNFNFNGLTGTGVLTESNKKFLPFQQFGRDIADTTDAVRDPQTLEILDITPCSFGGVSVITPGTNTSNQVAVLYQDVNCTEVPVAIHADQLTPTWRVYSTGSNVFQTRAGCLIGAEHVNNSYECDIPIGAGICASYQTQTNSPRRARSVASQSIIAYTMSLGAENSVAYSNNSIAIPTNFTISVTTEILPVSMTKTSVDCTMYICGDSTECSNLLLQYGSFCTQLNRALTGIAVEQDKNTQEVFAQVKQIYKTPPIKDFGGFNFSQILPDPSKPSKRSFIEDLLFNKVTLADAGFIKQYGDCLGDIAARDLICAQKFNGLTVLPPLLTDEMIAQYTSALLAGTITSGWTFGAGAALQIPFAMQMAYRFNGIGVTQNVLYENQKLIANQFNSAIGKIQDSLSSTASALGKLQDVVNQNAQALNTLVKQLSSNCGAISSVLNDILSRLDKVEAEVQIDRLITCRLQSLQTYVTQQLIRAAEIRASANLAATKMSECVLGQSKRVDFCGKGYHLMSFPQSAPHGVVFLHVTYVPAQEKNFTTAPAICHDGKAHFPREGVFVSNGTHWFVTQRNFYEPQIITTDNTFVSGNCDVVIGIVNNTVYDPLQPELDSGGGSGGGQIYEGKLTAEGLRFGIVASRFNHALVDRLVEGAIDAIVRHGGREEDITLVRVPGSWEIPVAAGELARKEDIDAVIAIGVLIRGATPHFDYIASEVSKGLADLSLELRKPITFGVITADTLEQAIERAGTKHGNKGWEAALSAIEMANLFKSLR

SEQ ID NO: 8437 - protein, 1307 aa, Artificial Sequence
  SARS-CoV-2/Iceland/319/2020__EPI_ISL_417648 spike protein (1-1147)(F970C_G999C) LumSynth construct
MFVFLVLLPLVSSQCVNLTTRTQLPPAYTNSFTRGVYYPDKVFRSSVLHSTQDLFLPFFSNVTWFHAIHVSGTNGTKRFDNPVLPFNDGVYFASTEKSNIIRGWIFGTTLDSKTQSLLIVNNATNVVIKVCEFQFCNDPFLGVYYHKNNKSWMESEFRVYSSANNCTFEYVSQPFLIDLEGKQGNFKNLREFVFKNIDGYFKIYSKHTPINLVRDLPQGFSALEPLVDLPIGINITRFQTLLALHRSYLTPGDSSSGWTAGAAAYYVGYLQPRTFLLKYNENGTITDAVDCALDPLSETKCTLKSFTVEKGIYQTSNFRVQPTESIVRFPNITNLCPFGEVFNATRFASVYAWNRKRISNCVADYSVLYNSASFSTFKCYGVSPTKLNDLCFTNVYADSFVIRGDEVRQIAPGQTGKIADYNYKLPDDFTGCVIAWNSNNLDSKVGGNYNYLYRLFRKSNLKPFERDISTEIYQAGSTPCNGVEGFNCYFPLQSYGFQPTNGVGYQPYRVVVLSFELLHAPATVCGPKKSTNLVKNKCVNFNFNGLTGTGVLTESNKKFLPFQQFGRDIADTTDAVRDPQTLEILDITPCSFGGVSVITPGTNTSNQVAVLYQGVNCTEVPVAIHADQLTPTWRVYSTGSNVFQTRAGCLIGAEHVNNSYECDIPIGAGICASYQTQTNSPRRARSVASQSIIAYTMSLGAENSVAYSNNSIAIPTNFTISVTTEILPVSMTKTSVDCTMYICGDSTECSNLLLQYGSFCTQLNRALTGIAVEQDKNTQEVFAQVKQIYKTPPIKDFGGFNFSQILPDPSKPSKRSFIEDLLFNKVTLADAGFIKQYGDCLGDIAARDLICAQKFNGLTVLPPLLTDEMIAQYTSALLAGTITSGWTFGAGAALQIPFAMQMAYRFNGIGVTQNVLYENQKLIANQFNSAIGKIQDSLSSTASALGKLQDVVNQNAQALNTLVKQLSSNCGAISSVLNDILSRLDKVEAEVQIDRLITCRLQSLQTYVTQQLIRAAEIRASANLAATKMSECVLGQSKRVDFCGKGYHLMSFPQSAPHGVVFLHVTYVPAQEKNFTTAPAICHDGKAHFPREGVFVSNGTHWFVTQRNFYEPQIITTDNTFVSGNCDVVIGIVNNTVYDPLQPELDSGGGSGGGQIYEGKLTAEGLRFGIVASRFNHALVDRLVEGAIDAIVRHGGREEDITLVRVPGSWEIPVAAGELARKEDIDAVIAIGVLIRGATPHFDYIASEVSKGLADLSLELRKPITFGVITADTLEQAIERAGTKHGNKGWEAALSAIEMANLFKSLR

SEQ ID NO: 8438 - protein, 1307 aa, Artificial Sequence
  SARS-CoV-2/Congo/94/2020__EPI_ISL_417947 spike protein (1-1147)(F970C_G999C) LumSynth construct
MFVFLVLLPLVSSQCVNLTTRTQLPPAYTNSFTRGVYYPDKVFRSSVLHSTQDLFLPFFSNVTWFHAIHVSGTNGTKRFDNPVLPFNDGVYFASTEKSNIIRGWIFGTTLDSKTQSLLIVNNATNVVIKVCEFQFCNDPFLGVYYHKNNKSWMESEFRVYSSANNCTFEYVSQPFLMDLEGKQGNFKNLREFVFKNIDGYFKIYSKHTPINLVRDLPQGFSALEPLVDLPIGINITRFQTLLALHRSYLTPGDSSSGWTAGAAAYYVGYLQPRTFLLKYNENGTITDAVDCALDPLSETKCTLKSFTVEKGIYQTSNFRVQPTESIVRFPNITNLCPFGEVFNATRFASVYAWNRKRISNCVADYSVLYNSASFSTFKCYGVSPTKLNDLCFTNVYADSFVIRGDEVRQIAPGQTGKIADYNYKLPDDFTGCVIAWNSNNLDSKVGGNYNYLYRLFRKSNLKPFERDISTEIYQAGSTPCNGVEGFNCYFPLQSYGFQPTNGVGYQPYRVVVLSFELLHAPATVCGPKKSTNLVKNKCVNFNFNGLTGTGVLTESNKKFLPFQQFGRDIADTTDAVRDPQTLEILDITPCSFGGVSVITPGTNTSNQVAVLYQGVNCTEVPVAIHADQLTPTWRVYSTGSNVFQTRAGCLIGAEHVNNSYECDIPIGAGICASYQTQTNSPRRARSVASQSIIAYTMSLGAENSVAYSNNSIAIPTNFTISVTTEILPVSMTKTSVDCTMYICGDSTECSNLLLQYGSFCTQLNRALTGIAVEQDKNTQEVFAQVKQIYKTPPIKDFGGFNFSQILPDPSKPSKRSFIEDILFNKVTLADAGFIKQYGDCLGDIAARDLICAQKFNGLTVLPPLLTDEMIAQYTSALLAGTITSGWTFGAGAALQIPFAMQMAYRFNGIGVTQNVLYENQKLIANQFNSAIGKIQDSLSSTASALGKLQDVVNQNAQALNTLVKQLSSNCGAISSVLNDILSRLDKVEAEVQIDRLITCRLQSLQTYVTQQLIRAAEIRASANLAATKMSECVLGQSKRVDFCGKGYHLMSFPQSAPHGVVFLHVTYVPAQEKNFTTAPAICHDGKAHFPREGVFVSNGTHWFVTQRNFYEPQIITTDNTFVSGNCDVVIGIVNNTVYDPLQPELDSGGGSGGGQIYEGKLTAEGLRFGIVASRFNHALVDRLVEGAIDAIVRHGGREEDITLVRVPGSWEIPVAAGELARKEDIDAVIAIGVLIRGATPHFDYIASEVSKGLADLSLELRKPITFGVITADTLEQAIERAGTKHGNKGWEAALSAIEMANLFKSLR

SEQ ID NO: 8439 - protein, 1307 aa, Artificial Sequence
  SARS-CoV-2/Congo/158/2020__EPI_ISL_417950 spike protein (1-1147)(F970C_G999C) LumSynth construct
MFVFLVLLPLVSSQCVNLTTRTQLPPAYTNSFTRGVYYPDKVFRSSVLHSTQDLFLPFFSNVTWFHAIHVSGTNGTKRFDNPVLPFNDGVYFASTEKSNIIRGWIFGTTLDSKTQSLLIVNNATNVVIKVCEFQFCNDPFLGVYYHKNNKSWMESEFRVYSSANNCTFEYVSQPFLMDLEGKQGNFKNLREFVFKNIDGYFKIYSKHTPINLVRDLPQGFSALEPLVDLPIGINITRFQTLLALHRSYLTPGDSSSGWTAGAAAYYVGYLQPRTFLLKYNENGTITDAVDCALDPLSETKCTLKSFTVEKGIYQTSNFRVQPTESIVRFPNITNLCPFGEVFNATRFASVYAWNRKRISNCVADYSVLYNSASFSTFKCYGVSPTKLNDLCFTNVYADSFVIRGDEVRQIAPGQTGKIADYNYKLPDDFTGCVIAWNSNNLDSKVGGNYNYLYRLFRKSNLKPFERDISTEIYQAGSTPCNGVEGFNCYFPLQSYGFQPTNGVGYQPYRVVVLSFELLHAPATVCGPKKSTNLVKNKCVNFNFNGLTGTGVLTESNKKFLPFQQFGRDIADTTDAVRDPQTLEILDITPCSFGGVSVITPGTNTSNQVAVLYQDVNCTEVPVAIHADQLTPTWRVYSTGSNVFQTRAGCLIGAEHVNNSYECDIPIGAGICASYQTQTNSPRRARSVASQSIIAYTMSLGAENSVAYSNNSIAIPTNFTISVTTEILPVSMTKTSVDCTMYICGDSTECSNLLLQYGSFCTQLNRALTGIAVEQDKNTQEVFAQVKQIYKTPPIKDFGGFNFSQILPDPSKPSKRSFIEDLLFNKVTLADAGFIKQYGDCLGDIAARDLICAQKFNGLTVLPPLLTDEMIAQYTSALLAGTITSGWTFGAGAALQIPFAMQMAYRFNGIGVTQNVLYENQKLIANQFNSAIGKIQDSLSSTASALGKLQDVVNQNAQALNTLVKQLSSNCGAISSVLNDILSRLDKVEAEVQIDRLITCRLQSLQTYVTQQLIRAAEIRASANLAATKMSECVLGQSKRVDFCGKGYHLMSFPQSAPHGVVFLHVTYVPAQEKNFTTAPAICHDGKAHFPREGVFVSNGTHWFVTQRNFYEPQIITTDNTFLSGNCDVVIGIVNNTVYDPLQPELDSGGGSGGGQIYEGKLTAEGLRFGIVASRFNHALVDRLVEGAIDAIVRHGGREEDITLVRVPGSWEIPVAAGELARKEDIDAVIAIGVLIRGATPHFDYIASEVSKGLADLSLELRKPITFGVITADTLEQAIERAGTKHGNKGWEAALSAIEMANLFKSLR

SEQ ID NO: 8440 - protein, 1307 aa, Artificial Sequence
  SARS-CoV-2/USA/UT-00034/2020__EPI_ISL_417977 spike protein (1-1147)(F970C_G999C) LumSynth construct
MFVFLVLLPLVSSQCVNLTTRTQLPPAYTNSFTRGVYYPDKVFRSSVLHSTQDLFLPFFSNVTWFHAIHVSGTNGTKRFDNPVLPFNDGVYFASTEKSNIIRGWIFGTTLDSKTQSLLIVNNATNVVIKVCEFQFCNDPFLGVYYYKNNKSWMESEFRVYSSANNCTFEYVSQPFLMDLEGKQGNFKNLREFVFKNIDGYFKIYSKHTPINLVRDLPQGFSALEPLVDLPIGINITRFQTLLALHRSYLTPGDSSSGWTAGAAAYYVGYLQPRTFLLKYNENGTITDAVDCALDPLSETKCTLKSFTVEKGIYQTSNFRVQPTESIVRFPNITNLCPFGEVFNATRFASVYAWNRKRISNCVADYSVLYNSASFSTFKCYGVSPTKLNDLCFTNVYADSFVIRGDEVRQIAPGQTGKIADYNYKLPDDFTGCVIAWNSNNLDSKVGGNYNYLYRLFRKSNLKPFERDISTEIYQAGSTPCNGVEGFNCYFPLQSYGFQPTNGVGYQPYRVVVLSFELLHAPATVCGPKKSTNLVKNKCVNFNFNGLTGTGVLTESNKKFLPFQQFGRDIADTTDAVRDPQTLEILDITPCSFGGVSVITPGTNTSNQVAVLYQGVNCTEVPVAIHADQLTPTWRVYSTGSNVFQTRAGCLIGAEHVNNSYECDIPIGAGICASYQTQTNSPRRARSVASQSIIAYTMSLGAENSVAYSNNSIAIPTNFTISVTTEILPVSMTKTSVDCTMYICGDSTECSNLLLQYGSFCTQLNRALTGIAVEQDKNTQEVFAQVKQIYKTPPIKDFGGFNFSQILPDPSKPSKRSFIEDLLFNKVTLADAGFIKQYGDCLGDIAARDLICAQKFNGLTVLPPLLTDEMIAQYTSALLAGTITSGWTFGAGAALQIPFAMQMAYRFNGIGVTQNVLYENQKLIANQFNSAIGKIQDSLSSTASALGKLQDVVNQNAQALNTLVKQLSSNCGAISSVLNDILSRLDKVEAEVQIDRLITCRLQSLQTYVTQQLIRAAEIRASANLAATKMSECVLGQSKRVDFCGKGYHLMSFPQSAPHGVVFLHVTYVPAQEKNFTTAPAICHDGKAHFPREGVFVSNGTHWFVTQRNFYEPQIITTDNTFVSGNCDVVIGIVNNTVYDPLQPELDSGGGSGGGQIYEGKLTAEGLRFGIVASRFNHALVDRLVEGAIDAIVRHGGREEDITLVRVPGSWEIPVAAGELARKEDIDAVIAIGVLIRGATPHFDYIASEVSKGLADLSLELRKPITFGVITADTLEQAIERAGTKHGNKGWEAALSAIEMANLFKSLR

SEQ ID NO: 8441 - protein, 1307 aa, Artificial Sequence
  SARS-CoV-2/USA/UT-00033/2020__EPI_ISL_417976 spike protein (1-1147)(F970C_G999C) LumSynth construct
MFVFLVLLPLVSSQCVNLTTRTQLPPAYTNSFTRGVYYPDKVFRSSVLHSTQDLFLPFFSNVTWFHAIHVSGTNGTKRFDNPVLPFNDGVYFASTEKSNIIRGWIFGTTLDSKTQSLLIVNNATNVVIKVCEFQFCNDPFLGVYYHKNNKSWMESEFRVYSSANNCTFEYVSQPFLMDLEGKQGNFKNLREFVFKNIDGYFKIYSKHTPINLVRDLPQGFSALEPLVDLPIGINITRFQTLLALHRSYLTPGDSSSGLTAGAAAYYVGYLQPRTFLLKYNENGTITDAVDCALDPLSETKCTLKSFTVEKGIYQTSNFRVQPTESIVRFPNITNLCPFGEVFNATRFASVYAWNRKRISNCVADYSVLYNSASFSTFKCYGVSPTKLNDLCFTNVYADSFVIRGDEVRQIAPGQTGKIADYNYKLPDDFTGCVIAWNSNNLDSKVGGNYNYLYRLFRKSNLKPFERDISTEIYQAGSTPCNGVEGFNCYFPLQSYGFQPTNGVGYQPYRVVVLSFELLHAPATVCGPKKSTNLVKNKCVNFNFNGLTGTGVLTESNKKFLPFQQFGRDIADTTDAVRDPQTLEILDITPCSFGGVSVITPGTNTSNQVAVLYQGVNCTEVPVAIHADQLTPTWRVYSTGSNVFQTRAGCLIGAEHVNNSYECDIPIGAGICASYQTQTNSPRRARSVASQSIIAYTMSLGAENSVAYSNNSIAIPTNFTISVTTEILPVSMTKTSVDCTMYICGDSTECSNLLLQYGSFCTQLNRALTGIAVEQDKNTQEVFAQVKQIYKTPPIKDFGGFNFSQILPDPSKPSKRSFIEDLLFNKVTLADAGFIKQYGDCLGDIAARDLICAQKFNGLTVLPPLLTDEMIAQYTSALLAGTITSGWTFGAGAALQIPFAMQMAYRFNGIGVTQNVLYENQKLIANQFNSAIGKIQDSLSSTASALGKLQDVVNQNAQALNTLVKQLSSNCGAISSVLNDILSRLDKVEAEVQIDRLITCRLQSLQTYVTQQLIRAAEIRASANLAATKMSECVLGQSKRVDFCGKGYHLMSFPQSAPHGVVFLHVTYVPAQEKNFTTAPAICHDGKAHFPREGVFVSNGTHWFVTQRNFYEPQIITTDNTFVSGNCDVVIGIVNNTVYDPLQPELDSGGGSGGGQIYEGKLTAEGLRFGIVASRFNHALVDRLVEGAIDAIVRHGGREEDITLVRVPGSWEIPVAAGELARKEDIDAVIAIGVLIRGATPHFDYIASEVSKGLADLSLELRKPITFGVITADTLEQAIERAGTKHGNKGWEAALSAIEMANLFKSLR

SEQ ID NO: 8442 - protein, 1307 aa, Artificial Sequence
  SARS-CoV-2/USA/WI-13/2020__EPI_ISL_417516 spike protein (1-1147)(F970C_G999C) LumSynth construct
MFVFLVLLPLVSSQCVNLTTRTQLPPAYTNSFTRGVYYPDKVFRSSVLHSTQDLFLPFFSNVTWFHAIHVSGTNGTKRFDNPVLPFNDGVYFASTEKSNIIRGWIFGTTLDSKTQSLLIVNNATNVVIKVCEFQFCNDPFLGVYYHKNNKSWMESEFRVYSSANNCTFEYVSQPFLMDLEGKQGNFKNLREFVFKNIDGYFKIYSKHTPINLVRDLPQGFSALEPLVDLPIGINITRFQTLLALHRSYLTPGDSSSGWTAGAAAYYVGYLQPRTFLLKYNENGTITDAVDCALDPLSETKCTLKSFTVEKGIYQTSNFRVLPTESIVRFPNITNLCPFGEVFNATRFASVYAWNRKRISNCVADYSVLYNSASFSTFKCYGVSPTKLNDLCFTNVYADSFVIRGDEVRQIAPGQTGKIADYNYKLPDDFTGCVIAWNSNNLDSKVGGNYNYLYRLFRKSNLKPFERDISTEIYQAGSTPCNGVEGFNCYFPLQSYGFQPTNGVGYQPYRVVVLSFELLHAPATVCGPKKSTNLVKNKCVNFNFNGLTGTGVLTESNKKFLPFQQFGRDIADTTDAVRDPQTLEILDITPCSFGGVSVITPGTNTSNQVAVLYQGVNCTEVPVAIHADQLTPTWRVYSTGSNVFQTRAGCLIGAEHVNNSYECDIPIGAGICASYQTQTNSPRRARSVASQSIIAYTMSLGAENSVAYSNNSIAIPTNFTISVTTEILPVSMTKTSVDCTMYICGDSTECSNLLLQYGSFCTQLNRALTGIAVEQDKNTQEVFAQVKQIYKTPPIKDFGGFNFSQILPDPSKPSKRSFIEDLLFNKVTLADAGFIKQYGDCLGDIAARDLICAQKFNGLTVLPPLLTDEMIAQYTSALLAGTITSGWTFGAGAALQIPFAMQMAYRFNGIGVTQNVLYENQKLIANQFNSAIGKIQDSLSSTASALGKLQDVVNQNAQALNTLVKQLSSNCGAISSVLNDILSRLDKVEAEVQIDRLITCRLQSLQTYVTQQLIRAAEIRASANLAATKMSECVLGQSKRVDFCGKGYHLMSFPQSAPHGVVFLHVTYVPAQEKNFTTAPAICHDGKAHFPREGVFVSNGTHWFVTQRNFYEPQIITTDNTFVSGNCDVVIGIVNNTVYDPLQPELDSGGGSGGGQIYEGKLTAEGLRFGIVASRFNHALVDRLVEGAIDAIVRHGGREEDITLVRVPGSWEIPVAAGELARKEDIDAVIAIGVLIRGATPHFDYIASEVSKGLADLSLELRKPITFGVITADTLEQAIERAGTKHGNKGWEAALSAIEMANLFKSLR

SEQ ID NO: 8443 - protein, 1306 aa, Artificial Sequence
  SARS-CoV-2/India/1-27/2020__EPI_ISL_413522 spike protein (1-1146)(F969C_G998C) LumSynth construct
MFVFLVLLPLVSSQCVNLTTRTQLPPAYTNSFTRGVYYPDKVFRSSVLHSTQDLFLPFFSNVTWFHAIHVSGTNGTKRFDNPVLPFNDGVYFASTEKSNIIRGWIFGTTLDSKTQSLLIVNNATNVVIKVCEFQFCNDPFLGVYHKNNKSWMESEFRVYSSANNCTFEYVSQPFLMDLEGKQGNFKNLREFVFKNIDGYFKIYSKHTPINLVRDLPQGFSALEPLVDLPIGINITRFQTLLALHRSYLTPGDSSSGWTAGAAAYYVGYLQPRTFLLKYNENGTITDAVDCALDPLSETKCTLKSFTVEKGIYQTSNFRVQPTESIVRFPNITNLCPFGEVFNATRFASVYAWNRKRISNCVADYSVLYNSASFSTFKCYGVSPTKLNDLCFTNVYADSFVIRGDEVIQIAPGQTGKIADYNYKLPDDFTGCVIAWNSNNLDSKVGGNYNYLYRLFRKSNLKPFERDISTEIYQAGSTPCNGVEGFNCYFPLQSYGFQPTNGVGYQPYRVVVLSFELLHAPATVCGPKKSTNLVKNKCVNFNFNGLTGTGVLTESNKKFLPFQQFGRDIADTTDAVRDPQTLEILDITPCSFGGVSVITPGTNTSNQVAVLYQDVNCTEVPVAIHADQLTPTWRVYSTGSNVFQTRAGCLIGAEHVNNSYECDIPIGAGICASYQTQTNSPRRARSVASQSIIAYTMSLGAENSVAYSNNSIAIPTNFTISVTTEILPVSMTKTSVDCTMYICGDSTECSNLLLQYGSFCTQLNRALTGIAVEQDKNTQEVFAQVKQIYKTPPIKDFGGFNFSQILPDPSKPSKRSFIEDLLFNKVTLADAGFIKQYGDCLGDIAARDLICAQKFNGLTVLPPLLTDEMIAQYTSALLAGTITSGWTFGAGAALQIPFAMQMAYRFNGIGVTQNVLYENQKLIANQFNSAIGKIQDSLSSTASALGKLQDVVNQNAQALNTLVKQLSSNCGAISSVLNDILSRLDKVEAEVQIDRLITCRLQSLQTYVTQQLIRAAEIRASANLAATKMSECVLGQSKRVDFCGKGYHLMSFPQSAPHGVVFLHVTYVPAQEKNFTTAPAICHDGKAHFPREGVFVSNGTHWFVTQRNFYEPQIITTDNTFVSGNCDVVIGIVNNTVYDPLQPELDSGGGSGGGQIYEGKLTAEGLRFGIVASRFNHALVDRLVEGAIDAIVRHGGREEDITLVRVPGSWEIPVAAGELARKEDIDAVIAIGVLIRGATPHFDYIASEVSKGLADLSLELRKPITFGVITADTLEQAIERAGTKHGNKGWEAALSAIEMANLFKSLR

SEQ ID NO: 8444 - protein, 1301 aa, Artificial Sequence
  SARS-CoV-2/pangolin/Guangxi/P4L/2017__EPI_ISL_410538 spike protein (1-1141)(F964C_G993C) LumSynth construct
MFVFLFVLPLVSSQCVNLTTRTGIPPGYTNSSTRGVYYPDKVFRSSILHLTQDLFLPFFSNVTWFNTINYQGGFKKFDNPVLPFNDGVYFASTEKSNIIRGWIFGTTLDARTQSLLIVNNATNVVIKVCEFQFCTDPFLGVYYHNNNKTWVENEFRVYSSANNCTFEYISQPFLMDLEGKQGNFKNLREFVFKNVDGYFKIYSKHTPIDLVRDLPRGFAALEPLVDLPIGINITRFQTLLALHRSYLTPGNLESGWTTGAAAYYVGYLQQRTFLLSYNQNGTITDAVDCSLDPLSETKCTLKSLTVEKGIYQTSNFRVQPTISIVRFPNITNLCPFGEVFNASKFASVYAWNRKRISNCVADYSVLYNSTSFSTFKCYGVSPTKLNDLCFTNVYADSFVVKGDEVRQIAPGQTGVIADYNYKLPDDFTGCVIAWNSVKQDALTGGNYGYLYRLFRKSKLKPFERDISTEIYQAGSTPCNGQVGLNCYYPLERYGFHPTTGVNYQPFRVVVLSFELLNGPATVCGPKLSTTLVKDKCVNFNFNGLTGTGVLTTSKKQFLPFQQFGRDISDTTDAVRDPQTLEILDITPCSFGGVSVITPGTNTSNQVAVLYQDVNCTEVPMAIHAEQLTPAWRVYSAGANVFQTRAGCLVGAEHVNNSYECDIPVGAGICASYHSMSSLRSVNQRSIIAYTMSLGAENSVAYSNNSIAIPTNFTISVTTEILPVSMTKTSVDCTMYICGDSIECSNLLLQYGSFCTQLNRALTGIAVEQDKNTQEVFAQVKQIYKTPPIKDFGGFNFSQILPDPSKPSKRSFIEDLLFNKVTLADAGFIKQYGDCLGDIAARDLICAQKFNGLTVLPPLLTDEMIAQYTSALLAGTITSGWTFGAGAALQIPFAMQMAYRFNGIGVTQNVLYENQKLIANQFNSAIGKIQDSLSSTASALGKLQDVVNQNAQALNTLVKQLSSNCGAISSVLNDILSRLDKVEAEVQIDRLITCRLQSLQTYVTQQLIRAAEIRASANLAATKMSECVLGQSKRVDFCGKGYHLMSFPQSAPHGVVFLHVTYVPAQEKNFTTAPAICHEGKAHFPREGVFVSNGTHWFITQRNFYEPQIITTDNTFVSGSCDVVIGIVNNTVYDPLQPELDSGGGSGGGQIYEGKLTAEGLRFGIVASRFNHALVDRLVEGAIDAIVRHGGREEDITLVRVPGSWEIPVAAGELARKEDIDAVIAIGVLIRGATPHFDYIASEVSKGLADLSLELRKPITFGVITADTLEQAIERAGTKHGNKGWEAALSAIEMANLFKSLR

SEQ ID NO: 8445 - protein, 1301 aa, Artificial Sequence
  SARS-CoV-2/pangolin/Guangxi/P5L/2017__EPI_ISL_410540 spike protein (1-1141)(F964C_G993C) LumSynth construct
MFVFLFVLPLVSSQCVNLTTRTGIPPGYTNSSTRGVYYPDKVFRSSILHLTQDLFLPFFSNVTWFNTINYQGGFKKFDNPVLPFNDGVYFASTEKSNIIRGWIFGTTLDARTQSLLIVNNATNVVIKVCEFQFCTDPFLGVYYHNNNKTWVENEFRVYSSANNCTFEYISQPFLMDLEGKQGNFKNLREFVFKNVDGYFKIYSKHTPIDLVRDLPRGFAALEPLVDLPIGINITRFQTLLALHRSYLTPGKLESGWTTGAAAYYVGYLQQRTFLLSYNQNGTITDAVDCSLDPLSETKCTLKSLTVEKGIYQTSNFRVQPTISIVRFPNITNLCPFGEVFNASKFASVYAWNRKRISNCVADYSVLYNSTSFSTFKCYGVSPTKLNDLCFTNVYADSFVVKGDEVRQIAPGQTGVIADYNYKLPDDFTGCVIAWNSVKQDALTGGNYGYLYRLFRKSKLKPFERDISTEIYQAGSTPCNGQVGLNCYYPLERYGFHPTTGVNYQPFRVVVLSFELLNGPATVCGPKLSTTLVKDKCVNFNFNGLTGTGVLTTSKKQFLPFQQFGRDISDTTDAVRDPQTLEILDITPCSFGGVSVITPGTNTSNQVAVLYQDVNCTEVPMAIHAEQLTPAWRVYSAGANVFQTRAGCLVGAEHVNNSYECDIPVGAGICASYHSMSSFRSVNQRSIIAYTMSLGAENSVAYSNNSIAIPTNFTISVTTEILPVSMTKTSVDCTMYICGDSIECSNLLLQYGSFCTQLNRALTGIAVEQDKNTQEVFAQVKQIYKTPPIKDFGGFNFSQILPDPSKPSKRSFIEDLLFNKVTLADAGFIKQYGDCLGDIAARDLICAQKFNGLTVLPPLLTDEMIAQYTSALLAGTITSGWTFGAGAALQIPFAMQMAYRFNGIGVTQNVLYENQKLIANQFNSAIGKIQDSLSSTASALGKLQDVVNQNAQALNTLVKQLSSNCGAISSVLNDILSRLDKVEAEVQIDRLITCRLQSLQTYVTQQLIRAAEIRASANLAATKMSECVLGQSKRVDFCGKGYHLMSFPQSAPHGVVFLHVTYVPAQEKNFTTAPAICHEGKAHFPREGVFVSNGTHWFITQRNFYEPQIITTDNTFVSGSCDVVIGIVNNTVYDPLQPELDSGGGSGGGQIYEGKLTAEGLRFGIVASRFNHALVDRLVEGAIDAIVRHGGREEDITLVRVPGSWEIPVAAGELARKEDIDAVIAIGVLIRGATPHFDYIASEVSKGLADLSLELRKPITFGVITADTLEQAIERAGTKHGNKGWEAALSAIEMANLFKSLR

SEQ ID NO: 8446 - protein, 1301 aa, Artificial Sequence
  SARS-CoV-2/pangolin/Guangxi/P5E/2017__EPI_ISL_410541 spike protein (1-1141)(F964C_G993C) LumSynth construct
MFVFLFVLPLVSSQCVNLTTRTGIPPGYTNSSTRGVYYPDKVFRSSILHLTQDLFLPFFSNVTWFNTITYQGGSKKFDNPVLPFNDGVYFASTEKSNIIRGWIFGTTLDARTQSLLIVNNATNVVIKVCEFQFCTDPFLGVYYHNNNKTWVENEFRVYSSANNCTFEYISQPFLMDLEGKQGNFKNLREFVFKNVDGYFKIYSKHTPIDLVRDLPRGFAALEPLVDLPIGINITRFQTLLALHRSYLTPGKLESGWTTGAAAYYVGYLQQRTFLLSYNQNGTITDAVDCSLDPLSETKCTLKSLTVEKGIYQTSNFRVQPTISIVRFPNITNLCPFGEVFNASKFASVYAWNRKRISNCVADYSVLYNSTSFSTFKCYGVSPTKLNDLCFTNVYADSFVVKGDEVRQIAPGQTGVIADYNYKLPDDFTGCVIAWNSVKQDALTGDNYGYLYRLFRKSKLKPFERDISTEIYQAGSTPCNGQVGLNCYYPLERYGFHPTTGVNYQPFRVVVLSFELLNGPATVCGPKLSTTLVKDKCVNFNFNGLTGTGVLTTSKKQFLPFQQFGRDISDTTDAVRDPQTLEILDITPCSFGGVSVITPGTNTSNQVAVLYQDVNCTEVPMAIHAEQLTPAWRVYSAGANVFQTRAGCLVGAEHVNNSYECDIPVGAGICASYHSMSSFRSVNQRSIIAYTMSLGAENSVAYSNNSIAIPTNFTISVTTEILPVSMTKTSVDCTMYICGDSIECSNLLLQYGSFCTQLNRALTGIAVEQDKNTQEVFAQVKQIYKTPPIKDFGGFNFSQILPDPSKPSKRSFIEDLLFNKVTLADAGFIKQYGDCLGDIAARDLICAQKFNGLTVLPPLLTDEMIAQYTSALLAGTITSGWTFGAGAALQIPFAMQMAYRFNGIGVTQNVLYENQKLIANQFNSAIGKIQDSLSSTASALGKLQDVVNQNAQALNTLVKQLSSNCGAISSVLNDILSRLDKVEAEVQIDRLITCRLQSLQTYVTQQLIRAAEIRASANLAATKMSECVLGQSKRVDFCGKGYHLMSFPQSAPHGVVFLHVTYVPAQEKNFTTAPAICHEGKAHFPREGVFVSNGTHWFITQRNFYEPQIITTDNTFVSGSCDVVIGIVNNTVYDPLQPELDSGGGSGGGQIYEGKLTAEGLRFGIVASRFNHALVDRLVEGAIDAIVRHGGREEDITLVRVPGSWEIPVAAGELARKEDIDAVIAIGVLIRGATPHFDYIASEVSKGLADLSLELRKPITFGVITADTLEQAIERAGTKHGNKGWEAALSAIEMANLFKSLR

SEQ ID NO: 8447 - protein, 1299 aa, Artificial Sequence
  SARS-CoV-2/pangolin/Guangxi/P1E/2017__EPI_ISL_410539 spike protein (1-1139)(F962C_G991C) LumSynth construct
MFVFLFVLPLVSSQCVNLTTRTGIQPGYTNSSTRGVYYPDKVFRSSILHLTQDLFLPFFSNVTWFNTINYQGGFKKFDNPVLPFNDGVYFASTEKSNIIRGWIFGTTLDARTQSLLIVNNATNVVIKVCEFQFCTDPFLGVYYHNNNKTWVENEFRVYSSANNCTFEYISQPFLMDLEGKQGNFKNLREFVFKNVDGYFKIYSKHTPIDLVRDLPRGFAALEPLVDLPIGINITRFQTLLALHRSYLTPGKLESGWTTGAAAYYVGYLQQRTFLLSYNQNGTITDAVDCSLDPLSETKCTLKSLTVEKGIYQTSNFRVQPTISIVRFPNITNLCPFGEVFNASKFASVYAWNRKRISNCVADYSVLYNSTSFSTFKCYGVSPTKLNDLCFTNVYADSFVVKGDEVRQIAPGQTGVIADYNYKLPDDFTGCVIAWNSVKQDALTGGNYLYRLFRKSKLKPFERDISTEIYQAGSTPCNGQVGLNCYYPLERYGFHPTTGVNYQPFRVVVLSFELLNGPATVCGPKLSTTLVKDKCVNFNFNGLTGTGVLTTSKKQFLPFQQFGRDISDTTDAVRDPQTLEILDITPCSFGGVSVITPGTNTSNQVAVLYQDVNCTEVPMAIHAEQLTPAWRVYSAGANVFQTRAGCLVGAEHVNNSYECDIPVGAGICASYHSMSSLRSVNQRSIIAYTMSLGAENSVAYSNNSIAIPTNFTISVTTEILPVSMTKTSVDCTMYICGDSIECSNLLLQYGSFCTQLNRALTGIAVEQDKNTQEVFAQVKQIYKTPPIKDFGGFNFSQILPDPSKPSKRSFIEDLLFNKVTLADAGFIKQYGDCLGDIAARDLICAQKFNGLTVLPPLLTDEMIAQYTSALLAGTITSGWTFGAGAALQIPFAMQMAYRFNGIGVTQNVLYENQKLIANQFNSAIGKIQDSLSSTASALGKLQDVVNQNAQALNTLVKQLSSNCGAISSVLNDILSRLDKVEAEVQIDRLITCRLQSLQTYVTQQLIRAAEIRASANLAATKMSECVLGQSKRVDFCGKGYHLMSFPQSAPHGVVFLHVTYVPAQEKNFTTAPAICHEGKAHFPREGVFVSNGTHWFITQRNFYEPQIITTDNTFVSGSCDVVIGIVNNTVYDPLQPELDSGGGSGGGQIYEGKLTAEGLRFGIVASRFNHALVDRLVEGAIDAIVRHGGREEDITLVRVPGSWEIPVAAGELARKEDIDAVIAIGVLIRGATPHFDYIASEVSKGLADLSLELRKPITFGVITADTLEQAIERAGTKHGNKGWEAALSAIEMANLFKSLR

SEQ ID NO: 8448 - protein, 1307 aa, Artificial Sequence
  SARS-CoV-2/Wuhan/WIV05/2019__EPI_ISL_402128 spike protein (1-1147)(A972C_R995C) LumSynth construct
MFVFLVLLPLVSSQCVNLTTRTQLPPAYTNSFTRGVYYPDKVFRSSVLHSTQDLFLPFFSNVTWFHAIHVSGTNGTKRFDNPVLPFNDGVYFASTEKSNIIRGWIFGTTLDSKTQSLLIVNNATNVVIKVCEFQFCNDPFLGVYYHKNNKSWMESEFRVYSSANNCTFEYVSQPFLMDLEGKQGNFKNLREFVFKNIDGYFKIYSKHTPINLVRDLPQGFSALEPLVDLPIGINITRFQTLLALHRSYLTPGDSSSGWTAGAAAYYVGYLQPRTFLLKYNENGTITDAVDCALDPLSETKCTLKSFTVEKGIYQTSNFRVQPTESIVRFPNITNLCPFGEVFNATRFASVYAWNRKRISNCVADYSVLYNSASFSTFKCYGVSPTKLNDLCFTNVYADSFVIRGDEVRQIAPGQTGKIADYNYKLPDDFTGCVIAWNSNNLDSKVGGNYNYLYRLFRKSNLKPFERDISTEIYQAGSTPCNGVEGFNCYFPLQSYGFQPTNGVGYQPYRVVVLSFELLHAPATVCGPKKSTNLVKNKCVNFNFNGLTGTGVLTESNKKFLPFQQFGRDIADTTDAVRDPQTLEILDITPCSFGGVSVITPGTNTSNQVAVLYQDVNCTEVPVAIHADQLTPTWRVYSTGSNVFQTRAGCLIGAEHVNNSYECDIPIGAGICASYQTQTNSPRRARSVASQSIIAYTMSLGAENSVAYSNNSIAIPTNFTISVTTEILPVSMTKTSVDCTMYICGDSTECSNLLLQYGSFCTQLNRALTGIAVEQDKNTQEVFAQVKQIYKTPPIKDFGGFNFSQILPDPSKPSKRSFIEDLLFNKVTLADAGFIKQYGDCLGDIAARDLICAQKFNGLTVLPPLLTDEMIAQYTSALLAGTITSGWTFGAGAALQIPFAMQMAYRFNGIGVTQNVLYENQKLIANQFNSAIGKIQDSLSSTASALGKLQDVVNQNAQALNTLVKQLSSNFGCISSVLNDILSRLDKVEAEVQIDCLITGRLQSLQTYVTQQLIRAAEIRASANLAATKMSECVLGQSKRVDFCGKGYHLMSFPQSAPHGVVFLHVTYVPAQEKNFTTAPAICHDGKAHFPREGVFVSNGTHWFVTQRNFYEPQIITTDNTFVSGNCDVVIGIVNNTVYDPLQPELDSGGGSGGGQIYEGKLTAEGLRFGIVASRFNHALVDRLVEGAIDAIVRHGGREEDITLVRVPGSWEIPVAAGELARKEDIDAVIAIGVLIRGATPHFDYIASEVSKGLADLSLELRKPITFGVITADTLEQAIERAGTKHGNKGWEAALSAIEMANLFKSLR

SEQ ID NO: 8449 - protein, 1303 aa, Artificial Sequence
  SARS-CoV-2/bat/Yunnan/RaTG13/2013__EPI_ISL_402131 spike protein (1-1143)(A968C_R991C) LumSynth construct
MFVFLVLLPLVSSQCVNLTTRTQLPPAYTNSSTRGVYYPDKVFRSSVLHLTQDLFLPFFSNVTWFHAIHVSGTNGIKRFDNPVLPFNDGVYFASTEKSNIIRGWIFGTTLDSKTQSLLIVNNATNVVIKVCEFQFCNDPFLGVYYHKNNKSWMESEFRVYSSANNCTFEYVSQPFLMDLEGKQGNFKNLREFVFKNIDGYFKIYSKHTPINLVRDLPPGFSALEPLVDLPIGINITRFQTLLALHRSYLTPGDSSSGWTAGAAAYYVGYLQPRTFLLKYNENGTITDAVDCALDPLSETKCTLKSFTVEKGIYQTSNFRVQPTDSIVRFPNITNLCPFGEVFNATTFASVYAWNRKRISNCVADYSVLYNSTSFSTFKCYGVSPTKLNDLCFTNVYADSFVITGDEVRQIAPGQTGKIADYNYKLPDDFTGCVIAWNSKHIDAKEGGNFNYLYRLFRKANLKPFERDISTEIYQAGSKPCNGQTGLNCYYPLYRYGFYPTDGVGHQPYRVVVLSFELLNAPATVCGPKKSTNLVKNKCVNFNFNGLTGTGVLTESNKKFLPFQQFGRDIADTTDAVRDPQTLEILDITPCSFGGVSVITPGTNASNQVAVLYQDVNCTEVPVAIHADQLTPTWRVYSTGSNVFQTRAGCLIGAEHVNNSYECDIPIGAGICASYQTQTNSRSVASQSIIAYTMSLGAENSVAYSNNSIAIPTNFTISVTTEILPVSMTKTSVDCTMYICGDSTECSNLLLQYGSFCTQLNRALTGIAVEQDKNTQEVFAQVKQIYKTPPIKDFGGFNFSQILPDPSKPSKRSFIEDLLFNKVTLADAGFIKQYGDCLGDIAARDLICAQKFNGLTVLPPLLTDEMIAQYTSALLAGTITSGWTFGAGAALQIPFAMQMAYRFNGIGVTQNVLYENQKLIANQFNSAIGKIQDSLSSTASALGKLQDVVNQNAQALNTLVKQLSSNFGCISSVLNDILSRLDKVEAEVQIDCLITGRLQSLQTYVTQQLIRAAEIRASANLAATKMSECVLGQSKRVDFCGKGYHLMSFPQSAPHGVVFLHVTYVPAQEKNFTTAPAICHDGKAHFPREGVFVSNGTHWFVTQRNFYEPQIITTDNTFVSGSCDVVIGIVNNTVYDPLQPELDSGGGSGGGQIYEGKLTAEGLRFGIVASRFNHALVDRLVEGAIDAIVRHGGREEDITLVRVPGSWEIPVAAGELARKEDIDAVIAIGVLIRGATPHFDYIASEVSKGLADLSLELRKPITFGVITADTLEQAIERAGTKHGNKGWEAALSAIEMANLFKSLR

SEQ ID NO: 8450 - protein, 1307 aa, Artificial Sequence
  SARS-CoV-2/Wuhan/HBCDC-HB-01/2019__EPI_ISL_402132 spike protein (1-1147)(A972C_R995C) LumSynth construct
MFVFLVLLPLVSSQCVNLTTRTQLPPAYTNSITRGVYYPDKVFRSSVLHSTQDLFLPFFSNVTWFHAIHVSGTNGTKRFDNPVLPFNDGVYFASTEKSNIIRGWIFGTTLDSKTQSLLIVNNATNVVIKVCEFQFCNDPFLGVYYHKNNKSWMESEFRVYSSANNCTFEYVSQPFLMDLEGKQGNFKNLREFVFKNIDGYFKIYSKHTPINLVRDLPQGFSALEPLVDLPIGINITRFQTLLALHRSYLTPGDSSSGWTAGAAAYYVGYLQPRTFLLKYNENGTITDAVDCALDPLSETKCTLKSFTVEKGIYQTSNFRVQPTESIVRFPNITNLCPFGEVFNATRFASVYAWNRKRISNCVADYSVLYNSASFSTFKCYGVSPTKLNDLCFTNVYADSFVIRGDEVRQIAPGQTGKIADYNYKLPDDFTGCVIAWNSNNLDSKVGGNYNYLYRLFRKSNLKPFERDISTEIYQAGSTPCNGVEGFNCYFPLQSYGFQPTNGVGYQPYRVVVLSFELLHAPATVCGPKKSTNLVKNKCVNFNFNGLTGTGVLTESNKKFLPFQQFGRDIADTTDAVRDPQTLEILDITPCSFGGVSVITPGTNTSNQVAVLYQDVNCTEVPVAIHADQLTPTWRVYSTGSNVFQTRAGCLIGAEHVNNSYECDIPIGAGICASYQTQTNSPRRARSVASQSIIAYTMSLGAENSVAYSNNSIAIPTNFTISVTTEILPVSMTKTSVDCTMYICGDSTECSNLLLQYGSFCTQLNRALTGIAVEQDKNTQEVFAQVKQIYKTPPIKDFGGFNFSQILPDPSKPSKRSFIEDLLFNKVTLADAGFIKQYGDCLGDIAARDLICAQKFNGLTVLPPLLTDEMIAQYTSALLAGTITSGWTFGAGAALQIPFAMQMAYRFNGIGVTQNVLYENQKLIANQFNSAIGKIQDSLSSTASALGKLQDVVNQNAQALNTLVKQLSSNFGCISSVLNDILSRLDKVEAEVQIDCLITGRLQSLQTYVTQQLIRAAEIRASANLAATKMSECVLGQSKRVDFCGKGYHLMSFPQSAPHGVVFLHVTYVPAQEKNFTTAPAICHDGKAHFPREGVFVSNGTHWFVTQRNFYEPQIITTDNTFVSGNCDVVIGIVNNTVYDPLQPELDSGGGSGGGQIYEGKLTAEGLRFGIVASRFNHALVDRLVEGAIDAIVRHGGREEDITLVRVPGSWEIPVAAGELARKEDIDAVIAIGVLIRGATPHFDYIASEVSKGLADLSLELRKPITFGVITADTLEQAIERAGTKHGNKGWEAALSAIEMANLFKSLR

SEQ ID NO: 8451 - protein, 1307 aa, Artificial Sequence
  SARS-CoV-2/Guangdong/20SF028/2020__EPI_ISL_403936 spike protein (1-1147)(A972C_R995C) LumSynth construct
MFVFLVLLPLVSSQCVNLTTRTQLPPAYTNSFTRGVYYPDKVFRSSVLYSTQDLFLPFFSNVTWFHAIHVSGTNGTKRFDNPVLPFNDGVYFASTEKSNIIRGWIFGTTLDSKTQSLLIVNNATNVVIKVCEFQFCNDPFLGVYYHKNNKSWMESEFRVYSSANNCTFEYVSQPFLMDLEGKQGNFKNLREFVFKNIDGYFKIYSKHTPINLVRDLPQGFSALEPLVDLPIGINITRFQTLLALHRSYLTPGDSSSGWTAGAAAYYVGYLQPRTFLLKYNENGTITDAVDCALDPLSETKCTLKSFTVEKGIYQTSNFRVQPTESIVRFPNITNLCPFGEVFNATRFASVYAWNRKRISNCVADYSVLYNSASFSTFKCYGVSPTKLNDLCFTNVYADSFVIRGDEVRQIAPGQTGKIADYNYKLPDDFTGCVIAWNSNNLDSKVGGNYNYLYRLFRKSNLKPFERDISTEIYQAGSTPCNGVEGFNCYFPLQSYGFQPTNGVGYQPYRVVVLSFELLHAPATVCGPKKSTNLVKNKCVNFNFNGLTGTGVLTESNKKFLPFQQFGRDIADTTDAVRDPQTLEILDITPCSFGGVSVITPGTNTSNQVAVLYQDVNCTEVPVAIHADQLTPTWRVYSTGSNVFQTRAGCLIGAEHVNNSYECDIPIGAGICASYQTQTNSPRRARSVASQSIIAYTMSLGAENSVAYSNNSIAIPTNFTISVTTEILPVSMTKTSVDCTMYICGDSTECSNLLLQYGSFCTQLNRALTGIAVEQDKNTQEVFAQVKQIYKTPPIKDFGGFNFSQILPDPSKPSKRSFIEDLLFNKVTLADAGFIKQYGDCLGDIAARDLICAQKFNGLTVLPPLLTDEMIAQYTSALLAGTITSGWTFGAGAALQIPFAMQMAYRFNGIGVTQNVLYENQKLIANQFNSAIGKIQDSLSSTASALGKLQDVVNQNAQALNTLVKQLSSNFGCISSVLNDILSRLDKVEAEVQIDCLITGRLQSLQTYVTQQLIRAAEIRASANLAATKMSECVLGQSKRVDFCGKGYHLMSFPQSAPHGVVFLHVTYVPAQEKNFTTAPAICHDGKAHFPREGVFVSNGTHWFVTQRNFYEPQIITTDNTFVSGNCDVVIGIVNNTVYDPLQPELDSGGGSGGGQIYEGKLTAEGLRFGIVASRFNHALVDRLVEGAIDAIVRHGGREEDITLVRVPGSWEIPVAAGELARKEDIDAVIAIGVLIRGATPHFDYIASEVSKGLADLSLELRKPITFGVITADTLEQAIERAGTKHGNKGWEAALSAIEMANLFKSLR

SEQ ID NO: 8452 - protein, 1307 aa, Artificial Sequence
  SARS-CoV-2/Shenzhen/SZTH-001/2020__EPI_ISL_406592 spike protein (1-1147)(A972C_R995C) LumSynth construct
MFVFLVLLPLVSSQCVNLTTRTQLPPAYTNSFTRGVYYPDKVFRSSVLHSTQDLFLPFFSNVTWFHAIHVSGTNGTKRFDNPVLPFNDGVYFASTEKSNIIRGWIFGTTLDSKTQSLLIVNNATNVVIKVCEFQFCNDPFLGVYYHKNNKSWMESEFRVYSSANNCTFEYVSQPFLMDLEGKQGNFKNLREFVFKNIDGYFKIYSKHTPINLVRDLPQGFSALEPLVDLPIGINITRFQTLLALHRSYLTPGDSSSGWTAGAAAYYVGYLQPRTFLLKYNENGTITDAVDCALDPLSETKCTLKSFTVEKGIYQTSNFRVQPTESIVRFPNITNLCPFGEVFNATRFASVYAWNRKRISNCVADYSVLYNSASFSTFKCYGVSPTKLNDLCFTNVYADSFVIRGDEVRQIAPGQTGKIADYNYKLPDDFTGCVIAWNSNNLDSKVGGNYNYLYRLFRKSNLKPFERDISTEIYQAGSTPCNGVEGFNCYFPLQSYGFQPTNGVGYQPYRVVVLSFELLHAPATVCGPKKSTNLVKNKCVNFNFNGLTGTGVLTESNKKFLPFQQFGRDIADTTDAVRDPQTLEILDITPCSFGGVSVITPGTNTSNQVAVLYQDVNCTEVPVAIHADQLTPTWRVYSTGSNVFQTRAGCLIGAEHVNNSYECDIPIGAGICASYQTQTNSPRRARSVASQSIIAYTMSLGAENSVAYSNNSIAIPTNFTISVTTEILPVSMTKTSVDCTMYICGDSTECSNLLLQYGSFCTQLNRALTGIAVEQDKNTQEVFAQVKQIYKTPPIKDFGGFNFSQILPDPSKPSKRSFIEDLLFNKVTLADAGFIKQYGDCLGDIAARDLICAQKFNGLTVLPPLLTDEMIAQYTSALLAGTITSGWTFGAGAALQIPFAMQMAYRFNGIGVTQNVLYENQKLIANQFNSAIGKIQDSLSSTASALGKLQDVVNQNAQALNTLVKQLSSNFGCISSVLNDILSRLDKVEAEVQIDCLITGRLQSLQTYVTQQLIRAAEIRASANLAATKMSECVLGQSKRVDFCGKGYHLMSFPQSAPHGVVFLHVTYVPAQEKNFTTAPAICHDGKAHFPREGVFVSNGTHWFVTQRNFYEPQIITTDNTFVSGNCDVLIGIVNNTVYDPLQPELDSGGGSGGGQIYEGKLTAEGLRFGIVASRFNHALVDRLVEGAIDAIVRHGGREEDITLVRVPGSWEIPVAAGELARKEDIDAVIAIGVLIRGATPHFDYIASEVSKGLADLSLELRKPITFGVITADTLEQAIERAGTKHGNKGWEAALSAIEMANLFKSLR

SEQ ID NO: 8453 - protein, 1307 aa, Artificial Sequence
  SARS-CoV-2/Shenzhen/SZTH-004/2020__EPI_ISL_406595 spike protein (1-1147)(A972C_R995C) LumSynth construct
MFVFLVLLPLVSSQCVNLTTRTQLPPAYTNSFTRGVYYPDKVFRSSVLHSTQDLFLPFFSNVTWFHAIHVSGTNGTKRFDNPVLPFNDGVYFASTEKSNIIRGWIFGTTLDSKTQSLLIVNNATNVVIKVCEFQFCNDPFLGVYYHKNNKSWMESEFRVYSSANNCTFEYVSQPFLMDLEGKQGNFKNLREFVFKNIDGYFKIYSKHTPINLVRDLPQGFSALEPLVDLPIGINITRFQTLLALHRSYLTPGDSSSGWTAGAAAYYVGYLQPRTFLLKYNENGTITDAVDCALDPLSETKCTLKSFTVEKGIYQTSNFRVQPTESIVRFPNITNLCPFGEVFNATRFASVYAWDRKRISNCVAYYSVLYNSASFSTFKCYGVSPTKLNDLCFTNVYADSFVIRGDEVRQIAPGQTGKIADYNYKLPDDFTGCVIAWNSNNLDSKVGGNYNYLYRLFRKSNLKPFERDISTEIYQAGSTPCNGVEGFNCYFPLQSYGFQPTNGVGYQPYRVVVLSFELLHAPATVCGPKKSTNLVKNKCVNFNFNGLTGTGVLTESNKKFLPFQQFGRDIADTTDAVRDPQTLEILDITPCSFGGVSVITPGTNTSNQVAVLYQDVNCTEVPVAIHADQLTPTWRVYSTGSNVFQTRAGCLIGAEHVNNSYECDIPIGAGICASYQTQTNSPRRARSVASQSIIAYTMSLGAENSVAYSNNSIAIPTNFTISVTTEILPVSMTKTSVDCTMYICGDSTECSNLLLQYGSFCTQLNRALTGIAVEQDKNTQEVFAQVKQIYKTPPIKDFGGFNFSQILPDPSKPSKRSFIEDLLFNKVTLADAGFIKQYGDCLGDIAARDLICAQKFNGLTVLPPLLTDEMIAQYTSALLAGTITSGWTFGAGAALQIPFAMQMAYRFNGIGVTQNVLYENQKLIANQFNSAIGKIQDSLSSTASALGKLQDVVNQNAQALNTLVKQLSSNFGCISSVLNDILSRLDKVEAEVQIDCLITGRLQSLQTYVTQQLIRAAEIRASANLAATKMSECVLGQSKRVDFCGKGYHLMSFPQSAPHGVVFLHVTYVPAQEKNFTTAPAICHDGKAHFPREGVFVSNGTHWFVTQRNFYEPQIITTDNTFVSGNCDVVIGIVNNTVYDPLQPELDSGGGSGGGQIYEGKLTAEGLRFGIVASRFNHALVDRLVEGAIDAIVRHGGREEDITLVRVPGSWEIPVAAGELARKEDIDAVIAIGVLIRGATPHFDYIASEVSKGLADLSLELRKPITFGVITADTLEQAIERAGTKHGNKGWEAALSAIEMANLFKSLR

SEQ ID NO: 8454 - protein, 1307 aa, Artificial Sequence
  SARS-CoV-2/France/IDF0372/2020__EPI_ISL_406596 spike protein (1-1147)(A972C_R995C) LumSynth construct
MFVFLVLLPLVSSQCVNLTTRTQLPPAYTNSFTRGVYYPDKVFRSSVLHSTQDLFLPFFSNVTWFHAIHVSGTNGTKRFDNPVLPFNDGVYFASTEKSNIIRGWIFGTTLDSKTQSLLIVNNATNVVIKVCEFQFCNDPFLGVYYHKNNKSWMESEFRVYSSANNCTFEYVSQPFLMDLEGKQGNFKNLREFVFKNIDGYFKIYSKHTPINLVRDLPQGFSALEPLVDLPIGINITRFQTLLALHRSYLTPGDSSSGWTAGAAAYYVGYLQPRTFLLKYNENGTITDAVDCALDPLSETKCTLKSFTVEKGIYQTSNFRVQPTESIVRFPNITNLCPFGEVFNATRFASVYAWNRKRISNCVADYSFLYNSASFSTFKCYGVSPTKLNDLCFTNVYADSFVIRGDEVRQIAPGQTGKIADYNYKLPDDFTGCVIAWNSNNLDSKVGGNYNYLYRLFRKSNLKPFERDISTEIYQAGSTPCNGVEGFNCYFPLQSYGFQPTNGVGYQPYRVVVLSFELLHAPATVCGPKKSTNLVKNKCVNFNFNGLTGTGVLTESNKKFLPFQQFGRDIADTTDAVRDPQTLEILDITPCSFGGVSVITPGTNTSNQVAVLYQDVNCTEVPVAIHADQLTPTWRVYSTGSNVFQTRAGCLIGAEHVNNSYECDIPIGAGICASYQTQTNSPRRARSVASQSIIAYTMSLGAENSVAYSNNSIAIPTNFTISVTTEILPVSMTKTSVDCTMYICGDSTECSNLLLQYGSFCTQLNRALTGIAVEQDKNTQEVFAQVKQIYKTPPIKDFGGFNFSQILPDPSKPSKRSFIEDLLFNKVTLADAGFIKQYGDCLGDIAARDLICAQKFNGLTVLPPLLTDEMIAQYTSALLAGTITSGWTFGAGAALQIPFAMQMAYRFNGIGVTQNVLYENQKLIANQFNSAIGKIQDSLSSTASALGKLQDVVNQNAQALNTLVKQLSSNFGCISSVLNDILSRLDKVEAEVQIDCLITGRLQSLQTYVTQQLIRAAEIRASANLAATKMSECVLGQSKRVDFCGKGYHLMSFPQSAPHGVVFLHVTYVPAQEKNFTTAPAICHDGKAHFPREGVFVSNGTHWFVTQRNFYEPQIITTDNTFVSGNCDVVIGIVNNTVYDPLQPELDSGGGSGGGQIYEGKLTAEGLRFGIVASRFNHALVDRLVEGAIDAIVRHGGREEDITLVRVPGSWEIPVAAGELARKEDIDAVIAIGVLIRGATPHFDYIASEVSKGLADLSLELRKPITFGVITADTLEQAIERAGTKHGNKGWEAALSAIEMANLFKSLR

SEQ ID NO: 8455 - protein, 1307 aa, Artificial Sequence
  SARS-CoV-2/Australia/VIC01/2020__EPI_ISL_406844 spike protein (1-1147)(A972C_R995C) LumSynth construct
MFVFLVLLPLVSSQCVNLTTRTQLPPAYTNSFTRGVYYPDKVFRSSVLHSTQDLFLPFFSNVTWFHAIHVSGTNGTKRFDNPVLPFNDGVYFASTEKSNIIRGWIFGTTLDSKTQSLLIVNNATNVVIKVCEFQFCNDPFLGVYYHKNNKSWMESEFRVYSSANNCTFEYVSQPFLMDLEGKQGNFKNLREFVFKNIDGYFKIYSKHTPINLVRDLPQGFSALEPLVDLPIGINITRFQTLLALHRRYLTPGDSSSGWTAGAAAYYVGYLQPRTFLLKYNENGTITDAVDCALDPLSETKCTLKSFTVEKGIYQTSNFRVQPTESIVRFPNITNLCPFGEVFNATRFASVYAWNRKRISNCVADYSVLYNSASFSTFKCYGVSPTKLNDLCFTNVYADSFVIRGDEVRQIAPGQTGKIADYNYKLPDDFTGCVIAWNSNNLDSKVGGNYNYLYRLFRKSNLKPFERDISTEIYQAGSTPCNGVEGFNCYFPLQSYGFQPTNGVGYQPYRVVVLSFELLHAPATVCGPKKSTNLVKNKCVNFNFNGLTGTGVLTESNKKFLPFQQFGRDIADTTDAVRDPQTLEILDITPCSFGGVSVITPGTNTSNQVAVLYQDVNCTEVPVAIHADQLTPTWRVYSTGSNVFQTRAGCLIGAEHVNNSYECDIPIGAGICASYQTQTNSPRRARSVASQSIIAYTMSLGAENSVAYSNNSIAIPTNFTISVTTEILPVSMTKTSVDCTMYICGDSTECSNLLLQYGSFCTQLNRALTGIAVEQDKNTQEVFAQVKQIYKTPPIKDFGGFNFSQILPDPSKPSKRSFIEDLLFNKVTLADAGFIKQYGDCLGDIAARDLICAQKFNGLTVLPPLLTDEMIAQYTSALLAGTITSGWTFGAGAALQIPFAMQMAYRFNGIGVTQNVLYENQKLIANQFNSAIGKIQDSLSSTASALGKLQDVVNQNAQALNTLVKQLSSNFGCISSVLNDILSRLDKVEAEVQIDCLITGRLQSLQTYVTQQLIRAAEIRASANLAATKMSECVLGQSKRVDFCGKGYHLMSFPQSAPHGVVFLHVTYVPAQEKNFTTAPAICHDGKAHFPREGVFVSNGTHWFVTQRNFYEPQIITTDNTFVSGNCDVVIGIVNNTVYDPLQPELDSGGGSGGGQIYEGKLTAEGLRFGIVASRFNHALVDRLVEGAIDAIVRHGGREEDITLVRVPGSWEIPVAAGELARKEDIDAVIAIGVLIRGATPHFDYIASEVSKGLADLSLELRKPITFGVITADTLEQAIERAGTKHGNKGWEAALSAIEMANLFKSLR

SEQ ID NO: 8456 - protein, 1307 aa, Artificial Sequence
  SARS-CoV-2/Germany/BavPat1/2020__EPI_ISL_406862 spike protein (1-1147)(A972C_R995C) LumSynth construct
MFVFLVLLPLVSSQCVNLTTRTQLPPAYTNSFTRGVYYPDKVFRSSVLHSTQDLFLPFFSNVTWFHAIHVSGTNGTKRFDNPVLPFNDGVYFASTEKSNIIRGWIFGTTLDSKTQSLLIVNNATNVVIKVCEFQFCNDPFLGVYYHKNNKSWMESEFRVYSSANNCTFEYVSQPFLMDLEGKQGNFKNLREFVFKNIDGYFKIYSKHTPINLVRDLPQGFSALEPLVDLPIGINITRFQTLLALHRSYLTPGDSSSGWTAGAAAYYVGYLQPRTFLLKYNENGTITDAVDCALDPLSETKCTLKSFTVEKGIYQTSNFRVQPTESIVRFPNITNLCPFGEVFNATRFASVYAWNRKRISNCVADYSVLYNSASFSTFKCYGVSPTKLNDLCFTNVYADSFVIRGDEVRQIAPGQTGKIADYNYKLPDDFTGCVIAWNSNNLDSKVGGNYNYLYRLFRKSNLKPFERDISTEIYQAGSTPCNGVEGFNCYFPLQSYGFQPTNGVGYQPYRVVVLSFELLHAPATVCGPKKSTNLVKNKCVNFNFNGLTGTGVLTESNKKFLPFQQFGRDIADTTDAVRDPQTLEILDITPCSFGGVSVITPGTNTSNQVAVLYQGVNCTEVPVAIHADQLTPTWRVYSTGSNVFQTRAGCLIGAEHVNNSYECDIPIGAGICASYQTQTNSPRRARSVASQSIIAYTMSLGAENSVAYSNNSIAIPTNFTISVTTEILPVSMTKTSVDCTMYICGDSTECSNLLLQYGSFCTQLNRALTGIAVEQDKNTQEVFAQVKQIYKTPPIKDFGGFNFSQILPDPSKPSKRSFIEDLLFNKVTLADAGFIKQYGDCLGDIAARDLICAQKFNGLTVLPPLLTDEMIAQYTSALLAGTITSGWTFGAGAALQIPFAMQMAYRFNGIGVTQNVLYENQKLIANQFNSAIGKIQDSLSSTASALGKLQDVVNQNAQALNTLVKQLSSNFGCISSVLNDILSRLDKVEAEVQIDCLITGRLQSLQTYVTQQLIRAAEIRASANLAATKMSECVLGQSKRVDFCGKGYHLMSFPQSAPHGVVFLHVTYVPAQEKNFTTAPAICHDGKAHFPREGVFVSNGTHWFVTQRNFYEPQIITTDNTFVSGNCDVVIGIVNNTVYDPLQPELDSGGGSGGGQIYEGKLTAEGLRFGIVASRFNHALVDRLVEGAIDAIVRHGGREEDITLVRVPGSWEIPVAAGELARKEDIDAVIAIGVLIRGATPHFDYIASEVSKGLADLSLELRKPITFGVITADTLEQAIERAGTKHGNKGWEAALSAIEMANLFKSLR

SEQ ID NO: 8457 - protein, 1307 aa, Artificial Sequence
  SARS-CoV-2/Wuhan/HBCDC-HB-02/2020__EPI_ISL_412978 spike protein (1-1147)(A972C_R995C) LumSynth construct
MFVFLVLLPLVSSQCVNLTTRTQLPPAYTNSFTRGVYYPDKVFRSSVLHSTQDLFLPFFSNVTWFHAIHVSGTNGTKRFDNPVLPFNDGVYFASTEKSNIIRGWIFGTTLDSKTQSLLIVNNATNVVIKVCEFQFCNDPFLGVYYHKNNKSWMESEFRVYSSANNCTFEYVSQPFLMDLEGKQGNFKNLREFVFKNIDGYFKIYSKHTPINLVRDLPQGFSALEPLVDLPIGINITRFQTLLALHRSYLTPGDSSSGWTAGAAAYYVGYLQPRTFLLKYNENGTITDAVDCALDPLSETKCTLKSFTVEKGIYQTSNFRVQPTESIVRFPNITNLCPFGEVFNATRFASVYAWNRKRISNCVADYSVLYNSASFSTFKCYGVSPTKLNDLCFTNVYADSFVIRGDEVRQIAPGQTGKIADYNYKLPDDFTGCVIAWNSNNLDSKVGGNYNYLYRLFRKSNLKPFERDISTEIYQAGSTPCNGVEGFNCYFPLQSYGFQPTNGVGYQPYRVVVLSFELLHAPATVCGPKKSTNLVKNKCVNFNFNGLTGTGVLTESNKKFLPFQQFGRDIADTTDAVRDPQTLEILDITPCSFGGVSVITPGTNTSNQVAVLYQDVNCTEVPVAIHADQLTPTWRVYSTGSNVFQTRAGCLIGAEHVNNSYECDIPIGAGICASYQTQTNSPRRARSVASQSIIAYTMSLGAENSVAYSNNSIAIPTNFTISVTTEILPVSMTKTSVDCTMYICGDSTECSNFLLQYGSFCTQLNRALTGIAVEQDKNTQEVFAQVKQIYKTPPIKDFGGFNFSQILPDPSKPSKRSFIEDLLFNKVTLADAGFIKQYGDCLGDIAARDLICAQKFNGLTVLPPLLTDEMIAQYTSALLAGTITSGWTFGAGAALQIPFAMQMAYRFNGIGVTQNVLYENQKLIANQFNSAIGKIQDSLSSTASALGKLQDVVNQNAQALNTLVKQLSSNFGCISSVLNDILSRLDKVEAEVQIDCLITGRLQSLQTYVTQQLIRAAEIRASANLAATKMSECVLGQSKRVDFCGKGYHLMSFPQSAPHGVVFLHVTYVPAQEKNFTTAPAICHDGKAHFPREGVFVSNGTHWFVTQRNFYEPQIITTDNTFVSGNCDVVIGIVNNTVYDPLQPELDSGGGSGGGQIYEGKLTAEGLRFGIVASRFNHALVDRLVEGAIDAIVRHGGREEDITLVRVPGSWEIPVAAGELARKEDIDAVIAIGVLIRGATPHFDYIASEVSKGLADLSLELRKPITFGVITADTLEQAIERAGTKHGNKGWEAALSAIEMANLFKSLR

SEQ ID NO: 8458 - protein, 1307 aa, Artificial Sequence
  SARS-CoV-2/Australia/QLD02/2020__EPI_ISL_407896 spike protein (1-1147)(A972C_R995C) LumSynth construct
MFVFLVLLPLVSSQCVNLTTRTQLPPAYTNSFTRGVYYPDKVFRSSVLHSTQDLFLPFFSNVTWFHAIHVSGTNGTKRFDNPVLPFNDGVYFASTEKSNIIRGWIFGTTLDSKTQSLLIVNNATNVVIKVCEFQFCNDPFLGVYYHKNNKSWMESEFRVYSSANNCTFEYVSQPFLMDLEGKQGNFKNLREFVFKNIDGYFKIYSKHTPINLVRDLPQGFSALEPLVDLPIGINITRFQTLLALHRSYLTPGDSSSGWTAGAAAYYVGYLQPRTFLLKYNENGTITDAVDCALDPLSETKCTLKSFTVEKGIYQTSNFRVQPTESIVRFPNITNLCPFGEVFNATRFASVYAWNRKRISNCVADYSVLYNSASFSTFKCYGVSPTKLNDLCFTNVYADSFVIRGDEVRQIAPGQTGKIADYNYKLPDDFTGCVIAWNSNNLDSKVGGNYNYLYRLFRKSNLKPFERDISTEIYQAGSTPCNGVEGFNCYFPLQSYGFQPTNGVGYQPYRVVVLSFELLHAPATVCGPKKSTNLVKNKCVNFNFNGLTGTGVLTESNKKFLPFQQFGRDIADTTDAVRDPQTLEILDITPCSFGGVSVITPGTNTSNQVAVLYQDVNCTEVPVAIHADQLTPTWRVYSTGSNVFQTRAGCLIGAEHVNNSYECDIPIGAGICASYQTQTNSPRRARSVASQSIIAYTMSLGAENSVAYSNNSIAIPTNFTISVTTEILPVSMTKTSVDCTMYICGDSTECSNLLLQYGSFCTQLNRALTGIAVEQDKNTQEVFAQVKQIYKTPPIKDFGGFNFSQILPDPSKPSKRSFIEDLLFNKVTLADAGFIKQYGDCLGDIAARDLICAQKFNGLTVLPPLLTDEMIAQYTSALLAGTITSGWTFGAGAALQIPFAMQMAYRFNGIGVTQNVLYENQKLIANQFNSAIGKIQDSLSSTASALGKLQDVVNQNAQALNTLVKQLSSNFGCISSVLNDILSRLDKVEAEVQIDCLITGRLQSLQTYVTQQLIRAAEIRASANLAATKMSECVLGQSKRVDFCGKGYHLMSFPQSAPHGVVFLHVTYVPAQEKNFTTAPAICHDGKAHFPREGVFVSNGTHWFVTQRNFYEPQIITTDNTFVSGNCDVVIGIVNNTVYDPLQLELDSGGGSGGGQIYEGKLTAEGLRFGIVASRFNHALVDRLVEGAIDAIVRHGGREEDITLVRVPGSWEIPVAAGELARKEDIDAVIAIGVLIRGATPHFDYIASEVSKGLADLSLELRKPITFGVITADTLEQAIERAGTKHGNKGWEAALSAIEMANLFKSLR

SEQ ID NO: 8459 - protein, 1307 aa, Artificial Sequence
  SARS-CoV-2/India/1-31/2020__EPI_ISL_413523 spike protein (1-1147)(A972C_R995C) LumSynth construct
MFVFLVLLPLVSSQCVNLTTRTQLPPAYTNSFTRGVYYPDKVFRSSVLHSTQDLFLPFFSNVTWFHAIHVSGTNGTKRFDNPVLPFNDGVYFASTEKSNIIRGWIFGTTLDSKTQSLLIVNNATNVVIKVCEFQFCNDPFLGVYYHKNNKSWMESEFRVYSSANNCTFEYVSQPFLMDLEGKQGNFKNLREFVFKNIDGYFKIYSKHTPINLVRDLPQGFSALEPLVDLPIGINITRFQTLLALHRSYLTPGDSSSGWTAGAAAYYVGYLQPRTFLLKYNENGTITDAVDCALDPLSETKCTLKSFTVEKGIYQTSNFRVQPTESIVRFPNITNLCPFGEVFNATRFASVYAWNRKRISNCVADYSVLYNSASFSTFKCYGVSPTKLNDLCFTNVYADSFVIRGDEVRQIAPGQTGKIADYNYKLPDDFTGCVIAWNSNNLDSKVGGNYNYLYRLFRKSNLKPFERDISTEIYQAGSTPCNGVEGFNCYFPLQSYGFQPTNGVGYQPYRVVVLSFELLHAPATVCGPKKSTNLVKNKCVNFNFNGLTGTGVLTESNKKFLPFQQFGRDIADTTDAVRDPQTLEILDITPCSFGGVSVITPGTNTSNQVAVLYQDVNCTEVPVAIHADQLTPTWRVYSTGSNVFQTRAGCLIGAEHVNNSYECDIPIGAGICASYQTQTNSPRRARSVASQSIIAYTMSLGAENSVAYSNNSIAIPTNFTISVTTEILPVSMTKTSVDCTMYICGDSTECSNLLLQYGSFCTQLNRALTGIAVEQDKNTQEVFAQVKQIYKTPPIKDFGGFNFSQILPDPSKPSKRSFIEDLLFNKVTLADAGFIKQYGDCLGDIAARDLICAQKFNGLTVLPPLLTDEMIAQYTSALLAGTITSGWTFGAGAALQIPFAMQMAYRFNGIGVTQNVLYENQKLIANQFNSVIGKIQDSLSSTASALGKLQDVVNQNAQALNTLVKQLSSNFGCISSVLNDILSRLDKVEAEVQIDCLITGRLQSLQTYVTQQLIRAAEIRASANLAATKMSECVLGQSKRVDFCGKGYHLMSFPQSAPHGVVFLHVTYVPAQEKNFTTAPAICHDGKAHFPREGVFVSNGTHWFVTQRNFYEPQIITTDNTFVSGNCDVVIGIVNNTVYDPLQPELDSGGGSGGGQIYEGKLTAEGLRFGIVASRFNHALVDRLVEGAIDAIVRHGGREEDITLVRVPGSWEIPVAAGELARKEDIDAVIAIGVLIRGATPHFDYIASEVSKGLADLSLELRKPITFGVITADTLEQAIERAGTKHGNKGWEAALSAIEMANLFKSLR

SEQ ID NO: 8460 - protein, 1307 aa, Artificial Sequence
  SARS-CoV-2/Guangdong/GD2020087-P0008/2020__EPI_ISL_413863 spike protein (1-1147)(A972C_R995C) LumSynth construct
MFVFLVLLPLVSSQCVNLTTRTQLPPAYTNSFTRGVYYPDKVFRSSVLHSTQDLFLPFFSNVTWFHAIHVSGTNGTKRFDNPVLPFNDGVYFASTEKSNIIRGWIFGTTLDSKTQSLLIVNNATNVVIKVCEFQFCNDPFLGVYYHKNNKSWMESEFRVYSSANNCTFEYVSQPFLMDLEGKQGNFKNLREFVFKNIDGYFKIYSKHTPINLVRDLPQGFSALEPLVDLPIGINITRFQTLLALHRSYLTPGDSSSGWTAGAAAYYVGYLQPRTFLLKYNENGTITDAVDCALDPLSETKCTLKSFTVEKGIYQTSNFRVQPTESIVRFPNITNLCPFGEVFNATRFASVYAWNRKRISNCVADYSVLYNSASFSTFKCYGVSPTKLNDLCFTNVYADSFVIRGDEVREIAPGQTGKIADYNYKLPDDFTGCVIAWNSNNLDSKVGGNYNYLYRLFRKSNLKPFERDISTEIYQAGSTPCNGVEGFNCYFPLQSYGFQPTNGVGYQPYRVVVLSFELLHAPATVCGPKKSTNLVKNKCVNFNFNGLTGTGVLTESNKKFLPFQQFGRDIADTTDAVRDPQTLEILDITPCSFGGVSVITPGTNTSNQVAVLYQDVNCTEVPVAIHADQLTPTWRVYSTGSNVFQTRAGCLIGAEHVNNSYECDIPIGAGICASYQTQTNSPRRARSVASQSIIAYTMSLGAENSVAYSNNSIAIPTNFTISVTTEILPVSMTKTSVDCTMYICGDSTECSNLLLQYGSFCTQLNRALTGIAVEQDKNTQEVFAQVKQIYKTPPIKDFGGFNFSQILPDPSKPSKRSFIEDLLFNKVTLADAGFIKQYGDCLGDIAARDLICAQKFNGLTVLPPLLTDEMIAQYTSALLAGTITSGWTFGAGAALQIPFAMQMAYRFNGIGVTQNVLYENQKLIANQFNSAIGKIQDSLSSTASALGKLQDVVNQNAQALNTLVKQLSSNFGCISSVLNDILSRLDKVEAEVQIDCLITGRLQSLQTYVTQQLIRAAEIRASANLAATKMSECVLGQSKRVDFCGKGYHLMSFPQSAPHGVVFLHVTYVPAQEKNFTTAPAICHDGKAHFPREGVFVSNGTHWFVTQRNFYEPQIITTDNTFVSGNCDVVIGIVNNTVYDPLQPELDSGGGSGGGQIYEGKLTAEGLRFGIVASRFNHALVDRLVEGAIDAIVRHGGREEDITLVRVPGSWEIPVAAGELARKEDIDAVIAIGVLIRGATPHFDYIASEVSKGLADLSLELRKPITFGVITADTLEQAIERAGTKHGNKGWEAALSAIEMANLFKSLR

SEQ ID NO: 8461 - protein, 1307 aa, Artificial Sequence
  SARS-CoV-2/Sweden/01/2020__EPI_ISL_411951 spike protein (1-1147)(A972C_R995C) LumSynth construct
MFVFLVLLPLVSSQCVNLTTRTQLPPAYTNSFTRGVYYPDKVFRSSVLHSTQDLFLPFFSNVTWFHAIHVSGTNGTKRFDNPVLPFNDGVYFASTEKSNIIRGWIFGTTLDSKTQSLLIVNNATNVVIKVCEFQFCNDPFLGVYYHKNNKSWMESEFRVYSSANNCTFEYVSQPFLMDLEGKQGNFKNLREFVFKNIDGYFKIYSKHTPINLVRDLPQGFSALEPLVDLPIGINITRFQTLLALHRSYLTPGDSSSGWTAGAAAYYVGYLQPRTFLLKYNENGTITDAVDCALDPLSETKCTLKSFTVEKGIYQTSNFRVQPTESIVRFPNITNLCPFGEVFNATRFASVYAWNRKRISNCVADYSVLYNSASFSTFKCYGVSPTKLNDLCFTNVYADSFVIRGDEVRQIAPGQTGKIADYNYKLPDDFTGCVIAWNSNNLDSKVGGNYNYLYRLFRKSNLKPFERDISTEIYQAGSTPCNGVEGFNCYFPLQSYGFQPTNGVGYQPYRVVVLSFELLHAPATVCGPKKSTNLVKNKCVNFNFNGLTGTGVLTESNKKFLPFQQFGRDIADTTDAVRDPQTLEILDITPCSFGGVSVITPGTNTSNQVAVLYQDVNCTEVPVAIHADQLTPTWRVYSTGSNVFQTRAGCLIGAEHVNNSYECDIPIGAGICASYQTQTNSPRRARSVASQSIIAYTMSLGAENSVAYSNNSIAIPTNFTISVTTEILPVSMTKTSVDCTMYICGDSTECSNLLLQYGSFCTQLNRALTGIAVEQDKNTQEVFAQVKQIYKTPPIKDCGGFNFSQILPDPSKPSKRSFIEDLLFNKVTLADAGFIKQYGDCLGDIAARDLICAQKFNGLTVLPPLLTDEMIAQYTSALLAGTITSGWTFGAGAALQIPFAMQMAYRFNGIGVTQNVLYENQKLIANQFNSAIGKIQDSLSSTASALGKLQDVVNQNAQALNTLVKQLSSNFGCISSVLNDILSRLDKVEAEVQIDCLITGRLQSLQTYVTQQLIRAAEIRASANLAATKMSECVLGQSKRVDFCGKGYHLMSFPQSAPHGVVFLHVTYVPAQEKNFTTAPAICHDGKAHFPREGVFVSNGTHWFVTQRNFYEPQIITTDNTFVSGNCDVVIGIVNNTVYDPLQPELDSGGGSGGGQIYEGKLTAEGLRFGIVASRFNHALVDRLVEGAIDAIVRHGGREEDITLVRVPGSWEIPVAAGELARKEDIDAVIAIGVLIRGATPHFDYIASEVSKGLADLSLELRKPITFGVITADTLEQAIERAGTKHGNKGWEAALSAIEMANLFKSLR

SEQ ID NO: 8462 - protein, 1307 aa, Artificial Sequence
  SARS-CoV-2/Tianmen/HBCDC-HB-07/2020__EPI_ISL_412983 spike protein (1-1147)(A972C_R995C) LumSynth construct
MFVFLVLLPLVSSQCVNLTTRTQLPPAYTNSFTRGVYYPDKVFRSSVLHSTQDLFLPFFSNVTWFHAIHVSGTNGTKRFDNPVLPFNDGVYFASTEKSNIIRGWIFGTTLDSKTQSLLIVNNATNVVIKVCEFQFCNDPFLGVYYHKNNKSWMESEFRVYSSANNCTFEYVSQPFLMDLEGKQGNFKNLREFVFKNIDGYFKIYSKHTPINLVRDLPQGFSALEPLVDLPIGINITRFQTLLALHRSYLTPGDSSSGWTAGAAAYYVGYLQPRTFLLKYNENGTITDAVDCALDPLSETKCTLKSFTVEKGIYQTSNFRVQPTESIVRFPNITNLCPFGEVFNATRFASVYAWNRKRISNCVADYSVLYNSASFSTFKCYGVSPTKLNDLCFTNVYADSFVIRGDEVRQIAPGQTGKIADYNYKLPDDFTGCVIAWNSNNLDSKVGGNYNYLYRLFRKSNLKPFERDISTEIYQAGSTPCNGVEGFNCYFPLQSYGFQPTNGVGYQPYRVVVLSFELLHAPATVCGPKKSTNLVKNKCVNFNFNGLTGTGVLTESNKKFLPFQQFGRDIADTTDAVRDPQTLEILDITPCSFGGVSVITPGTNTSNQVAVLYQDLNCTEVPVAIHADQLTPTWRVYSTGSNVFQTRAGCLIGAEHVNNSYECDIPIGAGICASYQTQTNSPRRARSVASQSIIAYTMSLGAENSVAYSNNSIAIPTNFTISVTTEILPVSMTKTSVDCTMYICGDSTECSNLLLQYGSFCTQLNRALTGIAVEQDKNTQEVFAQVKQIYKTPPIKDFGGFNFSQILPDPSKPSKRSFIEDLLFNKVTLADAGFIKQYGDCLGDIAARDLICAQKFNGLTVLPPLLTDEMIAQYTSALLAGTITSGWTFGAGAALQIPFAMQMAYRFNGIGVTQNVLYENQKLIANQFNSAIGKIQDSLSSTASALGKLQDVVNQNAQALNTLVKQLSSNFGCISSVLNDILSRLDKVEAEVQIDCLITGRLQSLQTYVTQQLIRAAEIRASANLAATKMSECVLGQSKRVDFCGKGYHLMSFPQSAPHGVVFLHVTYVPAQEKNFTTAPAICHDGKAHFPREGVFVSNGTHWFVTQRNFYEPQIITTDNTFVSGNCDVVIGIVNNTVYDPLQPELDSGGGSGGGQIYEGKLTAEGLRFGIVASRFNHALVDRLVEGAIDAIVRHGGREEDITLVRVPGSWEIPVAAGELARKEDIDAVIAIGVLIRGATPHFDYIASEVSKGLADLSLELRKPITFGVITADTLEQAIERAGTKHGNKGWEAALSAIEMANLFKSLR

SEQ ID NO: 8463 - protein, 1307 aa, Artificial Sequence
  SARS-CoV-2/Hong Kong/case42_VM20002493/2020__EPI_ISL_414527 spike protein (1-1147)(A972C_R995C) LumSynth construct
MFVFLVLLPLVSSQCVNLTTRTQLPPAYTNSFTRGVYYPDKVFRSSVLHSTQDLFLPFFSNVTWFHAIHVSGTNGTKRFDNPVLPFNDGVYFASTEKSNIIRGWIFGTTLDSKTQSLLIVNNATNVVIKVCEFQFCNDPFLGVYYHKNNKSWMESEFRVYSSANNCTFEYVSQPFLMDLEGKQGNFKNLREFVFKNIDGYFKIYSKHTPINLVRDLPQGFSALEPLVDLPIGINITRFQTLLALHRSYLTPGDSSSGWTAGAAAYYVGYLQPRTFLLKYNENGTITDAVDCALDPLSETKCTLKSFTVEKGIYQTSNFRVQPTESIVRFPNITNLCPFGEVFNATRFASVYAWNRKRISNCVADYSVLYNSASFSTFKCYGVSPTKLNDLCFTNVYADSFVIRGDEVRQIAPGQTGKIADYNYKLPDDFTGCVIAWNSNNLDSKVGGNYNYLYRLFRKSNLKPFERDISTEIYQAGSTPCNGVEGFNCYFPLQSYGFQPTNGVGYQPYRVVVLSFELLHAPATVCGPKKSTNLVKNKCVNFNFNGLTGTGVLTESNKKFLPFQQFGRDIADTTDAVRDPQTLEILDITPCSFGGVSVITPGTNTSNQVAVLYQDVNCTEVPVAIHADQLTPTWRVYSTGSNVFQTRAGCLIGAEHVNNSYECDIPIGAGICASYQTQTNSPRRARSVASQSIIAYTMSLGAENSVAYSNNSIAIPTNFAISVTTEILPVSMTKTSVDCTMYICGDSTECSNLLLQYGSFCTQLNRALTGIAVEQDKNTQEVFAQVKQIYKTPPIKDFGGFNFSQILPDPSKPSKRSFIEDLLFNKVTLADAGFIKQYGDCLGDIAARDLICAQKFNGLTVLPPLLTDEMIAQYTSALLAGTITSGWTFGAGAALQIPFAMQMAYRFNGIGVTQNVLYENQKLIANQFNSAIGKIQDSLSSTASALGKLQDVVNQNAQALNTLVKQLSSNFGCISSVLNDILSRLDKVEAEVQIDCLITGRLQSLQTYVTQQLIRAAEIRASANLAATKMSECVLGQSKRVDFCGKGYHLMSFPQSAPHGVVFLHVTYVPAQEKNFTTAPAICHDGKAHFPREGVFVSNGTHWFVTQRNFYEPQIITTDNTFVSGNCDVVIGIVNNTVYDPLQPELDSGGGSGGGQIYEGKLTAEGLRFGIVASRFNHALVDRLVEGAIDAIVRHGGREEDITLVRVPGSWEIPVAAGELARKEDIDAVIAIGVLIRGATPHFDYIASEVSKGLADLSLELRKPITFGVITADTLEQAIERAGTKHGNKGWEAALSAIEMANLFKSLR

SEQ ID NO: 8464 - protein, 1307 aa, Artificial Sequence
  SARS-CoV-2/USA/CruiseA-23/2020__EPI_ISL_414482 spike protein (1-1147)(A972C_R995C) LumSynth construct
MFVFLVLLPLVSSQCVNLTTRTQLPPAYTNSFTRGVYYPDKVFRSSVLHSTQDLFLPFFSNVTWFHAIHVSGTNGTKRFDNPVLPFNDGVYFASTEKSNIIRGWIFGTTLDSKTQSLLIVNNATNVVIKVCEFQFCNDPFLGVYYHKNNKSWMESEFRVYSSANNCTFEYVSQPFLMDLEVKQGNFKNLREFVFKNIDGYFKIYSKHTPINLVRDLPQGFSALEPLVDLPIGINITRFQTLLALHRSYLTPGDSSSGWTAGAAAYYVGYLQPRTFLLKYNENGTITDAVDCALDPLSETKCTLKSFTVEKGIYQTSNFRVQPTESIVRFPNITNLCPFGEVFNATRFASVYAWNRKRISNCVADYSVLYNSASFSTFKCYGVSPTKLNDLCFTNVYADSFVIRGDEVRQIAPGQTGKIADYNYKLPDDFTGCVIAWNSNNLDSKVGGNYNYLYRLFRKSNLKPFERDISTEIYQAGSTPCNGVEGFNCYFPLQSYGFQPTNGVGYQPYRVVVLSFELLHAPATVCGPKKSTNLVKNKCVNFNFNGLTGTGVLTESNKKFLPFQQFGRDIADTTDAVRDPQTLEILDITPCSFGGVSVITPGTNTSNQVAVLYQDVNCTEVPVAIHADQLTPTWRVYSTGSNVFQTRAGCLIGAEHVNNSYECDIPIGAGICASYQTQTNSPRRARSVASQSIIAYTMSLGAENSVAYSNNSIAIPTNFTISVTTEILPVSMTKTSVDCTMYICGDSTECSNLLLQYGSFCTQLNRALTGIAVEQDKNTQEVFAQVKQIYKTPPIKDFGGFNFSQILPDPSKPSKRSFIEDLLFNKVTLADAGFIKQYGDCLGDIAARDLICAQKFNGLTVLPPLLTDEMIAQYTSALLAGTITSGWTFGAGAALQIPFAMQMAYRFNGIGVTQNVLYENQKLIANQFNSAIGKIQDSLSSTASALGKLQDVVNQNAQALNTLVKQLSSNFGCISSVLNDILSRLDKVEAEVQIDCLITGRLQSLQTYVTQQLIRAAEIRASANLAATKMSECVLGQSKRVDFCGKGYHLMSFPQSAPHGVVFLHVTYVPAQEKNFTTAPAICHDGKAHFPREGVFVSNGTHWFVTQRNFYEPQIITTDNTFVSGNCDVVIGIVNNTVYDPLQPELDSGGGSGGGQIYEGKLTAEGLRFGIVASRFNHALVDRLVEGAIDAIVRHGGREEDITLVRVPGSWEIPVAAGELARKEDIDAVIAIGVLIRGATPHFDYIASEVSKGLADLSLELRKPITFGVITADTLEQAIERAGTKHGNKGWEAALSAIEMANLFKSLR

SEQ ID NO: 8465 - protein, 1307 aa, Artificial Sequence
  SARS-CoV-2/Hong Kong/case85_VM20002868/2020__EPI_ISL_414519 spike protein (1-1147)(A972C_R995C) LumSynth construct
MFVFLVLVPLVSSQCVNLTTRTQLPPAYTNSFTRGVYYPDKVFRSSVLHSTQDLFLPFFSNVTWFHAIHVSGTNGTKRFDNPVLPFNDGVYFASTEKSNIIRGWIFGTTLDSKTQSLLIVNNATNVVIKVCEFQFCNDPFLGVYYHKNNKSWMESEFRVYSSANNCTFEYVSQPFLMDLEGKQGNFKNLREFVFKNIDGYFKIYSKHTPINLVRDLPQGFSALEPLVDLPIGINITRFQTLLALHRSYLTPGDSSSGWTAGAAAYYVGYLQPRTFLLKYNENGTITDAVDCALDPLSETKCTLKSFTVEKGIYQTSNFRVQPTESIVRFPNITNLCPFGEVFNATRFASVYAWNRKRISNCVADYSVLYNSASFSTFKCYGVSPTKLNDLCFTNVYADSFVIRGDEVRQIAPGQTGKIADYNYKLPDDFTGCVIAWNSNNLDSKVGGNYNYLYRLFRKSNLKPFERDISTEIYQAGSTPCNGVEGFNCYFPLQSYGFQPTNGVGYQPYRVVVLSFELLHAPATVCGPKKSTNLVKNKCVNFNFNGLTGTGVLTESNKKFLPFQQFGRDIADTTDAVRDPQTLEILDITPCSFGGVSVITPGTNTSNQVAVLYQDVNCTEVPVAIHADQLTPTWRVYSTGSNVFQTRAGCLIGAEHVNNSYECDIPIGAGICASYQTQTNSPRRARSVASQSIIAYTMSLGAENSVAYSNNSIAIPTNFTISVTTEILPVSMTKTSVDCTMYICGDSTECSNLLLQYGSFCTQLNRALTGIAVEQDKNTQEVFAQVKQIYKTPPIKDFGGFNFSQILPDPSKPSKRSFIEDLLFNKVTLADAGFIKQYGDCLGDIAARDLICAQKFNGLTVLPPLLTDEMIAQYTSALLAGTITSGWTFGAGAALQIPFAMQMAYRFNGIGVTQNVLYENQKLIANQFNSAIGKIQDSLSSTASALGKLQDVVNQNAQALNTLVKQLSSNFGCISSVLNDILSRLDKVEAEVQIDCLITGRLQSLQTYVTQQLIRAAEIRASANLAATKMSECVLGQSKRVDFCGKGYHLMSFPQSAPHGVVFLHVTYVPAQEKNFTTAPAICHDGKAHFPREGVFVSNGTHWFVTQRNFYEPQIITTDNTFVSGNCDVVIGIVNNTVYDPLQPELDSGGGSGGGQIYEGKLTAEGLRFGIVASRFNHALVDRLVEGAIDAIVRHGGREEDITLVRVPGSWEIPVAAGELARKEDIDAVIAIGVLIRGATPHFDYIASEVSKGLADLSLELRKPITFGVITADTLEQAIERAGTKHGNKGWEAALSAIEMANLFKSLR

SEQ ID NO: 8466 - protein, 1307 aa, Artificial Sequence; identical to SEQ ID NO: 8456
  SARS-CoV-2/England/200990660/2020__EPI_ISL_414523 spike protein (1-1147)(A972C_R995C) LumSynth construct

SEQ ID NO: 8467 - protein, 1307 aa, Artificial Sequence
  SARS-CoV-2/Australia/NSW09/2020__EPI_ISL_413595 spike protein (1-1147)(A972C_R995C) LumSynth construct
MFVFLVLLPLVSSQCVNLTTRTQLPPAYTNSFTRGVYYPDKVFRSSVLHSTQDLFLPFFSNVTWFHAIHVSGTNGTKRFDNPVLPFNDGVYFASTEKSNIIRGWIFGTTLDSKTQSLLIVNNATNVVIKVCEFQFCNDPFLGVYYHKNNKSWMESEFRVYSSANNCTFEYVSQPFLMDLEGKQGNFKNLREFVFKNIDGYFKIYSKHTPINLVRDLPQGFSALEPLVDLPIGINITRFQTLLALHRSYLTPGDSSSGWTAGAAAYYVGYLQPRTFLLKYNENGTITDAVDCALDPLSETKCTLKSFTVEKGIYQTSNFRVQPTESIVRFPNITNLCPFGEVFNATRFASVYAWNRKRISNCVADYSVLYNSASFSTFKCYGVSPTKLNDLCFTNVYADSFVIRGDEVRQIAPGQTGKIADYNYKLPDDFTGCVIAWNSNNLDSKVGGNYNYLYRLFRKSNLKPFERDISTEIYQAGSTPCNGVEGFNCYFPLQSYGFQPTNGVGYQPYRVVVLSFELLHAPATVCGPKKSTNLVKNKCVNFNFNGLTGTGVLTESNKKFLPFQQFGRDIADTTDAVRDPQTLEILDITPCSFGGVSVITPGTNTSNQVAVLYQDVNCTEVPVAIHADQLTPTWRVYSTGSNVFQTRAGCLIGAEHVNNSYECDIPIGAGICASYQTQTNSPRRARSVASQSIIAYTMSLGAENSVAYSNNSIAIPTNFTISVTTEILPVSMTKTSVDCTMYICGDSTECSNLLLQYGSFCTQLNRALTGIAVEQDKNTQEVFAQVKQIYKTPPIKDFGGFNFSQILPDPSKPSKRSFIEDLLFNKVTLADAGFIKQYGDCLGDIAARDLICAQKFNGLTVLPPLLTDEMIAQYTSALLAGTITSGWTFGAGAALQIPFAMQMAYRFNGIGVTQNVLYENQKLIANQFNSAIGKIQDSLSFTASALGKLQDVVNQNAQALNTLVKQLSSNFGCISSVLNDILSRLDKVEAEVQIDCLITGRLQSLQTYVTQQLIRAAEIRASANLAATKMSECVLGQSKRVDFCGKGYHLMSFPQSAPHGVVFLHVTYVPAQEKNFTTAPAICHDGKAHFPREGVFVSNGTHWFVTQRNFYEPQIITTDNTFVSGNCDVVIGIVNNTVYDPLQPELDSGGGSGGGQIYEGKLTAEGLRFGIVASRFNHALVDRLVEGAIDAIVRHGGREEDITLVRVPGSWEIPVAAGELARKEDIDAVIAIGVLIRGATPHFDYIASEVSKGLADLSLELRKPITFGVITADTLEQAIERAGTKHGNKGWEAALSAIEMANLFKSLR

SEQ ID NO: 8468 - protein, 1307 aa, Artificial Sequence; identical to SEQ ID NO: 8448
  SARS-CoV-2/Australia/NSW10/2020__EPI_ISL_413596 spike protein (1-1147)(A972C_R995C) LumSynth construct

SEQ ID NO: 8469 - protein, 1307 aa, Artificial Sequence
  SARS-CoV-2/Switzerland/1000477797/2020__EPI_ISL_413023 spike protein (1-1147)(A972C_R995C) LumSynth construct
MFVFLVLLPLVSSQCVNLTTRTQLPPAYTNSFTRGVYYPDKVFRSSVLHSTQDLFLPFFSNVTWFHAIHVSGTNGTKRFDNPVLPFNDGVYFASTEKSNIIRGWIFGTTLDSKTQSLLIVNNATNVVIKVCEFQFCNDPFLGVYYHKNNKSWMESEFRVYSSANNCTFEYVSQPFLMDLEGKQGNFKNLREFVFKNIDGYFNIYSKHTPINLVRDLPQGFSALEPLVDLPIGINITRFQTLLALHRSYLTPGDSSSGWTAGAAAYYVGYLQPRTFLLKYNENGTITDAVDCALDPLSETKCTLKSFTVEKGIYQTSNFRVQPTESIVRFPNITNLCPFGEVFNATRFASVYAWNRKRISNCVADYSVLYNSASFSTFKCYGVSPTKLNDLCFTNVYADSFVIRGDEVRQIAPGQTGKIADYNYKLPDDFTGCVIAWNSNNLDSKVGGNYNYLYRLFRKSNLKPFERDISTEIYQAGSTPCNGVEGFNCYFPLQSYGFQPTNGVGYQPYRVVVLSFELLHAPATVCGPKKSTNLVKNKCVNFNFNGLTGTGVLTESNKKFLPFQQFGRDIADTTDAVRDPQTLEILDITPCSFGGVSVITPGTNTSNQVAVLYQGVNCTEVPVAIHADQLTPTWRVYSTGSNVFQTRAGCLIGAEHVNNSYECDIPIGAGICASYQTQTNSPRRARSVASQSIIAYTMSLGAENSVAYSNNSIAIPTNFTISVTTEILPVSMTKTSVDCTMYICGDSTECSNLLLQYGSFCTQLNRALTGIAVEQDKNTQEVFAQVKQIYKTPPIKDFGGFNFSQILPDPSKPSKRSFIEDLLFNKVTLADAGFIKQYGDCLGDIAARDLICAQKFNGLTVLPPLLTDEMIAQYTSALLAGTITSGWTFGAGAALQIPFAMQMAYRFNGIGVTQNVLYENQKLIANQFNSAIGKIQDSLSSTASALGKLQDVVNQNAQALNTLVKQLSSNFGCISSVLNDILSRLDKVEAEVQIDCLITGRLQSLQTYVTQQLIRAAEIRASANLAATKMSECVLGQSKRVDFCGKGYHLMSFPQSAPHGVVFLHVTYVPAQEKNFTTAPAICHDGKAHFPREGVFVSNGTHWFVTQRNFYEPQIITTDNTFVSGNCDVVIGIVNNTVYDPLQPELDSGGGSGGGQIYEGKLTAEGLRFGIVASRFNHALVDRLVEGAIDAIVRHGGREEDITLVRVPGSWEIPVAAGELARKEDIDAVIAIGVLIRGATPHFDYIASEVSKGLADLSLELRKPITFGVITADTLEQAIERAGTKHGNKGWEAALSAIEMANLFKSLR

SEQ ID NO: 8470 - protein, 1307 aa, Artificial Sequence
  SARS-CoV-2/Belgium/BA-02291/2020__EPI_ISL_415159 spike protein (1-1147)(A972C_R995C) LumSynth construct
MFVFLVLLPLVSSQCVNLTTRTQLPPAYTNSFTRGVYYPDKVFRSSVLHSTQDLFLPFFSNVTWFHAIHVSGTNGTKRFDNPVLPFNDGVYFASTEKSNIIRGWIFGTTLDSKTQSLLIVNNATNVVIKVCEFQFCNDPFLGVYYHKNNKSWMESEFRVYSSANNCTFEYVSQPFLMDLEGKQGNFKNLREFVFKNIDGYFKIYSKHTPINLVRDLPQGFSALEPLVDLPIGINITRFQTLLALHRSYLTPGDSSSGWTAGAAAYYVGYLQPRTFLLKYNENGTITDAVDCALDPLSETKCTLKSFTVEKGIYQTSNFRVQPTESIVRFPNITNLCPFGEVFNATRFASVYAWNRKRISNCVADYSVLYNSASFSTFKCYGVSPTKLNDLCFTNVYADSFVIRGDEVRQIAPGQTGKIADYNYKLPDDFTGCVIAWNSNNLDSKVGGNYNYLYRLFRRSNLKPFERDISTEIYQAGSTPCNGVEGFNCYFPLQSYGFQPTNGVGYQPYRVVVLSFELLPAPATVCGPKKSTNLVKNKCVNFNFNGLTGTGVLTESNKKFLPFQQFGRDIADTTDAVRDPQTLEILDITPCSFGGVSVITPGTNTSNQVAVLYQGVNCTEVPVAIHADQLTPTWRVYSTGSNVFQTRAGCLIGAEHVNNSYECDIPIGAGICASYQTQTNSPRRARSVASQSIIAYTMSLGAENSVAYSNNSIAIPTNFTISVTTEILPVSMTKTSVDCTMYICGDSTECSNLLLQYGSFCTQLNRALTGIAVEQDKNTQEVFAQVKQIYKTPPIKDFGGFNFSQILPDPSKPSKRSFIEDLLFNKVTLADAGFIKQYGDCLGDIAARDLICAQKFNGLTVLPPLLTDEMIAQYTSALLAGTITSGWTFGAGAALQIPFAMQMAYRFNGIGVTQNVLYENQKLIANQFNSAIGKIQDSLSSAAPALGKLQDVVNQNAQALNTLVKQLSSNFGCISSVLNDILSRLDKVEAEVQIDCLITGRLQSLQTYVTQQLIRAAEIRASANLAATKMSECVLGQSKRVDFCGKGYHLMSFPQSAPHGVVFLHVTYVPAQEKNFTTAPAICHDGKAHFPREGVFVSNGTHWFVTQRNFYEPQIITTDNTFVSGNCDVVIGIVNNTVYDPLQPELDSGGGSGGGQIYEGKLTAEGLRFGIVASRFNHALVDRLVEGAIDAIVRHGGREEDITLVRVPGSWEIPVAAGELARKEDIDAVIAIGVLIRGATPHFDYIASEVSKGLADLSLELRKPITFGVITADTLEQAIERAGTKHGNKGWEAALSAIEMANLFKSLR

SEQ ID NO: 8471 - protein, 1307 aa, Artificial Sequence
  SARS-CoV-2/USA/WA8-UW5/2020__EPI_ISL_413486 spike protein (1-1147)(A972C_R995C) LumSynth construct
MFVFLVLLPLVSSQCVNLTTRTQLPPAYTNSFTRGVYYPDKVFRSSVLHSTQDLFLPFFSNVTWFHAIHVSGTNGTKRFDNPVLPFNDGVYFASTEKSNIIRGWIFGTTLDSKTQSLLIVNNATNVVIKVCEFQFCNDPFLGVYYHKNNKSWMESEFRVYSSANNCTFEYVSQPFLMDLEGKQGNFKNLREFVFKNIDGYFKIYSKHTPINLVRDLPQGFSALEPLVDLPIGINITRFQTLLALHRSYLTPGDSSSGWTAGAAAYYVGYLQPRTFLLKYNENGTITDAVDCALDPLSETKCTLKSFTVEKGIYQTSNFRVQPTESIVRFPNITNLCPFGEVFNATRFASVYAWNRKRISNCVADYSVLYNSASFSTFKCYGVSPTKLNDLCFTNVYADSFVIRGDEVRQIAPGQTGKIADYNYKLPDDFTGCVIAWNSNNLDSKVGGNYNYLYRLFRKSNLKPFERDISTEIYQAGSTPCNGVEGFNCYFPLQSYGFQPTNGVGYQPYRVVVLSFELLHAPATVCGPKKSTNLVKNKCVNFNFNGLTGTGVLTESNKKFLPFQQFGRDIADTTDAVRDPQTLEILDITPCSFGGVSVITPGTNTSNQVAVLYQDVNCTEVPVAIHADQLTPTWRVYSTGSNVFQTRAGCLIGAEYVNNSYECDIPIGAGICASYQTQTNSPRRARSVASQSIIAYTMSLGAENSVAYSNNSIAIPTNFTISVTTEILPVSMTKTSVDCTMYICGDSTECSNLLLQYGSFCTQLNRALTGIAVEQDKNTQEVFAQVKQIYKTPPIKDFGGFNFSQILPDPSKPSKRSFIEDLLFNKVTLADAGFIKQYGDCLGDIAARDLICAQKFNGLTVLPPLLTDEMIAQYTSALLAGTITSGWTFGAGAALQIPFAMQMAYRFNGIGVTQNVLYENQKLIANQFNSAIGKIQDSLSSTASALGKLQDVVNQNAQALNTLVKQLSSNFGCISSVLNDILSRLDKVEAEVQIDCLITGRLQSLQTYVTQQLIRAAEIRASANLAATKMSECVLGQSKRVDFCGKGYHLMSFPQSAPHGVVFLHVTYVPAQEKNFTTAPAICHDGKAHFPREGVFVSNGTHWFVTQRNFYEPQIITTDNTFVSGNCDVVIGIVNNTVYDPLQPELDSGGGSGGGQIYEGKLTAEGLRFGIVASRFNHALVDRLVEGAIDAIVRHGGREEDITLVRVPGSWEIPVAAGELARKEDIDAVIAIGVLIRGATPHFDYIASEVSKGLADLSLELRKPITFGVITADTLEQAIERAGTKHGNKGWEAALSAIEMANLFKSLR

SEQ ID NO: 8472 - protein, 1307 aa, Artificial Sequence
  SARS-CoV-2/England/20102000506/2020__EPI_ISL_415147 spike protein (1-1147)(A972C_R995C) LumSynth construct
MFVFLVLLPLVSSQCVNLTTRTQLPPAYTNSFTRGVYYPDKVFRSSVLHSTQDLFLPFFSNVTWFHAIHVSGTNGTKRFDNPVLPFNDGVYFASTEKSNIIRGWIFGTTLDSKTQSLLIVNNATNVVIKVCEFQFCNDPFLGVYYHKNNKSWMESEFRVYSSANNCTFEYVSQPFLMDLEGKQGNFKNLREFVFKNIDGYFKIYSKHTPINLVRDLPQGFSALEPLVDLPIGINITRFQTLLALHRSYLTPGDSSSGWTAGAAAYYVGYLQPRTFLLKYNENGTITDAVDCALDPLSETKCTLKSFTVEKGIYQTSNFRVQPTESIVRFPNITNLCPFGEVFNATRFASVYAWNRKRISNCVADYSVLYNSASFSTFKCYGVSPTKLNDLCFTNVYADSFVIRGDEVRQIAPGQTGKIADYNYKLPDDFTGCVIAWNSNNLDSKVGGNYNYLYRLFRKSNLKPFERDISTEIYQAGSTPCNGVEGFNCYFPLQSYGFQPTNGVGYQPYRVVVLSFELLHAPATVCGPKKSTNLVKNKCVNFNFNGLTGTGVLTESNKKFLPFQQFGRDIADTTDAVRDPQTLEILDITPCSFGGVSVITPGTNTSNQVAVLYQGVNCTEVPVAIHADQLTPTWRVYSTGSNVFQTRAGCLIGAEHVNNSYECDIPIGAGICASYQTQTNSPRRARSVASQSIIAYTMSLGAENSVAYSNNSIAIPTNFTISVTTEILPVSMTKTSVDCTMYICGDSTECSNLLLQYGSFCTQLNRALTGIAVEQDKNTQEVFAQVKQIYKTPPIKDFGGFNFSQILPDPSKPSKRSFIEDLLFNKVTLADAGFIKQYGYCLGDIAARDLICAQKFNGLTVLPPLLTDEMIAQYTSALLAGTITSGWTFGAGAALQIPFAMQMAYRFNGIGVTQNVLYENQKLIANQFNSAIGKIQDSLSSTASALGKLQDVVNQNAQALNTLVKQLSSNFGCISSVLNDILSRLDKVEAEVQIDCLITGRLQSLQTYVTQQLIRAAEIRASANLAATKMSECVLGQSKRVDFCGKGYHLMSFPQSAPHGVVFLHVTYVPAQEKNFTTAPAICHDGKAHFPREGVFVSNGTHWFVTQRNFYEPQIITTDNTFVSGNCDVVIGIVNNTVYDPLQPELDSGGGSGGGQIYEGKLTAEGLRFGIVASRFNHALVDRLVEGAIDAIVRHGGREEDITLVRVPGSWEIPVAAGELARKEDIDAVIAIGVLIRGATPHFDYIASEVSKGLADLSLELRKPITFGVITADTLEQAIERAGTKHGNKGWEAALSAIEMANLFKSLR

SEQ ID NO: 8473 - protein, 1307 aa, Artificial Sequence
  SARS-CoV-2/Belgium/VAG-03013/2020__EPI_ISL_415155 spike protein (1-1147)(A972C_R995C) LumSynth construct
MFVFLVLLPLVSSQCVNLTTRTQLPPAYTNSFTRGVYYPDKVFRSSVLHSTQDLFLPFFSNVTWFHAIHVSGTNGTKRFDNPVLPFNDGVYFASTEKSNIIRGWIFGTTLDSKTQSLLIVNNATNVVIKVCEFQFCNDPFLGVYYHKNNKSWMESEFRVYSSANNCTFEYVSQPFLMDLEGKQGNFKNLREFVFKNIDGYFKIYSKHTPINLVRDLPQGFSALEPLVDLPIGINITRFQTLLALHRSYLTPGDSSSGWTAGAAAYYVGYLQPRTFLLKYNENGTITDAVDCALDPLSETKCTLKSFTVEKGIYQTSNFRVQPTESIVRFPNITNLCPFGEVFNATRFASVYAWNRKRISNCVADYSVLYNSASFSTFKCYGVSPTKLNDLCFTNVYADSFVIRGDEVRQIAPGQTGKIADYNYKLPDDFTGCVIAWNSNNLDSKVGGNYNYLYRLFRKSNLKPFERDISTEIYQAGSTPCNGVEGFNCYFPLQSYGFQPTNGVGYQPYRVVVLSFELLHAPATVCGPKKSTNLVKNKCVNFNFNGLTGTGVLTESNKKFLPFQQFGRDIADTTDAVRDPQTLEILDITPCSFGGVSVITPGTNTSNQVAVLYQGVNCTEVPVAIHADQLTPTWRVYSTGSNVFQTRAGCLIGAEHVNNSYECDIPIGAGICASYQTQTNSPRRARSVASQSIIAYTMSLGAENSVAYSNNSIAIPTNFTISVTTEILPVSMTKTSVDCTMYICGDSTECSNLLLQYGSFCTQLNRALTGIAVEQDKNTQEVFAQVKQIYKTPPIKDFGGFNFSQILPDPSKPSKRSFIEDLLFNKVTLADAGFIKQYGDCLGDIAARDLICAQKFNGLTVLPPLLTDEMIAQYTSALLAGTITSGWTFGAGAALQIPFAMQMAYRFNGIGVTQNVLYENQKLIANQFNSAIGKIQDSLSSTATALGKLQDVVNQNAQALNTLVKQLSSNFGCISSVLNDILSRLDKVEAEVQIDCLITGRLQSLQTYVTQQLIRAAEIRASANLAATKMSECVLGQSKRVDFCGKGYHLMSFPQSAPHGVVFLHVTYVPAQEKNFTTAPAICHDGKAHFPREGVFVSNGTHWFVTQRNFYEPQIITTDNTFVSGNCDVVIGIVNNTVYDPLQPELDSGGGSGGGQIYEGKLTAEGLRFGIVASRFNHALVDRLVEGAIDAIVRHGGREEDITLVRVPGSWEIPVAAGELARKEDIDAVIAIGVLIRGATPHFDYIASEVSKGLADLSLELRKPITFGVITADTLEQAIERAGTKHGNKGWEAALSAIEMANLFKSLR

SEQ ID NO: 8474 - protein, 1307 aa, Artificial Sequence
  SARS-CoV-2/Belgium/BC-03016/2020__EPI_ISL_415157 spike protein (1-1147)(A972C_R995C) LumSynth construct
MFVFLVLLPLVSSQCVNLTTRTQLPPAYTNSFTRGVYYPDKVFRSSVLHSTQDLFLPFFSNVTWFHAIHVSGTNGTKRFDNPVLPFNDGVYFASTEKSNIIRGWIFGTTLDSKTQSLLIVNNATNVVIKVCEFQFCNDPFLGVYYHKNNKSWMESEFRVYSSANNCTFEYVSQPFLMDLEGKQGNFKNLREFVFKNIDGYFKIYSKHTPINLVRDLPQGFSALEPLVDLPIGINITRFQTLLALHRSYLTPGDSSSGWTAGAAAYYVGYLQPRTFLLKYNENGTITDAVDCALDPLSETKCTLKSFTVEKGIYQTSNFRVQPTESIVRFPNITNLCPFGEVFNATRFASVYAWNRKRISNCVADYSVLYNSASFSTFKCYGVSPTKLNDLCFTNVYADSFVIRGDEVRQIAPGQTGKIADYNYKLPDDFTGCVIAWNSNNLDSKVGGNYNYLYRLFRKSNLKPFERDISTEIYQAGSTPCNGVEGFNCYFPLQSYGFQPTNGVGYQPYRVVVLSFELLHAPATVCGPKKSTNLVKNKCVNFNFNGLTGTGVLTESNKKFLPFQQFGRDIADTTDAVRDPQTLEILDITPCSFGGVSVITPGTNTSNQVAVLYQGVNCTEVPVAIHADQLTPTWRVYSTGSNVFQTRAGCLIGAEHVNNSYECDIPIGAGICASYQTQTNSPRRARSVASQSIIAYTMSLGAENSVAYSNNSIAIPTNFTISVTTEILPVSMTKTSVDCTMYICGDSTECSNLLLQYGSFCTQLNRALTGIAVEQDKNTQEVFAQVKQIYKTPPIKDFGGFNFSQILPDPSKPSKRSFIEDLLFNKVTLADAGFIKQYGDCLGDIAARDLICAQKFNGLTVLPPLLTDEMIAQYTSALLAGTITSGWTFGAGAALQIPFAMQMAYRFNGIGVTQNVLYENQKLIANQFNSAIGKIQDSLSSTAPALGKLQDVVNQNAQALNTLVKQLSSNFGCISSVLNDILSRLDKVEAEVQIDCLITGRLQSLQTYVTQQLIRAAEIRASANLAATKMSECVLGQSKRVDFCGKGYHLMSFPQSAPHGVVFLHVTYVPAQEKNFTTAPAICHDGKAHFPREGVFVSNGTHWFVTQRNFYEPQIITTDNTFVSGNCDVVIGIVNNTVYDPLQPELDSGGGSGGGQIYEGKLTAEGLRFGIVASRFNHALVDRLVEGAIDAIVRHGGREEDITLVRVPGSWEIPVAAGELARKEDIDAVIAIGVLIRGATPHFDYIASEVSKGLADLSLELRKPITFGVITADTLEQAIERAGTKHGNKGWEAALSAIEMANLFKSLR

SEQ ID NO: 8475 - protein, 1307 aa, Artificial Sequence
  SARS-CoV-2/Germany/BavPat3/2020__EPI_ISL_414521 spike protein (1-1147)(A972C_R995C) LumSynth construct
MFVFLVLLPLVSSQCVNLTTRTQLPPAYTNSFTRGVYYPDKVFRSSVLHSTQDLFLPFFSNVTWFHAIHVSGTNGTKRFDNPVLPFNDGVYFASTEKSNIIRGWIFGTTLDSKTQSLLIVNNATNVVIKVCEFQFCNDPFLGVYYHKNNKSWMESEFRVYSSANNCTFEYVSQPFLMDLEGKQGNFKNLREFVFKNIDGYFKIYSKHTPINLVRDLPQGFSALEPLVDLPIGINITRFQTLLALHRSYLTPGDSSSGWTAGAAAYYVGYLQPRTFLLKYNENGTITDAVDCALDPLSETKCTLKSFTVEKGIYQTSNFRVQPTESIVRFPNITNLCPFGEVFNATRFASVYAWNRKRISNCVADYSVLYNSASFSTFKCYGVSPTKLNDLCFTNVYADSFVIRGDEVRQIAPGQTGKIADYNYKLPDDFTGCVIAWNSNNLDSKVGGNYNYLYRLFRKSNLKPFERDISTEIYQAGSTPCNGVEGFNCYFPLQSYGFQPTNGVGYQPYRVVVLSFELLHAPATVCGPKKSTNLVKNKCVNFNFNGLTGTGVLTESNKKFLPFQQFGRDIADTTDAVRDPQTLEILDITPCSFGGVSVITPGTNTSNQVAVLYQDVNCTEVPVAIHADQLTPTWRVYSTGSNVFQTRAGCLIGAEHVNNSYECDIPIGAGICASYQTQTNSPRRARSVASQSIIAYTMSLGAENSVAYSNNSIAIPTNFTISVTTEILPVSMTKTSVDCTMYICGDSTECSNLLLQYGSFCTQLNRALTGIAVEQDKNTQQVFAQVKQIYKTPPIKDFGGFNFSQILPDPSKPSKRSFIEDLLFNKVTLADAGFIKQYGDCLGDIAARDLICAQKFNGLTVLPPLLTDEMIAQYTSALLAGTITSGWTFGAGAALQIPFAMQMAYRFNGIGVTQNVLYENQKLIANQFNSAIGKIQDSLSSTASALGKLQDVVNQNAQALNTLVKQLSSNFGCISSVLNDILSRLDKVEAEVQIDCLITGRLQSLQTYVTQQLIRAAEIRASANLAATKMSECVLGQSKRVDFCGKGYHLMSFPQSAPHGVVFLHVTYVPAQEKNFTTAPAICHDGKAHFPREGVFVSNGTHWFVTQRNFYEPQIITTDNTFVSGNCDVVIGIVNNTVYDPLQPELDSGGGSGGGQIYEGKLTAEGLRFGIVASRFNHALVDRLVEGAIDAIVRHGGREEDITLVRVPGSWEIPVAAGELARKEDIDAVIAIGVLIRGATPHFDYIASEVSKGLADLSLELRKPITFGVITADTLEQAIERAGTKHGNKGWEAALSAIEMANLFKSLR

SEQ ID NO: 8476 - protein, 1307 aa, Artificial Sequence
  SARS-CoV-2/France/HF1805/2020__EPI_ISL_414628 spike protein (1-1147)(A972C_R995C) LumSynth construct
MFVFLVLLPLVSSQCVNLTTRTQLPPAYTNSFTRGVYYPDKVFRSSVLHSTQDLFLPFFSNVTWFHAIHVSGTNGTKRFDNPVLPFNDGVYFASTEKSNIIRGWIFGTTLDSKTQSLLIVNNATNVVIKVCEFQFCNDPFLGVYYHKNNKSWMESEFRVYSSANNCTFEYVSQPFLMDLEGKQGNFKNLREFVFKNIDGYFKIYSKHTPINLVRDLPQGFSALEPLVDLPIGINITRFQTLLALHRSYLTPGDSSSGWTAGAAAYYVGYLQPRTFLLKYNENGTITDAVDCALDPLSETKCTLKSFTVEKGIYQTSNFRVQPTESIVRFPNITNLCPFGEVFNATRFASVYAWNRKRISNCVADYSVLYNSASFSTFKCYGVSPTKLNDLCFTNVYADSFVIRGDEVRQIAPGQTGKIADYNYKLPDDFTGCVIAWNSNNLDSKVGGNYNYLYRLFRKSNLKPFERDISTEIYQAGSTPCNGVEGFNCYFPLQSYGFQPTNGVGYQPYRVVVLSFELLHAPATVCGPKKSTNLVKNKCVNFNFNGLTGTGVLTESNKKFLPFQQFGRDIADTTDAVRDPQTLEILDITPCSFGGVSVITPGTNTSNQVAVLYQGVNCTEVPVAIHADQLTPTWRVYSTGSNVFQTRAGCLIGAEHVNNSYECDIPIGAGICASYQTQTNSPRRARSVASQSIIAYTMSLGAENSVAYSNNSIAIPTNFTISVTTEILPVSMTKTSVDCTMYICGDSTECSNLLLQYGSFCTQLNRALTGIAVEQDKNTQEVFAQVKQIYKTPPIKDFGGFNFSQILPDPSKPSKRSFIEDLLFNKVTLADAGFIKQYGDCLGDIAARDLICAQKFNGLTVLPPLLTDEMIAQYTSALLAGTITSGWTFGAGAALQIPFAMQMAYRFNGIGVTQNVLYENQKLIANQFNSAIGKIQDSLSSTASALGKLQDVVNQNAQALNTLVKQLSSNFGCISSVLNDILSRLDKVEAEVQIDCLITGRLQSLQTYVTQQLIRAAEIRASANLAATKMSECVLGQSKRVDFCGKGYHLMSFPQSAPHGVVFLHVTYVPAQEKNFTTAPAICHDGKAHFPREGVFVSNGTHWFVTQRNFYEPQIITTDNTFVSGNCDVVIGVVNNTVYDPLQPELDSGGGSGGGQIYEGKLTAEGLRFGIVASRFNHALVDRLVEGAIDAIVRHGGREEDITLVRVPGSWEIPVAAGELARKEDIDAVIAIGVLIRGATPHFDYIASEVSKGLADLSLELRKPITFGVITADTLEQAIERAGTKHGNKGWEAALSAIEMANLFKSLR

SEQ ID NO: 8477 - protein, 1307 aa, Artificial Sequence
  SARS-CoV-2/Netherlands/ZuidHolland_9/2020__EPI_ISL_414445 spike protein (1-1147)(A972C_R995C) LumSynth construct
MFVFLVLLPLVSSQCVNLTTRTQLPPAYTNSFTRGVYYPDKVFRSSVLHSTQDLFLPFFSNVTWFHAIHVSGTNGTKRFDNPVLPFNDGVYFASTEKSNIIRGWIFGTTLDSKTQSLLIVNNATNVVIKVCEFQFCNDPFLGVYYHKNNKSWMESEFRVYSSANNCTFEYVSQPFLMDLEGKQGNFKNLREFVFKNIDGYFKIYSKHTPINLVRDLPQGFSALEPLVDLPIGINITRFQTLLALHRSYLTPGDSSSGWTAGAAAYYVGYLQPRTFLLKYNENGTITDAVDCALDPLSETKCTLKSFTVEKGIYQTSNFRVQPTESIVRFPNITNLCPFGEVFNATRFASVYAWNRKRISNCVADYSVLYNSASFSTFKCYGVSPTKLNDLCFTNVYADSFVIRGDEVRQIAPGQTGKIADYNYKLPDDFTGCVIAWNSNNLDSKVGGNYNYLYRLFRKSNLKPFERDISTEIYQAGSTPCNGVEGFNCYFPLQSYGFQPTNGVGYQPYRVVVLSFELLHAPATVCGPKKSTNLVKNKCVNFNFNGLTGTGVLTESNKKFLPFQQFGRDIADTTDAVRDPQTLEILDITPCSFGGVSVITPGTNTSNQVAVLYQGVNCTEVPVAIHADQLTPTWRVYSTGSNVFQTRAGCLIGAEHVNNSYECDIPIGAGICASYQTQTNSPRRARSVASQSIIAYTMSLGAENSVAYSNNSIAIPTNFTISVTTEILPVSMTKTSVDCTMYICGDSTECSNLLLQYGSFCTQLNRALTGIAVEQDKNTQEVFAQVKQIYKTPPIKDFGGFNFSQILPDPSKPSKRSFIEDLLFNKVTLADAGFIKQYGDCLGDIAARDLICVQKFNGLTVLPPLLTDEMIAQYTSALLAGTITSGWTFGAGAALQIPFAMQMAYRFNGIGVTQNVLYENQKLIANQFNSAIGKIQDSLSSTASALGKLQDVVNQNAQALNTLVKQLSSNFGCISSVLNDILSRLDKVEAEVQIDCLITGRLQSLQTYVTQQLIRAAEIRASANLAATKMSECVLGQSKRVDFCGKGYHLMSFPQSAPHGVVFLHVTYVPAQEKNFTTAPAICHDGKAHFPREGVFVSNGTHWFVTQRNFYEPQIITTDNTFVSGNCDVVIGIVNNTVYDPLQPELDSGGGSGGGQIYEGKLTAEGLRFGIVASRFNHALVDRLVEGAIDAIVRHGGREEDITLVRVPGSWEIPVAAGELARKEDIDAVIAIGVLIRGATPHFDYIASEVSKGLADLSLELRKPITFGVITADTLEQAIERAGTKHGNKGWEAALSAIEMANLFKSLR

SEQ ID NO: 8478 - protein, 1307 aa, Artificial Sequence
  SARS-CoV-2/Finland/FIN03032020A/2020__EPI_ISL_413602 spike protein (1-1147)(A972C_R995C) LumSynth construct
MFVFLVLLPLVSSQCVNLTTRTQLPPAYTNSFTRGVYYPDKVFRSSVLHSTQDLFLPFFSNVTWFHAIHVSGTNGTKRFDNPVLPFNDGVYFASTEKSNIIRGWIFGTTLDSKTQSLLIVNNATNVVIKVCEFQFCNDPFLGVYYHKNNKSWMESEFRVYSSANNCTFEYVSQPFLMDLEGKQGNFKNLREFVFKNIDGYFKIYSKHTPINLVRDLPQGFSALEPLVDLPIGINITRFQTLLALHRSYLTPGDSSSGWTAGAAAYYVGYLQPRTFLLKYNENGTITDAVDCALDPLSETKCTLKSFTVEKGIYQTSNFRVQPTESIVRFPNITNLCPFGEVFNATRFASVYAWNRKRISNCVADYSVLYNSASFSTFKCYGVSPTKLNDLCFTNVYADSFVIRGDEVRQIAPGQTGKIADYNYKLPDDFTGCVISWNSNNLDSKVGGNYNYLYRLFRKSNLKPFERDISTEIYQAGSTPCNGVEGFNCYFPLQSYGFQPTNGVGYQPYRVVVLSFELLHAPATVCGPKKSTNLVKNKCVNFNFNGLTGTGVLTESNKKFLPFQQFGRDIADTTDAVRDPQTLEILDITPCSFGGVSVITPGTNTSNQVAVLYQGVNCTEVPVAIHADQLTPTWRVYSTGSNVFQTRAGCLIGAEHVNNSYECDIPIGAGICASYQTQTNSPRRARSVASQSIIAYTMSLGAENSVAYSNNSIAIPTNFTISVTTEILPVSMTKTSVDCTMYICGDSTECSNLLLQYGSFCTQLNRALTGIAVEQDKNTQEVFAQVKQIYKTPPIKDFGGFNFSQILPDPSKPSKRSFIEDLLFNKVTLADAGFIKQYGDCLGDIAARDLICAQKFNGLTVLPPLLTDEMIAQYTSALLAGTITSGWTFGAGAALQIPFAMQMAYRFNGIGVTQNVLYENQKLIANQFNSAIGKIQDSLSSTASALGKLQDVVNQNAQALNTLVKQLSSNFGCISSVLNDILSRLDKVEAEVQIDCLITGRLQSLQTYVTQQLIRAAEIRASANLAATKMSECVLGQSKRVDFCGKGYHLMSFPQSAPHGVVFLHVTYVPAQEKNFTTAPAICHDGKAHFPREGVFVSNGTHWFVTQRNFYEPQIITTDNTFVSGNCDVVIGIVNNTVYDPLQPELDSGGGSGGGQIYEGKLTAEGLRFGIVASRFNHALVDRLVEGAIDAIVRHGGREEDITLVRVPGSWEIPVAAGELARKEDIDAVIAIGVLIRGATPHFDYIASEVSKGLADLSLELRKPITFGVITADTLEQAIERAGTKHGNKGWEAALSAIEMANLFKSLR

SEQ ID NO: 8479 - protein, 1307 aa, Artificial Sequence
  SARS-CoV-2/France/GE1977/2020__EPI_ISL_414632 spike protein (1-1147)(A972C_R995C) LumSynth construct
MFVFLVLLPLVSSQCVNLTTRTQLPPAYTNSFTRGVYYPDKVFRSSVLHSTQDLFLPFFSNVTWFHAIHVSGTNGTKRFDNPVLPFNDGVYFASTEKSNIIRGWIFGTTLDSKTQSLLIVNNATNVVIKVCEFQFCNDPFLGVYYHKNNKSWMESEFRVYSSANNCTFEYVSQPFLMDLEGKQGNFKNLREFVFKNIDGYFKIYSKHTPINLVRDLPQGFSALEPLVDLPIGINITRFQTLLALHRSYLTPGDSSSGWTAGAAAYYVGYLQPRTFLLKYNENGTITDAVDCALDPLSETKCTLKSFTVEKGIYQTSNFRVQPTESIVRFPNITNLCPFGEVFNATRFASVYAWNRKRISNCVADYSVLYNSASFSTFKCYGVSPTKLNDLCFTNVYADSFVIRGDEVRQIAPGQTGKIADYNYKLPDDFTGCVIAWNSNNLDSKVGGNYNYLYRLFRKSNLKPFERDISTEIYQAGSTPCNGVEGFNCYFPLQSYGFQPTNGVGYQPYRVVVLSFELLHAPATVCGPKKSTNLVKNKCVNFNFNGLTGTGVLTESNKKFLPFQQFGRDIADTTDAVRDPQTLEILDITPCSFGGVSVITPGTNTSNQVAVLYQGVNCTEVPVAIHADQLTPTWRVYSTGSNVFQTRAGCLIGAEHVNNSYECDIPIGAGICASYQTQTNSPRRARSVASQSIIAYTMSLGAENSVAYSNNSIAIPTNFTISVTTEILPVSMTKTSVDCTMYICGDSTECSNLLLQYGSFCTQLNRALTGIAVEQDKNTQEVFAQVKQIYKTPPIKDFGGFNFSQILPDPSKPSKRSFIEDLLFNKVTLADAGFIKQYGDCLGDIAARDLICAQKFNGLTVLPPLLTDEMIAQYTSALLAGTITSGWTFGAGAALQIPFAMQMAYRFNGIGVTQNVLYENQKLIANQFNSAIGKIQDSLFSTASALGKLQDVVNQNAQALNTLVKQLSSNFGCISSVLNDILSRLDKVEAEVQIDCLITGRLQSLQTYVTQQLIRAAEIRASANLAATKMSECVLGQSKRVDFCGKGYHLMSFPQSAPHGVVFLHVTYVPAQEKNFTTAPAICHDGKAHFPREGVFVSNGTHWFVTQRNFYEPQIITTDNTFVSGNCDVVIGIVNNTVYDPLQPELDSGGGSGGGQIYEGKLTAEGLRFGIVASRFNHALVDRLVEGAIDAIVRHGGREEDITLVRVPGSWEIPVAAGELARKEDIDAVIAIGVLIRGATPHFDYIASEVSKGLADLSLELRKPITFGVITADTLEQAIERAGTKHGNKGWEAALSAIEMANLFKSLR

SEQ ID NO: 8480 - protein, 1307 aa, Artificial Sequence
  SARS-CoV-2/Finland/FIN-313/2020__EPI_ISL_414641 spike protein (1-1147)(A972C_R995C) LumSynth construct
MFVFLVLLPLVSSQCVNLTTRTQLPPAYTNSFTRGVYYPDKVFRSSVLHSTQDLFLPFFSNVTWFHAIHVSGTNGTKRFDNPVLPFNDGVYFASTEKSNIIRGWIFGTTLDSKTQSLLIVNNATNVVIKVCEFQFCNDPFLGVYYHKNNKSWMESEFRVYSSANNCTFEYVSQPFLMDLEGKQGNFKNLREFVFKNIDGYFKIYSKHTPINLVRDLPQGFSALEPLVDLPIGINITRFKTLLALHRSYLTPGDSSSGWTAGAAAYYVGYLQPRTFLLKYNENGTITDAVDCALDPLSETKCTLKSFTVEKGIYQTSNFRVQPTESIVRFPNITNLCPFGEVFNATRFASVYAWNRKRISNCVADYSVLYNSASFSTFKCYGVSPTKLNDLCFTNVYADSFVIRGDEVRQIAPGQTGKIADYNYKLPDDFTGCVIAWNSNNLDSKVGGNYNYLYRLFRKSNLKPFERDISTEIYQAGSTPCNGVEGFNCYFPLQSYGFQPTNGVGYQPYRVVVLSFELLHAPATVCGPKKSTNLVKNKCVNFNFNGLTGTGVLTESNKKFLPFQQFGRDIADTTDAVRDPQTLEILDITPCSFGGVSVITPGTNTSNQVAVLYQGVNCTEVPVAIHADQLTPTWRVYSTGSNVFQTRAGCLIGAEHVNNSYECDIPIGAGICASYQTQTNSPRRARSVASQSIIAYTMSLGAENSVAYSNNSIAIPTNFTISVTTEILPVSMTKTSVDCTMYICGDSTECSNLLLQYGSFCTQLNRALTGIAVEQDKNTQEVFAQVKQIYKTPPIKDFGGFNFSQILPDPSKPSKRSFIEDLLFNKVTLADAGFIKQYGDCLGDIAARDLICAQKFNGLTVLPPLLTDEMIAQYTSALLAGTITSGWTFGAGAALQIPFAMQMAYRFNGIGVTQNVLYENQKLIANQFNSAIGKIQDSLSSTASALGKLQDVVNQNAQALNTLVKQLSSNFGCISSVLNDILSRLDKVEAEVQIDCLITGRLQSLQTYVTQQLIRAAEIRASANLAATKMSECVLGQSKRVDFCGKGYHLMSFPQSAPHGVVFLHVTYVPAQEKNFTTAPAICHDGKAHFPREGVFVSNGTHWFVTQRNFYEPQIITTDNTFVSGNCDVVIGIVNNTVYDPLQPELDSGGGSGGGQIYEGKLTAEGLRFGIVASRFNHALVDRLVEGAIDAIVRHGGREEDITLVRVPGSWEIPVAAGELARKEDIDAVIAIGVLIRGATPHFDYIASEVSKGLADLSLELRKPITFGVITADTLEQAIERAGTKHGNKGWEAALSAIEMANLFKSLR

SEQ ID NO: 8481 - protein, 1307 aa, Artificial Sequence
  SARS-CoV-2/Netherlands/ZuidHolland_2/2020__EPI_ISL_414556 spike protein (1-1147)(A972C_R995C) LumSynth construct
MFVFLVLLPLVSSQCVNLTTRTQLPPAYTNSFTRGVYYPDKVFRSSVLHSTQDLFLPFFSNVTWFHAIHVSGTNGTKRFDNPVLPFNDGVYFASTEKSNIIRGWIFGTTLDSKTQSLLIVNNATNVVIKVCEFQFCNDPFLGVYYHKNNKSWMESEFRVYSSANNCTFEYVSQPFLMDLEGKQGNFKNLREFVFKNIDGYFKIYSKHTPINLVRDLPQGFSALEPLVDLPIGINITRFQTLLALHRSYLTPGDSSSGWTAGAAAYYVGYLQPRTFLLKYNENGTITDAVDCALDPLSETKCTLKSFTVEKGIYQTSNFRVQPTESIVRFPNITNLCPFGEVFNATRFASVYAWNRKRISNCVADYSVLYNSASFSTFKCYGVSPTKLNDLCFTNVYADSFVIRGDEVRQIAPGQTGKIADYNYKLPDDFTGCVIAWNSNNLDSKVGGNYNYLYRLFRKSNLKPFERDISTEIYQAGSTPCNGVEGFNCYFPLQSYGFQPTNGVGYQPYRVVVLSFELLHAPATVCGPKKSTNLVKNKCVNFNFNGLTGTGVLTESNKKFLPFQQFGRDIADTTDAVRDPQTLEILDITPCSFGGVSVITPGTNTSNQVAVLYQGVNCTEVPVAIHADQLTPTWRVYSTGSNVFQTRAGCLIGAEHVNNSYECDIPIGAGICASYQTQTNSPRRARSVASQSIIAYTMSLGAENSVAYSNNSIAIPTNFTISVTTEILPVSMTKTSVDCTMYICGDSTECSNLLLQYGSFCTQLNRALTGIALEQDKNTQEVFAQVKQIYKTPPIKDFGGFNFSQILPDPSKPSKRSFIEDLLFNKVTLADAGFIKQYGDCLGDIAARDLICAQKFNGLTVLPPLLTDEMIAQYTSALLAGTITSGWTFGAGAALQIPFAMQMAYRFNGIGVTQNVLYENQKLIANQFNSAIGKIQDSLSSTASALGKLQDVVNQNAQALNTLVKQLSSNFGCISSVLNDILSRLDKVEAEVQIDCLITGRLQSLQTYVTQQLIRAAEIRASANLAATKMSECVLGQSKRVDFCGKGYHLMSFPQSAPHGVVFLHVTYVPAQEKNFTTAPAICHDGKAHFPREGVFVSNGTHWFVTQRNFYEPQIITTDNTFVSGNCDVVIGIVNNTVYDPLQPELDSGGGSGGGQIYEGKLTAEGLRFGIVASRFNHALVDRLVEGAIDAIVRHGGREEDITLVRVPGSWEIPVAAGELARKEDIDAVIAIGVLIRGATPHFDYIASEVSKGLADLSLELRKPITFGVITADTLEQAIERAGTKHGNKGWEAALSAIEMANLFKSLR

SEQ ID NO: 8482 - protein, 1307 aa, Artificial Sequence
  SARS-CoV-2/USA/WA-UW31/2020__EPI_ISL_414618 spike protein (1-1147)(A972C_R995C) LumSynth construct
MFVFLVLLPLVSSQCVNLTTRTQLPPAYTNSFTRGVYYPDKVFRSSVLHSTQDLFLPFFSNVTWFHAIHVSGTNGTKRFDNPVLPFNDGVYFASTEKSNIIRGWIFGTTLDSKTQSLLIVNNATNVVIKVCEFQFCNDPFLGVYYHKNNKSWMESEFRVYSSANNCTFEYVSQPFLMDLEGKQGNFKNLREFVFKNIDGYFKIYSKHTPINLVRDLPQGFSALEPLVDLPIGINITRFQTLLALHRSYLTPGDSSSGWTAGAAAYYVGYLQPRTFLLKYNENGTITDAVDCALDPLSETKCTLKSFTVEKGIYQTSNFRVQPTESIVRFPNITNLCPFGEVFNATRFASVYAWNRKRISNCVADYSVLYNSASFSTFKCYGVSPTKLNDLCFTNVYADSFVIRGDEVRQIAPGQTGKIADYNYKLPDDFTGCVIAWNSNNLDSKVGGNYNYLYRLFRKSNLKPFERDISTEIYQAGSTPCNGAEGFNCYFPLQSYGFQPTNGVGYQPYRVVVLSFELLHAPATVCGPKKSTNLVKNKCVNFNFNGLTGTGVLTESNKKFLPFQQFGRDIADTTDAVRDPQTLEILDITPCSFGGVSVITPGTNTSNQVAVLYQDVNCTEVPVAIHADQLTPTWRVYSTGSNVFQTRAGCLIGAEHVNNSYECDIPIGAGICASYQTQTNSPRRARSVASQSIIAYTMSLGAENSVAYSNNSIAIPTNFTISVTTEILPVSMTKTSVDCTMYICGDSTECSNLLLQYGSFCTQLNRALTGIAVEQDKNTQEVFAQVKQIYKTPPIKDFGGFNFSQILPDPSKPSKRSFIEDLLFNKVTLADAGFIKQYGDCLGDIAARDLICAQKFNGLTVLPPLLTDEMIAQYTSALLAGTITSGWTFGAGAALQIPFAMQMAYRFNGIGVTQNVLYENQKLIANQFNSAIGKIQDSLSSTASALGKLQDVVNQNAQALNTLVKQLSSNFGCISSVLNDILSRLDKVEAEVQIDCLITGRLQSLQTYVTQQLIRAAEIRASANLAATKMSECVLGQSKRVDFCGKGYHLMSFPQSAPHGVVFLHVTYVPAQEKNFTTAPAICHDGKAHFPREGVFVSNGTHWFVTQRNFYEPQIITTDNTFVSGNCDVVIGIVNNTVYDPLQPELDSGGGSGGGQIYEGKLTAEGLRFGIVASRFNHALVDRLVEGAIDAIVRHGGREEDITLVRVPGSWEIPVAAGELARKEDIDAVIAIGVLIRGATPHFDYIASEVSKGLADLSLELRKPITFGVITADTLEQAIERAGTKHGNKGWEAALSAIEMANLFKSLR

SEQ ID NO: 8483 - protein, 1307 aa, Artificial Sequence
  SARS-CoV-2/South Korea/SNU01/2020__EPI_ISL_411929 spike protein (1-1147)(A972C_R995C) LumSynth construct
MFVFLVLLPLVSSQCVNLTTRTQLPPAYTNSFTRGVYYPDKVFRSSVLHSTQDLFLPFFSNVTWFHAIHVSGTNGTKRFDNPVLPFNDGVYFASTEKSNIIRGWIFGTTLDSKTQSLLIVNNATNVVIKVCEFQFCNDPFLGVYYHKNNKSWMESEFRVYSSANNCTFEYVSQPFLMDLEGKQGNFKNLREFVFKNIDGYFKIYSKHTPINLVRDLPQGFWALEPLVDLPIGINITRFQTLLALHRSYLTPGDSSSGWTAGAAAYYVGYLQPRTFLLKYNENGTITDAVDCALDPLSETKCTLKSFTVEKGIYQTSNFRVQPTESIVRFPNITNLCPFGEVFNATRFASVYAWNRKRISNCVADYSVLYNSASFSTFKCYGVSPTKLNDLCFTNVYADSFVIRGDEVRQIAPGQTGKIADYNYKLPDDFTGCVIAWNSNNLDSKVGGNYNYLYRLFRKSNLKPFERDISTEIYQAGSTPCNGVEGFNCYFPLQSYGFQPTNGVGYQPYRVVVLSFELLHAPATVCGPKKSTNLVKNKCVNFNFNGLTGTGVLTESNKKFLPFQQFGRDIADTTDAVRDPQTLEILDITPCSFGGVSVITPGTNTSNQVAVLYQDVNCTEVPVAIHADQLTPTWRVYSTGSNVFQTRAGCLIGAEHVNNSYECDIPIGAGICASYQTQTNSPRRARSVASQSIIAYTMSLGAENSVAYSNNSIAIPTNFTISVTTEILPVSMTKTSVDCTMYICGDSTECSNLLLQYGSFCTQLNRALTGIAVEQDKNTQEVFAQVKQIYKTPPIKDFGGFNFSQILPDPSKPSKRSFIEDLLFNKVTLADAGFIKQYGDCLGDIAARDLICAQKFNGLTVLPPLLTDEMIAQYTSALLAGTITSGWTFGAGAALQIPFAMQMAYRFNGIGVTQNVLYENQKLIANQFNSAIGKIQDSLSSTASALGKLQDVVNQNAQALNTLVKQLSSNFGCISSVLNDILSRLDKVEAEVQIDCLITGRLQSLQTYVTQQLIRAAEIRASANLAATKMSECVLGQSKRVDFCGKGYHLMSFPQSAPHGVVFLHVTYVPAQEKNFTTAPAICHDGKAHFPREGVFVSNGTHWFVTQRNFYEPQIITTDNTFVSGNCDVVIGIVNNTVYDPLQPELDSGGGSGGGQIYEGKLTAEGLRFGIVASRFNHALVDRLVEGAIDAIVRHGGREEDITLVRVPGSWEIPVAAGELARKEDIDAVIAIGVLIRGATPHFDYIASEVSKGLADLSLELRKPITFGVITADTLEQAIERAGTKHGNKGWEAALSAIEMANLFKSLR

SEQ ID NO: 8484 - protein, 1307 aa, Artificial Sequence
  SARS-CoV-2/China/WF0004/2020__EPI_ISL_413694 spike protein (1-1147)(A972C_R995C) LumSynth construct
MFVFLVLLPLVSSQCVNLTTRTQLPPAYTNSFTRGVYYPDKVFRSSVLHSTQDLFLPFFSNVTWFHAIHVSGTNGTKRFDNPVLPFNDGVYFASTEKSNIIRGWIFGTTLDSKTQSLLIVNNATNVVIKVCEFQFCNDPFLGVYYHKNNKSWTESEFRVYSSANNCTFEYVSQPFLMDLEGKQGNFKNLREFVFKNIDGYFKIYSKHTPINLVRDLPQGFSALEPLVDLPIGINITRFQTLLALHRSYLTPGDSSSGWTAGAAAYYVGYLQPRTFLLKYNENGTITDAVDCALDPLSETKCTLKSFTVEKGIYQTSNFRVQPTESIVRFPNITNLCPFGEVFNATRFASVYAWNRKRISNCVADYSVLYNSASFSTFKCYGVSPTKLNDLCFTNVYADSFVIRGDEVRQIAPGQTGKIADYNYKLPDDFTGCVIAWNSNNLDSKVGGNYNYLYRLFRKSNLKPFERDISTEIYQAGSTPCNGVEGFNCYFPLQSYGFQPTNGVGYQPYRVVVLSFELLHAPATVCGPKKSTNLVKNKCVNFNFNGLTGTGVLTESNKKFLPFQQFGRDIADTTDAVRDPQTLEILDITPCSFGGVSVITPGTNTSNQVAVLYQDVNCTEVPVAIHADQLTPTWRVYSTGSNVFQTRAGCLIGAEHVNNSYECDIPIGAGICASYQTQTNSPRRARSVASQSIIAYTMSLGAENSVAYSNNSIAIPTNFTISVTTEILPVSMTKTSVDCTMYICGDSTECSNLLLQYGSFCTQLNRALTGIAVEQDKNTQEVFAQVKQIYKTPPIKDFGGFNFSQILPDPSKPSKRSFIEDLLFNKVTLADAGFIKQYGDCLGDIAARDLICAQKFNGLTVLPPLLTDEMIAQYTSALLAGTITSGWTFGAGAALQIPFAMQMAYRFNGIGVTQNVLYENQKLIANQFNSAIGKIQDSLSSTASALGKLQDVVNQNAQALNTLVKQLSSNFGCISSVLNDILSRLDKVEAEVQIDCLITGRLQSLQTYVTQQLIRAAEIRASANLAATKMSECVLGQSKRFDFCGKGYHLMSFPQSAPHGVVFLHVTYVPAQEKNFTTAPAICHDGKAHFPREGVFVSNGTHWFVTQRNFYEPQIITTDNTFVSGNCDVVIGIVNNTVYDPLQPELDSGGGSGGGQIYEGKLTAEGLRFGIVASRFNHALVDRLVEGAIDAIVRHGGREEDITLVRVPGSWEIPVAAGELARKEDIDAVIAIGVLIRGATPHFDYIASEVSKGLADLSLELRKPITFGVITADTLEQAIERAGTKHGNKGWEAALSAIEMANLFKSLR

SEQ ID NO: 8485 - protein, 1307 aa, Artificial Sequence
  SARS-CoV-2/China/WF0028/2020__EPI_ISL_413791 spike protein (1-1147)(A972C_R995C) LumSynth construct
MFVFLVLLPLVSSQCVNLTTRTQLPPAYTNSFTRGVYYPDKVFRSSVLHSTQDLFLPFFSNVTWFHAIHVSGTNGTKRFDNPVLPFNDGVYFASTEKSNIIRGWIFGTTLDSKTQSLLIVNNATNVVIKVCEFQFCNDPFLGVYYHKNNKSWMESEFRVYSSANNCTFEYVSQPFLMDLEGKQGNFKNLREFVFKNIDGYFKIYSKHTPINLVRDLPQGFSALEPLVDLPIGINITRFQTLLALHRSYLTPGDSSSGWTAGAAAYYVGYLQPRTFLLKYNENGTITDAVDCALDPLSETKCTLKSFTVEKGIYQTSNFRVQPTESIVRFPNITNLCPFGEVFNATRFASVYAWNRKRISNCVADYSVLYNSASFSTFKCYGVSPTKLNDLCFTNVYADSFVIRGDEVRQIAPGQTGKIADYNYKLPDDFTGCVIAWNSNNLDSKVGGNYNYLYRLFRKSNLKPFERDISTEIYQAGSTPCNGVEGFNCYFPLQSYGFQPTNGVGYQPYRVVVLSFELLHAPATVCGPKKSTNLVKNKCVNFNFNGLTGTGVLTESNKKFLPFQQFGRDIADTTDAVRDPQTLEILDITPCSFGGVSVITPGTNTSNQVAVLYQDVNCTEVPVAIHADQLTPTWRVYSTGSNVFQTRAGCLIGAEHVNNSYECDIPIGAGICASYQTQTNSPRRARSVASQSIIAYTMSLGAENSVAYSNNSIAIPTNFTISVTTEILPVSMTKTSVDCTMYICGDSTECSNLLLQYGSFCTQLNRALTGIAVEQDKNTQEVFAQVKQIYKTPPIKDFGGFNFSQILPDPSKPSKRSFIEDLLFNKVTLADAGFIKQYGDCLGDIAARDLICAQKFNGLTVLPPLLTDEMIAQYTSALLAGTITSGWTFGAGAALQIPFAMQMAYRFNGIGVTQNVLYENQKLIANQFNSAIGKIQDSLSSTASALGKLQDVVNQNAQALNTLVKQLSSNFGCISSVLNDILSRLDKVEAEVQIDCLITGRLQSLQTYVTQQLIRAAEIRASANLAATKMSECVLGQSKRVDFCGKGYHLMSFPQSAPHGVVFLHVTYVPAQEKNFTTAPAICHDGKAHFPREGVFVSNGTHWFVTQRNFYEPQIITTDNTFVSGNCDVVIGIVNNTVYDPLQPELESGGGSGGGQIYEGKLTAEGLRFGIVASRFNHALVDRLVEGAIDAIVRHGGREEDITLVRVPGSWEIPVAAGELARKEDIDAVIAIGVLIRGATPHFDYIASEVSKGLADLSLELRKPITFGVITADTLEQAIERAGTKHGNKGWEAALSAIEMANLFKSLR

SEQ ID NO: 8486 - protein, 1307 aa, Artificial Sequence
  SARS-CoV-2/2019-nCoV/USA-CruiseA-18/2020__MT159716.1 spike protein (1-1147)(A972C_R995C) LumSynth construct
MFVFLVLLPLVSSQCVNLTTRTQLPPAYTNSFTRGVYYPDKVFRSSVLHSTQDLFLPFFSNVTWFHAIHVSGTNGTKRFDNPVLPFNDGVYFASTEKSNIIRGWIFGTTLDSKTQSLLIVNNATNVVIKVCEFQFCNDPFLGVYYHKNNKSWMESELRVYSSANNCTFEYVSQPFLMDLEGKQGNFKNLREFVFKNIDGYFKIYSKHTPINLVRDLPQGFSALEPLVDLPIGINITRFQTLLALHRSYLTPGDSSSGWTAGAAAYYVGYLQPRTFLLKYNENGTITDAVDCALDPLSETKCTLKSFTVEKGIYQTSNFRVQPTESIVRFPNITNLCPFGEVFNATRFASVYAWNRKRISNCVADYSVLYNSASFSTFKCYGVSPTKLNDLCFTNVYADSFVIRGDEVRQIAPGQTGKIADYNYKLPDDFTGCVIAWNSNNLDSKVGGNYNYLYRLFRKSNLKPFERDISTEIYQAGSTPCNGVEGFNCYFPLQSYGFQPTNGVGYQPYRVVVLSFELLHAPATVCGPKKSTNLVKNKCVNFNFNGLTGTGVLTESNKKFLPFQQFGRDIADTTDAVRDPQTLEILDITPCSFGGVSVITPGTNTSNQVAVLYQDVNCTEVPVAIHADQLTPTWRVYSTGSNVFQTRAGCLIGAEHVNNSYECDIPIGAGICASYQTQTNSPRRARSVASQSIIAYTMSLGAENSVAYSNNSIAIPTNFTISVTTEILPVSMTKTSVDCTMYICGDSTECSNLLLQYGSFCTQLNRALTGIAVEQDKNTQEVFAQVKQIYKTPPIKDFGGFNFSQILPDPSKPSKRSFIEDLLFNKVTLADAGFIKQYGDCLGDIAARDLICAQKFNGLTVLPPLLTDEMIAQYTSALLAGTITSGWTFGAGAALQIPFAMQMAYRFNGIGVTQNVLYENQKLIANQFNSAIGKIQDSLSSTASALGKLQDVVNQNAQALNTLVKQLSSNFGCISSVLNDILSRLDKVEAEVQIDCLITGRLQSLQTYVTQQLIRAAEIRASANLAATKMSECVLGQSKRVDFCGKGYHLMSFPQSAPHGVVFLHVTYVPAQEKNFTTAPAICHDGKAHFPREGVFVSNGTHWFVTQRNFYEPQIITTDNTFVSGNCDVVIGIVNNTVYDPLQPELDSGGGSGGGQIYEGKLTAEGLRFGIVASRFNHALVDRLVEGAIDAIVRHGGREEDITLVRVPGSWEIPVAAGELARKEDIDAVIAIGVLIRGATPHFDYIASEVSKGLADLSLELRKPITFGVITADTLEQAIERAGTKHGNKGWEAALSAIEMANLFKSLR

SEQ ID NO: 8487 - protein, 1307 aa, Artificial Sequence
  SARS-CoV-2/SARS-CoV-2/Yunnan-01/human/2020/CHN__MT049951.1 spike protein (1-1147)(A972C_R995C) LumSynth construct
MFVFLVLLPLVSSQCVNLTTRTQLPPANTNSFTRGVYYPDKVFRSSVLHSTQDLFLPFFSNVTWFHAIHVSGTNGTKRFDNPVLPFNDGVYFASTEKSNIIRGWIFGTTLDSKTQSLLIVNNATNVVIKVCEFQFCNDPFLGVYYHKNNKSWMESEFRVYSSANNCTFEYVSQPFLMDLEGKQGNFKNLREFVFKNIDGYFKIYSKHTPINLVRDLPQGFSALEPLVDLPIGINITRFQTLLALHRSYLTPGDSSSGWTAGAAAYYVGYLQPRTFLLKYNENGTITDAVDCALDPLSETKCTLKSFTVEKGIYQTSNFRVQPTESIVRFPNITNLCPFGEVFNATRFASVYAWNRKRISNCVADYSVLYNSASFSTFKCYGVSPTKLNDLCFTNVYADSFVIRGDEVRQIAPGQTGKIADYNYKLPDDFTGCVIAWNSNNLDSKVGGNYNYLYRLFRKSNLKPFERDISTEIYQAGSTPCNGVEGFNCYFPLQSYGFQPTNGVGYQPYRVVVLSFELLHAPATVCGPKKSTNLVKNKCVNFNFNGLTGTGVLTESNKKFLPFQQFGRDIADTTDAVRDPQTLEILDITPCSFGGVSVITPGTNTSNQVAVLYQDVNCTEVPVAIHADQLTPTWRVYSTGSNVFQTRAGCLIGAEHVNNSYECDIPIGAGICASYQTQTNSPRRARSVASQSIIAYTMSLGAENSVAYSNNSIAIPTNFTISVTTEILPVSMTKTSVDCTMYICGDSTECSNLLLQYGSFCTQLNRALTGIAVEQDKNTQEVFAQVKQIYKTPPIKDFGGFNFSQILPDPSKPSKRSFIEDLLFNKVTLADAGFIKQYGDCLGDIAARDLICAQKFNGLTVLPPLLTDEMIAQYTSALLAGTITSGWTFGAGAALQIPFAMQMAYRFNGIGVTQNVLYENQKLIANQFNSAIGKIQDSLSSTASALGKLQDVVNQNAQALNTLVKQLSSNFGCISSVLNDILSRLDKVEAEVQIDCLITGRLQSLQTYVTQQLIRAAEIRASANLAATKMSECVLGQSKRVDFCGKGYHLMSFPQSAPHGVVFLHVTYVPAQEKNFTTAPAICHDGKAHFPREGVFVSNGTHWFVTQRNFYEPQIITTDNTFVSGNCDVVIGIVNNTVYDPLQPELDSGGGSGGGQIYEGKLTAEGLRFGIVASRFNHALVDRLVEGAIDAIVRHGGREEDITLVRVPGSWEIPVAAGELARKEDIDAVIAIGVLIRGATPHFDYIASEVSKGLADLSLELRKPITFGVITADTLEQAIERAGTKHGNKGWEAALSAIEMANLFKSLR

SEQ ID NO: 8488 - protein, 1307 aa, Artificial Sequence
  SARS-CoV-2/USA/WA-UW292/2020__EPI_ISL_418077 spike protein (1-1147)(A972C_R995C) LumSynth construct
MFVFLVLLPLVSSQCVNLTTRTQLPPAYTNSFTRGVYYPDKVFRSSVLHSTQDLFLPFFSNVTWFHAIHVSGTNGTKRFDNPVLPFNDGVYFASTEKSNIIRGWIFGTTLDSKTQSLLIVNNATNVVIKVCEFQFCNDPFLGVYYHKNNKSWMESEFRVYSSANNCTFEYVSQPFLMDLEGKQGNFKNLREFVFKNIDGYFKIYSKHTPINLVRDLPQGFSALEPLVDLPIGINITRFQTLLALHRSYLTPGDSSSGWTAGAAAYYVGYLQPRTFLLKYNENGTITDAVDCALDPLSETKCTLKSFTVEKGIYQTSNFRVQPTESIVRFPNITNLCPFGEVFNATRFASVYAWNRKRISNCVADYSVLYNSASFSTFKCYGVSPTKLNDLCFTNVYADSFVIRGDEVRQIAPGQTGKIADYNYKLPDDFTGCVIAWNSNNLDSKVGGNYNYLYRLFRKSNLKPFERDISTEIYQASSTPCNGVEGFNCYFPLQSYGFQPTNGVGYQPYRVVVLSFELLHAPATVCGPKKSTNLVKNKCVNFNFNGLTGTGVLTESNKKFLPFQQFGRDIADTTDAVRDPQTLEILDITPCSFGGVSVITPGTNTSNQVAVLYQDVNCTEVPVAIHADQLTPTWRVYSTGSNVFQTRAGCLIGAEHVNNSYECDIPIGAGICASYQTQTNSPRRARSVASQSIIAYTMSLGAENSVAYSNNSIAIPTNFTISVTTEILPVSMTKTSVDCTMYICGDSTECSNLLLQYGSFCTQLNRALTGIAVEQDKNTQEVFAQVKQIYKTPPIKDFGGFNFSQILPDPSKPSKRSFIEDLLFNKVTLADAGFIKQYGDCLGDIAARDLICAQKFNGLTVLPPLLTDEMIAQYTSALLAGTITSGWTFGAGAALQIPFAMQMAYRFNGIGVTQNVLYENQKLIANQFNSAIGKIQDSLSSTASALGKLQDVVNQNAQALNTLVKQLSSNFGCISSVLNDILSRLDKVEAEVQIDCLITGRLQSLQTYVTQQLIRAAEIRASANLAATKMSECVLGQSKRVDFCGKGYHLMSFPQSAPHGVVFLHVTYVPAQEKNFTTAPAICHDGKAHFPREGVFVSNGTHWFVTQRNFYEPQIITTDNTFVSGNCDVVIGIVNNTVYDPLQPELDSGGGSGGGQIYEGKLTAEGLRFGIVASRFNHALVDRLVEGAIDAIVRHGGREEDITLVRVPGSWEIPVAAGELARKEDIDAVIAIGVLIRGATPHFDYIASEVSKGLADLSLELRKPITFGVITADTLEQAIERAGTKHGNKGWEAALSAIEMANLFKSLR

SEQ ID NO: 8489 - protein, 1307 aa, Artificial Sequence
  SARS-CoV-2/Iceland/192/2020__EPI_ISL_417819 spike protein (1-1147)(A972C_R995C) LumSynth construct
MFVFFVLLPLVSSQCVNLTTRTQLPPAYTNSFTRGVYYPDKVFRSSVLHSTQDLFLPFFSNVTWFHAIHVSGTNGTKRFDNPVLPFNDGVYFASTEKSNIIRGWIFGTTLDSKTQSLLIVNNATNVVIKVCEFQFCNDPFLGVYYHKNNKSWMESEFRVYSSANNCTFEYVSQPFLMDLEGKQGNFKNLREFVFKNIDGYFKIYSKHTPINLVRDLPQGFSALEPLVDLPIGINITRFQTLLALHRSYLTPGDSSSGWTAGAAAYYVGYLQPRTFLLKYNENGTITDAVDCALDPLSETKCTLKSFTVEKGIYQTSNFRVQPTESIVRFPNITNLCPFGEVFNATRFASVYAWNRKRISNCVADYSVLYNSASFSTFKCYGVSPTKLNDLCFTNVYADSFVIRGDEVRQIAPGQTGKIADYNYKLPDDFTGCVIAWNSNNLDSKVGGNYNYLYRLFRKSNLKPFERDISTEIYQAGSTPCNGVEGFNCYFPLQSYGFQPTNGVGYQPYRVVVLSFELLHAPATVCGPKKSTNLVKNKCVNFNFNGLTGTGVLTESNKKFLPFQQFGRDIADTTDAVRDPQTLEILDITPCSFGGVSVITPGTNTSNQVAVLYQGVNCTEVPVAIHADQLTPTWRVYSTGSNVFQTRAGCLIGAEHVNNSYECDIPIGAGICASYQTQTNSPRRARSVASQSIIAYTMSLGAENSVAYSNNSIAIPTNFTISVTTEILPVSMTKTSVDCTMYICGDSTECSNLLLQYGSFCTQLNRALTGIAVEQDKNTQEVFAQVKQIYKTPPIKDFGGFNFSQILPDPSKPSKRSFIEDLLFNKVTLADAGFIKQYGDCLGDIAARDLICAQKFNGLTVLPPLLTDEMIAQYTSALLAGTITSGWTFGAGAALQIPFAMQMAYRFNGIGVTQNVLYENQKLIANQFNSAIGKIQDSLSSTASALGKLQDVVNQNAQALNTLVKQLSSNFGCISSVLNDILSRLDKVEAEVQIDCLITGRLQSLQTYVTQQLIRAAEIRASANLAATKMSECVLGQSKRVDFCGKGYHLMSFPQSAPHGVVFLHVTYVPAQEKNFTTAPAICHDGKAHFPREGVFVSNGTHWFVTQRNFYEPQIITTDNTFVSGNCDVVIGIVNNTVYDPLQPELDSGGGSGGGQIYEGKLTAEGLRFGIVASRFNHALVDRLVEGAIDAIVRHGGREEDITLVRVPGSWEIPVAAGELARKEDIDAVIAIGVLIRGATPHFDYIASEVSKGLADLSLELRKPITFGVITADTLEQAIERAGTKHGNKGWEAALSAIEMANLFKSLR

SEQ ID NO: 8490 - protein, 1307 aa, Artificial Sequence
  SARS-CoV-2/Belgium/ULG-6939/2020__EPI_ISL_417020 spike protein (1-1147)(A972C_R995C) LumSynth construct
MFVFLVLLPLVSSQCVNLTTRTQLPPAYTNSFTRGVYYPDKVFRSSVLHSTQDLFLPFFSNVTWFHAIHVSGTNGTKRFDNPVLPFNDGVYFASTEKSNIIRGWIFGTTLDSKTQSLLIVNNATNVVIKVCEFQFCNDPFLGVYYHKNNKSWMESEFRVYSSANNCTFEYVSQPFLMDLEGKQGNFKNLREFVFKNIDGYFKIYSKHTPINLVRDLPQGFSALEPLVDLPIGINITRFQTLLALHRSYLTPGDSSSGWTAGAAAYYVGYLQPRTFLLKYNENGTITDAVDCALDPLSETKCTLKSFTVEKGIYQTSNFRVQPTESIVRFPNITNLCPFGEVFNATRFASVYAWNRKRISNCVADYSVLYNSASFSTFKCYGVSPTKLNDLCFTNVYADSFVIRGDEVRQIAPGQTGKIADYNYKLPDDFTGCVIAWNSNNLDSKVGGNYNYLYRLFRKSNLKPFERDISTEIYQAGSTPCNGVEGFNCYFPLQSYGFQPTNGVGYQPYRVVVLSFELLHAPATVCGPKKSTNLVKNKCVNFNFNGLTGTGVLTESNKKFLPFQQFGRDIADTTDAVRDPQTLEILDITPCSFGGVSVITPGTNTSNQVAVLYQGVNCTEVPVAIHADQLTPTWRVYSTGSNVFQTRAGCLIGAEHVNNSYECDIPIGAGICASYQTQTNSPRRARSVASQSIIAYTMSLGAENSVVYSNNSIAIPTNFTISVTTEILPVSMTKTSVDCTMYICGDSTECSNLLLQYGSFCTQLNRALTGIAVEQDKNTQEVFAQVKQIYKTPPIKDFGGFNFSQILPDPSKPSKRSFIEDLLFNKVTLADAGFIKQYGDCLGDIAARDLICAQKFNGLTVLPPLLTDEMIAQYTSALLAGTITSGWTFGAGAALQIPFAMQMAYRFNGIGVTQNVLYENQKLIANQFNSAIGKIQDSLSSTASALGKLQDVVNQNAQALNTLVKQLSSNFGCISSVLNDILSRLDKVEAEVQIDCLITGRLQSLQTYVTQQLIRAAEIRASANLAATKMSECVLGQSKRVDFCGKGYHLMSFPQSAPHGVVFLHVTYVPAQEKNFTTAPAICHDGKAHFPREGVFVSNGTHWFVTQRNFYEPQIITTDNTFVSGNCDVVIGIVNNTVYDPLQPELDSGGGSGGGQIYEGKLTAEGLRFGIVASRFNHALVDRLVEGAIDAIVRHGGREEDITLVRVPGSWEIPVAAGELARKEDIDAVIAIGVLIRGATPHFDYIASEVSKGLADLSLELRKPITFGVITADTLEQAIERAGTKHGNKGWEAALSAIEMANLFKSLR

SEQ ID NO: 8491 - protein, 1307 aa, Artificial Sequence
  SARS-CoV-2/France/HF2496/2020__EPI_ISL_418231 spike protein (1-1147)(A972C_R995C) LumSynth construct
MFVFLVLLPLVSSQCVNLTTRTQLPPAYTNSFTRGVYYPDKVFRSSVLHSTQDLFLPFFSNVTWFHAIHVSGTNGTKRFDNPVLPFNDGVYFASTEKSNIIRGWIFGTTLDSKTQSLLIVNNATNVVIKVCEFQFCNDPFLGVYYHKNNKSWMESEFRVYSSANNCTFEYVSQPFLMDLEGKQGNFKNLREFVFKNIDGYFKIYSKHTPINLVRDLPQGFSALEPLVDLPIGINITRFQTLLALHRSYLTPGDSSSGWTAGAAAYYVGYLQPRTFLLKYNENGTITDAVDCALDPLSETKCTLKSFTVEKGIYQTSNFRVQPTESIVRFPNITNLCPFGEVFNATRFASVYAWNRKRISNCVADYSVLYNSASFSTFKCYGVSPTKLNDLCFTNVYADSFVIRGDEVRQIAPGQTGKIADYNYKLPDDFTGCVIAWNSNNLDSKVGGNYNYLYRLFRKSNLKPFERDISTEIYQAGSTPCNGVEGFNCYFPLQSYGFQPTNGVGYQPYRVVVLSFELLHAPATVCGPKKSTNLVKNKCVNFNFNGLTGTGVLTESNKKFLPFQQFGRDIADTTDAVRDPQTLEILDITPCSFGGVSVITPGTNTSNQVAVLYQGVNCTEVPVAIHADQLTPTWRVYSTGSNVFQTRAGCLIGAEHVNNSYECDIPIGAGICASYQTQTNSPRRARSVASQSIIAYTMSLGAENSVAYSNNSIAIPTNFTISVTTEILPVSMTKTSVDCTMYICGDSTECSNLLLQYGSFCTQLNRALTGIAVEQDKNTQEVFAQVKQIYKTPPIKDFGGFNFSQILPDPSKPSKRSFIEDLLFNKVTLADAGFIKQYGDCLGDIVARDLICAQKFNGLTVLPPLLTDEMIAQYTSALLAGTITSGWTFGAGAALQIPFAMQMAYRFNGIGVTQNVLYENQKLIANQFNSAIGKIQDSLSSTASALGKLQDVVNQNAQALNTLVKQLSSNFGCISSVLNDILSRLDKVEAEVQIDCLITGRLQSLQTYVTQQLIRAAEIRASANLAATKMSECVLGQSKRVDFCGKGYHLMSFPQSAPHGVVFLHVTYVPAQEKNFTTAPAICHDGKAHFPREGVFVSNGTHWFVTQRNFYEPQIITTDNTFVSGNCDVVIGIVNNTVYDPLQPELDSGGGSGGGQIYEGKLTAEGLRFGIVASRFNHALVDRLVEGAIDAIVRHGGREEDITLVRVPGSWEIPVAAGELARKEDIDAVIAIGVLIRGATPHFDYIASEVSKGLADLSLELRKPITFGVITADTLEQAIERAGTKHGNKGWEAALSAIEMANLFKSLR

SEQ ID NO: 8492 - protein, 1307 aa, Artificial Sequence
  SARS-CoV-2/USA/WA-UW291/2020__EPI_ISL_418076 spike protein (1-1147)(A972C_R995C) LumSynth construct
MFVFLVLLPLVSSQCVNLTTRTQLPPAYTNSFTRGVYYPDKVFRSSVLHSTQDLFLPFFSNVTWFHAIHVSGTNGTKRFDNPVLPFNDGVYFASTEKSNIIRGWIFGTTLDSKTQSLLIVNNATNVVIKVCEFQFCNDPFLGVYYHKNNKSWMESEFRVYSSANNCTFEYVSQPFLMDLEGKQGNFKNLREFVFKNIDGYFKIYSKHTPINLVRDLPQGFSALEPLVDLPIGINITRFQTLLALHRSYLTPGDSSSGWTAGAAAYYVGYLQPRTFLLKYNENGTITDAVDCALDPLSETKCTLKSFTVEKGIYQTSNFRVQPTESIVRFPNITNLCPFGEVFNATRFASVYAWNRKRISNCVADYSVLYNSASFSTFKCYGVSPTKLNDLCFTNVYADSFVIRGDEVRQIAPGQTGKIADYNYKLPDDFTGCVIAWNSNNLDSKVGGNYNYLYRLFRKSNLKPFERDISTEIYQAGSTPCNGVEGFNCYFPLQSYGFQPTNGVGYQPYRVVVLSFELLHAPATVCGPKKSTNLVKNKCVNFNFNGLTGTGVLTESNKKFLPFQQFGRDIADTTDAVRDPQTLEILDITPCSFGGVSVITPGTNTSNQVAVLYQGVNCTEVPVAIHADQLTPTWRVYSTGSNVFQTRAGCLIGAEHVNNSYECDIPIGAGICASYQTQTNSPRRARSVASQSIIAYTMSLGAENSVAYSNNSIAIPTNFTISVTTEILPVSMTKTSVDCTMYICGDSTECSNLLLQYGSFCTQLNRALTGIAVEQDKNTQEVFAQVKQIYKTPPIKDFGGFNFSQILPDPSKPSKRSFIEDLLFNKVTLADAGFIKQYGDCLGDIAARDLICAQKFNGLTVLPPLLTDEMIAQYTSALLAGTITSGWTFGAGAALQIPFAMQMAYRFNGIGVTQNVLYENQKLIANQFNSAIGKIQYSLSSTASALGKLQDVVNQNAQALNTLVKQLSSNFGCISSVLNDILSRLDKVEAEVQIDCLITGRLQSLQTYVTQQLIRAAEIRASANLAATKMSECVLGQSKRVDFCGKGYHLMSFPQSAPHGVVFLHVTYVPAQEKNFTTAPAICHDGKAHFPREGVFVSNGTHWFVTQRNFYEPQIITTDNTFVSGNCDVVIGIVNNTVYDPLQPELDSGGGSGGGQIYEGKLTAEGLRFGIVASRFNHALVDRLVEGAIDAIVRHGGREEDITLVRVPGSWEIPVAAGELARKEDIDAVIAIGVLIRGATPHFDYIASEVSKGLADLSLELRKPITFGVITADTLEQAIERAGTKHGNKGWEAALSAIEMANLFKSLR

SEQ ID NO: 8493 - protein, 1307 aa, Artificial Sequence; identical to SEQ ID NO: 8456
  SARS-CoV-2/Portugal/PT0034/2020__EPI_ISL_418019 spike protein (1-1147)(A972C_R995C) LumSynth construct

SEQ ID NO: 8494 - protein, 1307 aa, Artificial Sequence; identical to SEQ ID NO: 8448
  SARS-CoV-2/Iceland/202/2020__EPI_ISL_417750 spike protein (1-1147)(A972C_R995C) LumSynth construct

SEQ ID NO: 8495 - protein, 1307 aa, Artificial Sequence
  SARS-CoV-2/USA/WA-UW261/2020__EPI_ISL_418046 spike protein (1-1147)(A972C_R995C) LumSynth construct
MFVFLVLLPLVSSQCVNLTTRTQLPPAYTNSFTRGVYYPDKVFRSSVLHSTQDLFLPFFSNVTWFHAIHVSGTNGTKRFDNPVLPFNDGVYFASTEKSNIIRGWIFGTTLDSKTQSLLIVNNATNVVIKVCEFQFCNDPFLGVYYHKNNKSWMESEFRVYSSANNCTFEYVSQPFLMDLEGKQGNFKNLREFVFKNIDGYFKIYSKHTPINLVRDLPQGFSALEPLVDLPIGINITRFQTLLALHRSYLTPGDSSSGWTAGAAAYYVGYLQPRTFLLKYNENGTITDAVDCALDPLSETKCTLKSFTVEKGIYQTSNFRVQPTESIVRFPNITNLCPFGEVFNATRFTSVYAWNRKRISNCVADYSVLYNSASFSTFKCYGVSPTKLNDLCFTNVYADSFVIRGDEVRQIAPGQTGKIADYNYKLPDDFTGCVIAWNSNNLDSKVGGNYNYLYRLFRKSNLKPFERDISTEIYQAGSTPCNGVEGFNCYFPLQSYGFQPTNGVGYQPYRVVVLSFELLHAPATVCGPKKSTNLVKNKCVNFNFNGLTGTGVLTESNKKFLPFQQFGRDIADTTDAVRDPQTLEILDITPCSFGGVSVITPGTNTSNQVAVLYQDVNCTEVPVAIHADQLTPTWRVYSTGSNVFQTRAGCLIGAEHVNNSYECDIPIGAGICASYQTQTNSPRRARSVASQSIIAYTMSLGAENSVAYSNNSIAIPTNFTISVTTEILPVSMTKTSVDCTMYICGDSTECSNLLLQYGSFCTQLNRALTGIAVEQDKNTQEVFAQVKQIYKTPPIKDFGGFNFSQILPDPSKPSKRSFIEDLLFNKVTLADAGFIKQYGDCLGDIAARDLICAQKFNGLTVLPPLLTDEMIAQYTSALLAGTITSGWTFGAGAALQIPFAMQMAYRFNGIGVTQNVLYENQKLIANQFNSAIGKIQDSLSSTASALGKLQDVVNQNAQALNTLVKQLSSNFGCISSVLNDILSRLDKVEAEVQIDCLITGRLQSLQTYVTQQLIRAAEIRASANLAATKMSECVLGQSKRVDFCGKGYHLMSFPQSAPHGVVFLHVTYVPAQEKNFTTAPAICHDGKAHFPREGVFVSNGTHWFVTQRNFYEPQIITTDNTFVSGNCDVVIGIVNNTVYDPLQPELDSGGGSGGGQIYEGKLTAEGLRFGIVASRFNHALVDRLVEGAIDAIVRHGGREEDITLVRVPGSWEIPVAAGELARKEDIDAVIAIGVLIRGATPHFDYIASEVSKGLADLSLELRKPITFGVITADTLEQAIERAGTKHGNKGWEAALSAIEMANLFKSLR

SEQ ID NO: 8496 - protein, 1307 aa, Artificial Sequence
  SARS-CoV-2/Portugal/PT0035/2020__EPI_ISL_418020 spike protein (1-1147)(A972C_R995C) LumSynth construct
MFVFLVLLPLVSSQCVNLTTRTQLPPAYTNSFTRGVYYPDKVFRSSVLHSTQDLFLPFFSNVTWFHAIHVSGTNGTKRFDNPVLPFNDGVYFASTEKSNIIRGWIFGTTLDSKTQSLLIVNNATNVVIKVCEFQFCNDPFLGVYYHKNNKSWMESEFRVYSSANNCTFEYVSQPFLMDLEGKQGNFKNLREFVFKNIDGYFKIYSKHTPINLVRDLPQGFSALEPLVDLPIGINITRFQTLLALHRSYLTPGDSSSGWTAGAAAYYVGYLQPRTFLLKYNENGTITDAVDCALDPLSETKCTLKSFTVEKGIYQTSNFRVQPTESIVRFPNITNLCPFGEVFNATRFASVYAWNRKRISNCVADYSVLYNSASFSTFKCYGVSPTKLNDLCFTNVYADSFVIRGDEVRQIAPGQTGKIADYNYKLPDDFTGCVIAWNSNNLDSKVGGNYNYLYRLFRKSNLKPFERDISTEIYQAGSTPCNGVEGFNCYFPLQSYGFQPTNGVGYQPYRVVVLSFELLHAPATVCGPKKSTNLVKNKCVNFNFNGLTGTGVLTESNKKFLPFQQFGRDIADTTDAVRDPQTLEILDITPCSFGGVSVITPGTNTSNQVAVLYQDVNCTEVPVAIHADQLTPTWRVYSTGSNVFQTRAGCLIGAEHVNNSYECDIPIGAGICASYQTQTNSPRRARSVASQSIIAYTMSLGAENSVAYSNNSIAIPTNFTISVTTEILPVSMTKTSVDCTMYICGDSTECSNLLLQYGSFCTQLNRALTGIAVEQDKNTQEVFAQVKQIYKTPPIKDFGGFNFSQILPDPSKPSKRSFIEDLLFNKVTLADAGFIKQYGDCLGDISARDLICAQKFNGLTVLPPLLTDEMIAQYTSALLAGTITSGWTFGAGAALQIPFAMQMAYRFNGIGVTQNVLYENQKLIANQFNSAIGKIQDSLSSTASALGKLQDVVNQNAQALNTLVKQLSSNFGCISSVLNDILSRLDKVEAEVQIDCLITGRLQSLQTYVTQQLIRAAEIRASANLAATKMSECVLGQSKRVDFCGKGYHLMSFPQSAPHGVVFLHVTYVPAQEKNFTTAPAICHDGKAHFPREGVFVSNGTHWFVTQRNFYEPQIITTDNTFVSGNCDVVIGIVNNTVYDPLQPELDSGGGSGGGQIYEGKLTAEGLRFGIVASRFNHALVDRLVEGAIDAIVRHGGREEDITLVRVPGSWEIPVAAGELARKEDIDAVIAIGVLIRGATPHFDYIASEVSKGLADLSLELRKPITFGVITADTLEQAIERAGTKHGNKGWEAALSAIEMANLFKSLR

SEQ ID NO: 8497 - protein, 1307 aa, Artificial Sequence
  SARS-CoV-2/USA/NY-NYUMC7/2020__EPI_ISL_418192 spike protein (1-1147)(A972C_R995C) LumSynth construct
MFVFLVLLPLVSSQCVNLTTRTQLPPAYTNSFTRGVYYPDKVFRSSVLHSTQDLFLPFFSNVTWFHAIHVSGTNGTKRFDNPVLPFNDGVYFASTEKSNIIRGWIFGTTLDSKTQSLLIVNNATNVVIKVCEFQFCNDPFLGVYHHKNNKSWMESEFRVYSSANNCTFEYVSQPFLMDLEGKQGNFKNLREFVFKNIDGYFKIYSKHTPINLVRDLPQGFSALEPLVDLPIGINITRFQTLLALHRSYLTPGDSSSGWTAGAAAYYVGYLQPRTFLLKYNENGTITDAVDCALDPLSETKCTLKSFTVEKGIYQTSNFRVQPTESIVRFPNITNLCPFGEVFNATRFASVYAWNRKRISNCVADYSVLYNSASFSTFKCYGVSPTKLNDLCFTNVYADSFVIRGDEVRQIAPGQTGKIADYNYKLPDDFTGCVIAWNSNNLDSKVGGNYNYLYRLFRKSNLKPFERDISTEIYQAGSTPCNGVEGFNCYFPLQSYGFQPTNGVGYQPYRVVVLSFELLHAPATVCGPKKSTNLVKNKCVNFNFNGLTGTGVLTESNKKFLPFQQFGRDIADTTDAVRDPQTLEILDITPCSFGGVSVITPGTNTSNQVAVLYQGVNCTEVPVAIHADQLTPTWRVYSTGSNVFQTRAGCLIGAEHVNNSYECDIPIGAGICASYQTQTNSPRRARSVASQSIIAYTMSLGAENSVAYSNNSIAIPTNFTISVTTEILPVSMTKTSVDCTMYICGDSTECSNLLLQYGSFCTQLNRALTGIAVEQDKNTQEVFAQVKQIYKTPPIKDFGGFNFSQILPDPSKPSKRSFIEDLLFNKVTLADAGFIKQYGDCLGDIAARDLICAQKFNGLTVLPPLLTDEMIAQYTSALLAGTITSGWTFGAGAALQIPFAMQMAYRFNGIGVTQNVLYENQKLIANQFNSAIGKIQDSLSSTASALGKLQDVVNQNAQALNTLVKQLSSNFGCISSVLNDILSRLDKVEAEVQIDCLITGRLQSLQTYVTQQLIRAAEIRASANLAATKMSECVLGQSKRVDFCGKGYHLMSFPQSAPHGVVFLHVTYVPAQEKNFTTAPAICHDGKAHFPREGVFVSNGTHWFVTQRNFYEPQIITTDNTFVSGNCDVVIGIVNNTVYDPLQPELDSGGGSGGGQIYEGKLTAEGLRFGIVASRFNHALVDRLVEGAIDAIVRHGGREEDITLVRVPGSWEIPVAAGELARKEDIDAVIAIGVLIRGATPHFDYIASEVSKGLADLSLELRKPITFGVITADTLEQAIERAGTKHGNKGWEAALSAIEMANLFKSLR

SEQ ID NO: 8498 - protein, 1307 aa, Artificial Sequence
  SARS-CoV-2/Iceland/189/2020__EPI_ISL_417709 spike protein (1-1147)(A972C_R995C) LumSynth construct
MFVFLVLLPLVSSQCVNLTTRTQLPPAYTNSFTRGVYYPDKVFRSSVLHSTQDLFLPFFSNVTWFHAIHVSGTNGTKRFDNPVLPFNDGVYFASTEKSNIIRGWIFGTTLDSKTQSLLIVNNATNVVIKVCEFQFCNDPFLGVYYHKNNKSWMESEFRVYSSANNCTFEYVSQPFLMDLEGKQGNFKNLREFVFKNIDGYFKIYSKHTPINLVRDLPQGFSALEPLVDLPIGINITRFQTLLALHRSYLTPGDSSSGWTAGAAAYYVGYLQPRTFLLKYNENGTITDAVDCALDPLSETKCTLKSFTVEKGIYQTSNFRVQPTESIVRFPNITNLCPFGEVFNATRFASVYAWNRKRISNCVADYSVLYNSASFSTFKCYGVSPTKLNDLCFTNVYADSFVIRGDEVRQIAPGQTGKIADYNYKLPDDFTGCVIAWNSNNLDSKVGGNYNYLYRLFRKSNLKPFERDISTEIYQAGSTPCNGVEGFNCYFPLQSYGFQPTNGVGYQPYRVVVLSFELLHAPATVCGPKKSTNLVKNKCVNFNFNGLTGTGVLTESNKKFLPFQQFGRDIADTTDAVRDPQTLEILDITPCSFGGVSVITPGTNTSNQVAVLYQGVNCTEVPVAIHADQLTPTWRVYSTGSNVFQTRAGCLIGAEHVNNSYECDIPIGAGICASYQTQTNSPRRARSVASQSIIAYTMSLGAENSVAYSNNSIAIPTNFTISVTTEILPVSMTKTSVDCTMYICGDSTECSNLLLQYGSFCTQLNRALTGIAVEQDKNTQEVFAQVKQIYKTPPIKDFGGFNFSQILPDPSKPSKRSFIEDLLFNKVTLADAGFTKQYGDCLGDIAARDLICAQKFNGLTVLPPLLTDEMIAQYTSALLAGTITSGWTFGAGAALQIPFAMQMAYRFNGIGVTQNVLYENQKLIANQFNSAIGKIQDSLSSTASALGKLQDVVNQNAQALNTLVKQLSSNFGCISSVLNDILSRLDKVEAEVQIDCLITGRLQSLQTYVTQQLIRAAEIRASANLAATKMSECVLGQSKRVDFCGKGYHLMSFPQSAPHGVVFLHVTYVPAQEKNFTTAPAICHDGKAHFPREGVFVSNGTHWFVTQRNFYEPQIITTDNTFVSGNCDVVIGIVNNTVYDPLQPELDSGGGSGGGQIYEGKLTAEGLRFGIVASRFNHALVDRLVEGAIDAIVRHGGREEDITLVRVPGSWEIPVAAGELARKEDIDAVIAIGVLIRGATPHFDYIASEVSKGLADLSLELRKPITFGVITADTLEQAIERAGTKHGNKGWEAALSAIEMANLFKSLR

SEQ ID NO: 8499 - protein, 1307 aa, Artificial Sequence
  SARS-CoV-2/Australia/NSW56/2020__EPI_ISL_417408 spike protein (1-1147)(A972C_R995C) LumSynth construct
MFVFLVLLPLVSSQCVNLTTRTQLPPAYTNSFTRGVYYPDKVFRSSVLHSTQDLFLPFFSNVTWFHAIHVSGTNGTKRFDNPVLPFNDGVYFASTEKSNIIRGWIFGTTLDSKTQSLLIVNNATNVVIKVCEFQFCNDPFLGVYYHKNNKSWMESEFRVYSSANNCTFEYVSQPFLMDLEGKQGNFKNLREFVFKNIDGYFKIYSKHTPINLVRDLPQGFSALEPLVDLPIGINITRFQTLLALHRSYLTPGDSSSGWTAGAAAYYVGYLQPRTFLLKYNENGTITDAVDCALDPLSETKCTLKSFTVEKGIYQTSNFRVQPTESIVRFPNITNLCPFGEVFNATRFASVYAWNRKRISNCVADYSVLYNSASFSTFKCYGVSPTKLNDLCFTNVYADSFVIRGDEVRQIAPGQTGKIADYNYKLPDDFTGCVIAWNSNNLDSKVGGNYNYLYRLFRKSNLKPFERDISTEIYQAGSTPCNGVEGFNCYFPLQSYGFQPTNGVGYQPYRVVVLSFELLHAPATVCGPKKSTNLVKNKCVNFNFNGLTGTGVLTESNKKFLPFQQFGRDIADTTDAVRDPQTLEILDITPCSFGGVSVITPGTNTSNQVAVLYQDVNCTEVPVAIHADQLTPTWRVYSTGSNVFQTRAGCLIGAEHVNNSYECDIPIGAGICASYQTQTNSPRRARSVASQSIIAYTMSLGAENSVAYSNNSIAIPTNFTISVTTEILPVSMTKTSVDCTMYICGDSTECSNLLLQYGSFCTQLNRALTGIAVEQDKNTQEVFAQVKQIYKTPPIKDFGGFNFSQILPDSSKPSKRSFIEDLLFNKVTLADAGFIKQYGDCLGDIAARDLICAQKFNGLTVLPPLLTDEMIAQYTSALLAGTITSGWTFGAGAALQIPFAMQMAYRFNGIGVTQNVLYENQKLIANQFNSAIGKIQDSLSSTASALGKLQDVVNQNAQALNTLVKQLSSNFGCISSVLNDILSRLDKVEAEVQIDCLITGRLQSLQTYVTQQLIRAAEIRASANLAATKMSECVLGQSKRVDFCGKGYHLMSFPQSAPHGVVFLHVTYVPAQEKNFTTAPAICHDGKAHFPREGVFVSNGTHWFVTQRNFYEPQIITTDNTFVSGNCDVVIGIVNNTVYDPLQPELDSGGGSGGGQIYEGKLTAEGLRFGIVASRFNHALVDRLVEGAIDAIVRHGGREEDITLVRVPGSWEIPVAAGELARKEDIDAVIAIGVLIRGATPHFDYIASEVSKGLADLSLELRKPITFGVITADTLEQAIERAGTKHGNKGWEAALSAIEMANLFKSLR

SEQ ID NO: 8500 - protein, 1307 aa, Artificial Sequence
  SARS-CoV-2/Iceland/280/2020__EPI_ISL_417608 spike protein (1-1147)(A972C_R995C) LumSynth construct
MFVFLVLLPLVSSQCVNLTTRTQLPPAYTNSFTRGVYYPDKVFRSSVLHSTQDLFLPFFSNVTWFHAIHVSGTNGTKRFDNPVLPFNDGVYFASTEKSNIIRGWIFGTTLDSKTQSLLIVNNATNVVIKVCEFQFCNDPFLGVYYHKNNKSWMESEFRVYSSANNCTFEYVSQPFLMDLEGKQGNFKNLREFVFKNIDGYFKIYSKHTPINLVRDLPQGFSALEPLVDLPIGINITRFQTLLALHRSYLTPGDSSSGWTAGAAAYYVGYLQPRTFLLKYNENGTITDAVDCALDPLSETKCTLKSFTVEKGIYQTSNFRVQPTESIVRFPNITNLCPFGEVFNATRFASVYAWNRKRISNCVADYSVLYNSASFSTFKCYGVSPTKLNDLCFTNVYADSFVIRGDEVRQIAPGQTGKIADYNYKLPDDFTGCVIAWNSNNLDSKVGGNYNYLYRLFRKSNLKPFERDISTEIYQAGSTPCNGVEGFNCYFPLQSYGFQPTNGVGYQPYRVVVLSFELLHAPATVCGPKKSTNLVKNKCVNFNFNGLTGTGVLTESNKKFLPFQQFGRDIADTTDAVRDPQTLEILDITPCSFGGVSVITPGTNTSNQVAVLYQGVNCTEVPVAIHADQLTPTWRVYSTGSNVFQTRAGCLIGAEHVNNSYECDIPIGAGICASYHTQTNSPRRARSVASQSIIAYTMSLGAENSVAYSNNSIAIPTNFTISVTTEILPVSMTKTSVDCTMYICGDSTECSNLLLQYGSFCTQLNRALTGIAVEQDKNTQEVFAQVKQIYKTPPIKDFGGFNFSQILPDPSKPSKRSFIEDLLFNKVTLADAGFIKQYGDCLGDIAARDLICAQKFNGLTVLPPLLTDEMIAQYTSALLAGTITSGWTFGAGAALQIPFAMQMAYRFNGIGVTQNVLYENQKLIANQFNSAIGKIQDSLSSTASALGKLQDVVNQNAQALNTLVKQLSSNFGCISSVLNDILSRLDKVEAEVQIDCLITGRLQSLQTYVTQQLIRAAEIRASANLAATKMSECVLGQSKRVDFCGKGYHLMSFPQSAPHGVVFLHVTYVPAQEKNFTTAPAICHDGKAHFPREGVFVSNGTHWFVTQRNFYEPQIITTDNTFVSGNCDVVIGIVNNTVYDPLQPELDSGGGSGGGQIYEGKLTAEGLRFGIVASRFNHALVDRLVEGAIDAIVRHGGREEDITLVRVPGSWEIPVAAGELARKEDIDAVIAIGVLIRGATPHFDYIASEVSKGLADLSLELRKPITFGVITADTLEQAIERAGTKHGNKGWEAALSAIEMANLFKSLR

SEQ ID NO: 8501 - protein, 1307 aa, Artificial Sequence; identical to SEQ ID NO: 8456
  SARS-CoV-2/Iceland/247/2020__EPI_ISL_417575 spike protein (1-1147)(A972C_R995C) LumSynth construct

SEQ ID NO: 8502 - protein, 1307 aa, Artificial Sequence
  SARS-CoV-2/Iceland/238/2020__EPI_ISL_417566 spike protein (1-1147)(A972C_R995C) LumSynth construct
MFVFLVLLPLVSSQCVNLTTRTQLPPAYTNSFTRGVYYPDKVFRSSVLHSTQDLFLPFFSNVTWFHAIHVSGTNGTKRFDNPVLPFNDGVYFASTEKSNIIRGWIFGTTLDSKTQSLLIVNNATNVVIKVCEFQFCNDPFLGVYYHKNNKSWMESEFRVYSSANNCTFEYVSQPFLMDLEGKQGNFKNLREFVFKNIDGYFKIYSKHTPINLVRDLPQGFSALEPLVDLPIGINITRFQTLLALHRSYLTPGDSSSGWTAGAAAYYVGYLQPRTFLLKYNENGTITDAVDCALDPLSETKCTLKSFTVEKGIYQTSNFRVQPTESIVRFPNITNLCPFGEVFNATRFASVYAWNRKRISNCVADYSVLYNSASFSTFKCYGVSPTKLNDLCFTNVYADSFVIRGDEVRQIAPGQTGKIADYNYKLPDDFTGCVIAWNSNNLDSKVGGNYNYLYRLFRKSNLKPFERDISTEIYQAGSTPCNGVEGFNCYFPLQSYGFQPTNGVGYQPYRVVVLSFELLHAPATVCGPKKSTNLVKNKCVNFNFNGLTGTGVLTESNKKFLPFQQFGRDIADTTDAVRDPQTLEILDITPCSFGGVSVITPGTNTSNQVAVLYQGVNCTEVPVAIHADQLTPTWRVYSTGSNVFQTRAGCLIGAEHVNNSYECDIPIGAGICASYQTQTNSPRRARSVASQSIIAYTMSLGAENSVAYSNNSIAIPTNFTISVTTEILPVSMTKTSVDCTMYICGDSTECSNLLLQYGSFCTQLNRALTGIAVEQDKNTQEVFAQVKQIYKTPPIKDFGGFNFSQILPDPSKPSKRSFIEDLLFNKVTLADVGFIKQYGDCLGDIAARDLICAQKFNGLTVLPPLLTDEMIAQYTSALLAGTITSGWTFGAGAALQIPFAMQMAYRFNGIGVTQNVLYENQKLIANQFNSAIGKIQDSLSSTASALGKLQDVVNQNAQALNTLVKQLSSNFGCISSVLNDILSRLDKVEAEVQIDCLITGRLQSLQTYVTQQLIRAAEIRASANLAATKMSECVLGQSKRVDFCGKGYHLMSFPQSAPHGVVFLHVTYVPAQEKNFTTAPAICHDGKAHFPREGVFVSNGTHWFVTQRNFYEPQIITTDNTFVSGNCDVVIGIVNNTVYDPLQPELDSGGGSGGGQIYEGKLTAEGLRFGIVASRFNHALVDRLVEGAIDAIVRHGGREEDITLVRVPGSWEIPVAAGELARKEDIDAVIAIGVLIRGATPHFDYIASEVSKGLADLSLELRKPITFGVITADTLEQAIERAGTKHGNKGWEAALSAIEMANLFKSLR

SEQ ID NO: 8503 - protein, 1307 aa, Artificial Sequence
  SARS-CoV-2/Greece/16/2020__EPI_ISL_418265 spike protein (1-1147)(A972C_R995C) LumSynth construct
MFVFLVLLPLVSSQCVNLTTRTQLPPAYTNSFTRGVYYPDKVFRSSVLHSTQDLFLPFFSNVTWFHAIHVSGTNGTKRFDNPVLPFNDGVYFASTEKSNIIRGWIFGTTLDSKTQSLLIVNNATNVVIKVCEFQFCNDPFLGVYYHKNNKSWMESEFRVYSSANNCTFEYVSQPFLMDLEGKQGNFKNLREFVFKNVDGYFKIYSKHTPINLVRDLPQGFSALEPLVDLPIGINITRFQTLLALHRSYLTPGDSSSGWTAGAAAYYVGYLQPRTFLLKYNENGTITDAVDCALDPLSETKCTLKSFTVEKGIYQTSNFRVQPTESIVRFPNITNLCPFGEVFNATRFASVYAWNRKRISNCVADYSVLYNSASFSTFKCYGVSPTKLNDLCFTNVYADSFVIRGDEVRQIAPGQTGKIADYNYKLPDDFTGCVIAWNSNNLDSKVGGNYNYLYRLFRKSNLKPFERDISTEIYQAGSTPCNGVEGFNCYFPLQSYGFQPTNGVGYQPYRVVVLSFELLHAPATVCGPKKSTNLVKNKCVNFNFNGLTGTGVLTESNKKFLPFQQFGRDIADTTDAVRDPQTLEILDITPCSFGGVSVITPGTNTSNQVAVLYQDVNCTEVPVAIHADQLTPTWRVYSTGSNVFQTRAGCLIGAEHVNNSYECDIPIGAGICASYQTQTNSPRRARSVASQSIIAYTMSLGAENSVAYSNNSIAIPTNFTISVTTEILPVSMTKTSVDCTMYICGDSTECSNLLLQYGSFCTQLNRALTGIAVEQDKNTQEVFAQVKQIYKTPPIKDFGGFNFSQILPDPSKPSKRSFIEDLLFNKVTLADAGFIKQYGDCLGDIAARDLICAQKFNGLTVLPPLLTDEMIAQYTSALLAGTITSGWTFGAGAALQIPFAMQMAYRFNGIGVTQNVLYENQKLIANQFNSAIGKIQDSLSSTASALGKLQDVVNQNAQALNTLVKQLSSNFGCISSVLNDILSRLDKVEAEVQIDCLITGRLQSLQTYVTQQLIRAAEIRASANLAATKMSECVLGQSKRVDFCGKGYHLMSFPQSAPHGVVFLHVTYVPAQEKNFTTAPAICHDGKAHFPREGVFVSNGTHWFVTQRNFYEPQIITTDNTFVSGNCDVVIGIVNNTVYDPLQPELDSGGGSGGGQIYEGKLTAEGLRFGIVASRFNHALVDRLVEGAIDAIVRHGGREEDITLVRVPGSWEIPVAAGELARKEDIDAVIAIGVLIRGATPHFDYIASEVSKGLADLSLELRKPITFGVITADTLEQAIERAGTKHGNKGWEAALSAIEMANLFKSLR

SEQ ID NO: 8504 - protein, 1307 aa, Artificial Sequence
  SARS-CoV-2/Iceland/319/2020__EPI_ISL_417648 spike protein (1-1147)(A972C_R995C) LumSynth construct
MFVFLVLLPLVSSQCVNLTTRTQLPPAYTNSFTRGVYYPDKVFRSSVLHSTQDLFLPFFSNVTWFHAIHVSGTNGTKRFDNPVLPFNDGVYFASTEKSNIIRGWIFGTTLDSKTQSLLIVNNATNVVIKVCEFQFCNDPFLGVYYHKNNKSWMESEFRVYSSANNCTFEYVSQPFLIDLEGKQGNFKNLREFVFKNIDGYFKIYSKHTPINLVRDLPQGFSALEPLVDLPIGINITRFQTLLALHRSYLTPGDSSSGWTAGAAAYYVGYLQPRTFLLKYNENGTITDAVDCALDPLSETKCTLKSFTVEKGIYQTSNFRVQPTESIVRFPNITNLCPFGEVFNATRFASVYAWNRKRISNCVADYSVLYNSASFSTFKCYGVSPTKLNDLCFTNVYADSFVIRGDEVRQIAPGQTGKIADYNYKLPDDFTGCVIAWNSNNLDSKVGGNYNYLYRLFRKSNLKPFERDISTEIYQAGSTPCNGVEGFNCYFPLQSYGFQPTNGVGYQPYRVVVLSFELLHAPATVCGPKKSTNLVKNKCVNFNFNGLTGTGVLTESNKKFLPFQQFGRDIADTTDAVRDPQTLEILDITPCSFGGVSVITPGTNTSNQVAVLYQGVNCTEVPVAIHADQLTPTWRVYSTGSNVFQTRAGCLIGAEHVNNSYECDIPIGAGICASYQTQTNSPRRARSVASQSIIAYTMSLGAENSVAYSNNSIAIPTNFTISVTTEILPVSMTKTSVDCTMYICGDSTECSNLLLQYGSFCTQLNRALTGIAVEQDKNTQEVFAQVKQIYKTPPIKDFGGFNFSQILPDPSKPSKRSFIEDLLFNKVTLADAGFIKQYGDCLGDIAARDLICAQKFNGLTVLPPLLTDEMIAQYTSALLAGTITSGWTFGAGAALQIPFAMQMAYRFNGIGVTQNVLYENQKLIANQFNSAIGKIQDSLSSTASALGKLQDVVNQNAQALNTLVKQLSSNFGCISSVLNDILSRLDKVEAEVQIDCLITGRLQSLQTYVTQQLIRAAEIRASANLAATKMSECVLGQSKRVDFCGKGYHLMSFPQSAPHGVVFLHVTYVPAQEKNFTTAPAICHDGKAHFPREGVFVSNGTHWFVTQRNFYEPQIITTDNTFVSGNCDVVIGIVNNTVYDPLQPELDSGGGSGGGQIYEGKLTAEGLRFGIVASRFNHALVDRLVEGAIDAIVRHGGREEDITLVRVPGSWEIPVAAGELARKEDIDAVIAIGVLIRGATPHFDYIASEVSKGLADLSLELRKPITFGVITADTLEQAIERAGTKHGNKGWEAALSAIEMANLFKSLR

SEQ ID NO: 8505 - protein, 1307 aa, Artificial Sequence
  SARS-CoV-2/Congo/94/2020__EPI_ISL_417947 spike protein (1-1147)(A972C_R995C) LumSynth construct
MFVFLVLLPLVSSQCVNLTTRTQLPPAYTNSFTRGVYYPDKVFRSSVLHSTQDLFLPFFSNVTWFHAIHVSGTNGTKRFDNPVLPFNDGVYFASTEKSNIIRGWIFGTTLDSKTQSLLIVNNATNVVIKVCEFQFCNDPFLGVYYHKNNKSWMESEFRVYSSANNCTFEYVSQPFLMDLEGKQGNFKNLREFVFKNIDGYFKIYSKHTPINLVRDLPQGFSALEPLVDLPIGINITRFQTLLALHRSYLTPGDSSSGWTAGAAAYYVGYLQPRTFLLKYNENGTITDAVDCALDPLSETKCTLKSFTVEKGIYQTSNFRVQPTESIVRFPNITNLCPFGEVFNATRFASVYAWNRKRISNCVADYSVLYNSASFSTFKCYGVSPTKLNDLCFTNVYADSFVIRGDEVRQIAPGQTGKIADYNYKLPDDFTGCVIAWNSNNLDSKVGGNYNYLYRLFRKSNLKPFERDISTEIYQAGSTPCNGVEGFNCYFPLQSYGFQPTNGVGYQPYRVVVLSFELLHAPATVCGPKKSTNLVKNKCVNFNFNGLTGTGVLTESNKKFLPFQQFGRDIADTTDAVRDPQTLEILDITPCSFGGVSVITPGTNTSNQVAVLYQGVNCTEVPVAIHADQLTPTWRVYSTGSNVFQTRAGCLIGAEHVNNSYECDIPIGAGICASYQTQTNSPRRARSVASQSIIAYTMSLGAENSVAYSNNSIAIPTNFTISVTTEILPVSMTKTSVDCTMYICGDSTECSNLLLQYGSFCTQLNRALTGIAVEQDKNTQEVFAQVKQIYKTPPIKDFGGFNFSQILPDPSKPSKRSFIEDILFNKVTLADAGFIKQYGDCLGDIAARDLICAQKFNGLTVLPPLLTDEMIAQYTSALLAGTITSGWTFGAGAALQIPFAMQMAYRFNGIGVTQNVLYENQKLIANQFNSAIGKIQDSLSSTASALGKLQDVVNQNAQALNTLVKQLSSNFGCISSVLNDILSRLDKVEAEVQIDCLITGRLQSLQTYVTQQLIRAAEIRASANLAATKMSECVLGQSKRVDFCGKGYHLMSFPQSAPHGVVFLHVTYVPAQEKNFTTAPAICHDGKAHFPREGVFVSNGTHWFVTQRNFYEPQIITTDNTFVSGNCDVVIGIVNNTVYDPLQPELDSGGGSGGGQIYEGKLTAEGLRFGIVASRFNHALVDRLVEGAIDAIVRHGGREEDITLVRVPGSWEIPVAAGELARKEDIDAVIAIGVLIRGATPHFDYIASEVSKGLADLSLELRKPITFGVITADTLEQAIERAGTKHGNKGWEAALSAIEMANLFKSLR

SEQ ID NO: 8506 - protein, 1307 aa, Artificial Sequence
  SARS-CoV-2/Congo/158/2020__EPI_ISL_417950 spike protein (1-1147)(A972C_R995C) LumSynth construct
MFVFLVLLPLVSSQCVNLTTRTQLPPAYTNSFTRGVYYPDKVFRSSVLHSTQDLFLPFFSNVTWFHAIHVSGTNGTKRFDNPVLPFNDGVYFASTEKSNIIRGWIFGTTLDSKTQSLLIVNNATNVVIKVCEFQFCNDPFLGVYYHKNNKSWMESEFRVYSSANNCTFEYVSQPFLMDLEGKQGNFKNLREFVFKNIDGYFKIYSKHTPINLVRDLPQGFSALEPLVDLPIGINITRFQTLLALHRSYLTPGDSSSGWTAGAAAYYVGYLQPRTFLLKYNENGTITDAVDCALDPLSETKCTLKSFTVEKGIYQTSNFRVQPTESIVRFPNITNLCPFGEVFNATRFASVYAWNRKRISNCVADYSVLYNSASFSTFKCYGVSPTKLNDLCFTNVYADSFVIRGDEVRQIAPGQTGKIADYNYKLPDDFTGCVIAWNSNNLDSKVGGNYNYLYRLFRKSNLKPFERDISTEIYQAGSTPCNGVEGFNCYFPLQSYGFQPTNGVGYQPYRVVVLSFELLHAPATVCGPKKSTNLVKNKCVNFNFNGLTGTGVLTESNKKFLPFQQFGRDIADTTDAVRDPQTLEILDITPCSFGGVSVITPGTNTSNQVAVLYQDVNCTEVPVAIHADQLTPTWRVYSTGSNVFQTRAGCLIGAEHVNNSYECDIPIGAGICASYQTQTNSPRRARSVASQSIIAYTMSLGAENSVAYSNNSIAIPTNFTISVTTEILPVSMTKTSVDCTMYICGDSTECSNLLLQYGSFCTQLNRALTGIAVEQDKNTQEVFAQVKQIYKTPPIKDFGGFNFSQILPDPSKPSKRSFIEDLLFNKVTLADAGFIKQYGDCLGDIAARDLICAQKFNGLTVLPPLLTDEMIAQYTSALLAGTITSGWTFGAGAALQIPFAMQMAYRFNGIGVTQNVLYENQKLIANQFNSAIGKIQDSLSSTASALGKLQDVVNQNAQALNTLVKQLSSNFGCISSVLNDILSRLDKVEAEVQIDCLITGRLQSLQTYVTQQLIRAAEIRASANLAATKMSECVLGQSKRVDFCGKGYHLMSFPQSAPHGVVFLHVTYVPAQEKNFTTAPAICHDGKAHFPREGVFVSNGTHWFVTQRNFYEPQIITTDNTFLSGNCDVVIGIVNNTVYDPLQPELDSGGGSGGGQIYEGKLTAEGLRFGIVASRFNHALVDRLVEGAIDAIVRHGGREEDITLVRVPGSWEIPVAAGELARKEDIDAVIAIGVLIRGATPHFDYIASEVSKGLADLSLELRKPITFGVITADTLEQAIERAGTKHGNKGWEAALSAIEMANLFKSLR

SEQ ID NO: 8507 - protein, 1307 aa, Artificial Sequence
  SARS-CoV-2/USA/UT-00034/2020__EPI_ISL_417977 spike protein (1-1147)(A972C_R995C) LumSynth construct
MFVFLVLLPLVSSQCVNLTTRTQLPPAYTNSFTRGVYYPDKVFRSSVLHSTQDLFLPFFSNVTWFHAIHVSGTNGTKRFDNPVLPFNDGVYFASTEKSNIIRGWIFGTTLDSKTQSLLIVNNATNVVIKVCEFQFCNDPFLGVYYYKNNKSWMESEFRVYSSANNCTFEYVSQPFLMDLEGKQGNFKNLREFVFKNIDGYFKIYSKHTPINLVRDLPQGFSALEPLVDLPIGINITRFQTLLALHRSYLTPGDSSSGWTAGAAAYYVGYLQPRTFLLKYNENGTITDAVDCALDPLSETKCTLKSFTVEKGIYQTSNFRVQPTESIVRFPNITNLCPFGEVFNATRFASVYAWNRKRISNCVADYSVLYNSASFSTFKCYGVSPTKLNDLCFTNVYADSFVIRGDEVRQIAPGQTGKIADYNYKLPDDFTGCVIAWNSNNLDSKVGGNYNYLYRLFRKSNLKPFERDISTEIYQAGSTPCNGVEGFNCYFPLQSYGFQPTNGVGYQPYRVVVLSFELLHAPATVCGPKKSTNLVKNKCVNFNFNGLTGTGVLTESNKKFLPFQQFGRDIADTTDAVRDPQTLEILDITPCSFGGVSVITPGTNTSNQVAVLYQGVNCTEVPVAIHADQLTPTWRVYSTGSNVFQTRAGCLIGAEHVNNSYECDIPIGAGICASYQTQTNSPRRARSVASQSIIAYTMSLGAENSVAYSNNSIAIPTNFTISVTTEILPVSMTKTSVDCTMYICGDSTECSNLLLQYGSFCTQLNRALTGIAVEQDKNTQEVFAQVKQIYKTPPIKDFGGFNFSQILPDPSKPSKRSFIEDLLFNKVTLADAGFIKQYGDCLGDIAARDLICAQKFNGLTVLPPLLTDEMIAQYTSALLAGTITSGWTFGAGAALQIPFAMQMAYRFNGIGVTQNVLYENQKLIANQFNSAIGKIQDSLSSTASALGKLQDVVNQNAQALNTLVKQLSSNFGCISSVLNDILSRLDKVEAEVQIDCLITGRLQSLQTYVTQQLIRAAEIRASANLAATKMSECVLGQSKRVDFCGKGYHLMSFPQSAPHGVVFLHVTYVPAQEKNFTTAPAICHDGKAHFPREGVFVSNGTHWFVTQRNFYEPQIITTDNTFVSGNCDVVIGIVNNTVYDPLQPELDSGGGSGGGQIYEGKLTAEGLRFGIVASRFNHALVDRLVEGAIDAIVRHGGREEDITLVRVPGSWEIPVAAGELARKEDIDAVIAIGVLIRGATPHFDYIASEVSKGLADLSLELRKPITFGVITADTLEQAIERAGTKHGNKGWEAALSAIEMANLFKSLR

SEQ ID NO: 8508 - protein, 1307 aa, Artificial Sequence
  SARS-CoV-2/USA/UT-00033/2020__EPI_ISL_417976 spike protein (1-1147)(A972C_R995C) LumSynth construct
MFVFLVLLPLVSSQCVNLTTRTQLPPAYTNSFTRGVYYPDKVFRSSVLHSTQDLFLPFFSNVTWFHAIHVSGTNGTKRFDNPVLPFNDGVYFASTEKSNIIRGWIFGTTLDSKTQSLLIVNNATNVVIKVCEFQFCNDPFLGVYYHKNNKSWMESEFRVYSSANNCTFEYVSQPFLMDLEGKQGNFKNLREFVFKNIDGYFKIYSKHTPINLVRDLPQGFSALEPLVDLPIGINITRFQTLLALHRSYLTPGDSSSGLTAGAAAYYVGYLQPRTFLLKYNENGTITDAVDCALDPLSETKCTLKSFTVEKGIYQTSNFRVQPTESIVRFPNITNLCPFGEVFNATRFASVYAWNRKRISNCVADYSVLYNSASFSTFKCYGVSPTKLNDLCFTNVYADSFVIRGDEVRQIAPGQTGKIADYNYKLPDDFTGCVIAWNSNNLDSKVGGNYNYLYRLFRKSNLKPFERDISTEIYQAGSTPCNGVEGFNCYFPLQSYGFQPTNGVGYQPYRVVVLSFELLHAPATVCGPKKSTNLVKNKCVNFNFNGLTGTGVLTESNKKFLPFQQFGRDIADTTDAVRDPQTLEILDITPCSFGGVSVITPGTNTSNQVAVLYQGVNCTEVPVAIHADQLTPTWRVYSTGSNVFQTRAGCLIGAEHVNNSYECDIPIGAGICASYQTQTNSPRRARSVASQSIIAYTMSLGAENSVAYSNNSIAIPTNFTISVTTEILPVSMTKTSVDCTMYICGDSTECSNLLLQYGSFCTQLNRALTGIAVEQDKNTQEVFAQVKQIYKTPPIKDFGGFNFSQILPDPSKPSKRSFIEDLLFNKVTLADAGFIKQYGDCLGDIAARDLICAQKFNGLTVLPPLLTDEMIAQYTSALLAGTITSGWTFGAGAALQIPFAMQMAYRFNGIGVTQNVLYENQKLIANQFNSAIGKIQDSLSSTASALGKLQDVVNQNAQALNTLVKQLSSNFGCISSVLNDILSRLDKVEAEVQIDCLITGRLQSLQTYVTQQLIRAAEIRASANLAATKMSECVLGQSKRVDFCGKGYHLMSFPQSAPHGVVFLHVTYVPAQEKNFTTAPAICHDGKAHFPREGVFVSNGTHWFVTQRNFYEPQIITTDNTFVSGNCDVVIGIVNNTVYDPLQPELDSGGGSGGGQIYEGKLTAEGLRFGIVASRFNHALVDRLVEGAIDAIVRHGGREEDITLVRVPGSWEIPVAAGELARKEDIDAVIAIGVLIRGATPHFDYIASEVSKGLADLSLELRKPITFGVITADTLEQAIERAGTKHGNKGWEAALSAIEMANLFKSLR

SEQ ID NO: 8509 - protein, 1307 aa, Artificial Sequence
  SARS-CoV-2/USA/WI-13/2020__EPI_ISL_417516 spike protein (1-1147)(A972C_R995C) LumSynth construct
MFVFLVLLPLVSSQCVNLTTRTQLPPAYTNSFTRGVYYPDKVFRSSVLHSTQDLFLPFFSNVTWFHAIHVSGTNGTKRFDNPVLPFNDGVYFASTEKSNIIRGWIFGTTLDSKTQSLLIVNNATNVVIKVCEFQFCNDPFLGVYYHKNNKSWMESEFRVYSSANNCTFEYVSQPFLMDLEGKQGNFKNLREFVFKNIDGYFKIYSKHTPINLVRDLPQGFSALEPLVDLPIGINITRFQTLLALHRSYLTPGDSSSGWTAGAAAYYVGYLQPRTFLLKYNENGTITDAVDCALDPLSETKCTLKSFTVEKGIYQTSNFRVLPTESIVRFPNITNLCPFGEVFNATRFASVYAWNRKRISNCVADYSVLYNSASFSTFKCYGVSPTKLNDLCFTNVYADSFVIRGDEVRQIAPGQTGKIADYNYKLPDDFTGCVIAWNSNNLDSKVGGNYNYLYRLFRKSNLKPFERDISTEIYQAGSTPCNGVEGFNCYFPLQSYGFQPTNGVGYQPYRVVVLSFELLHAPATVCGPKKSTNLVKNKCVNFNFNGLTGTGVLTESNKKFLPFQQFGRDIADTTDAVRDPQTLEILDITPCSFGGVSVITPGTNTSNQVAVLYQGVNCTEVPVAIHADQLTPTWRVYSTGSNVFQTRAGCLIGAEHVNNSYECDIPIGAGICASYQTQTNSPRRARSVASQSIIAYTMSLGAENSVAYSNNSIAIPTNFTISVTTEILPVSMTKTSVDCTMYICGDSTECSNLLLQYGSFCTQLNRALTGIAVEQDKNTQEVFAQVKQIYKTPPIKDFGGFNFSQILPDPSKPSKRSFIEDLLFNKVTLADAGFIKQYGDCLGDIAARDLICAQKFNGLTVLPPLLTDEMIAQYTSALLAGTITSGWTFGAGAALQIPFAMQMAYRFNGIGVTQNVLYENQKLIANQFNSAIGKIQDSLSSTASALGKLQDVVNQNAQALNTLVKQLSSNFGCISSVLNDILSRLDKVEAEVQIDCLITGRLQSLQTYVTQQLIRAAEIRASANLAATKMSECVLGQSKRVDFCGKGYHLMSFPQSAPHGVVFLHVTYVPAQEKNFTTAPAICHDGKAHFPREGVFVSNGTHWFVTQRNFYEPQIITTDNTFVSGNCDVVIGIVNNTVYDPLQPELDSGGGSGGGQIYEGKLTAEGLRFGIVASRFNHALVDRLVEGAIDAIVRHGGREEDITLVRVPGSWEIPVAAGELARKEDIDAVIAIGVLIRGATPHFDYIASEVSKGLADLSLELRKPITFGVITADTLEQAIERAGTKHGNKGWEAALSAIEMANLFKSLR

SEQ ID NO: 8510 - protein, 1306 aa, Artificial Sequence
  SARS-CoV-2/India/1-27/2020__EPI_ISL_413522 spike protein (1-1146)(A971C_R994C) LumSynth construct
MFVFLVLLPLVSSQCVNLTTRTQLPPAYTNSFTRGVYYPDKVFRSSVLHSTQDLFLPFFSNVTWFHAIHVSGTNGTKRFDNPVLPFNDGVYFASTEKSNIIRGWIFGTTLDSKTQSLLIVNNATNVVIKVCEFQFCNDPFLGVYHKNNKSWMESEFRVYSSANNCTFEYVSQPFLMDLEGKQGNFKNLREFVFKNIDGYFKIYSKHTPINLVRDLPQGFSALEPLVDLPIGINITRFQTLLALHRSYLTPGDSSSGWTAGAAAYYVGYLQPRTFLLKYNENGTITDAVDCALDPLSETKCTLKSFTVEKGIYQTSNFRVQPTESIVRFPNITNLCPFGEVFNATRFASVYAWNRKRISNCVADYSVLYNSASFSTFKCYGVSPTKLNDLCFTNVYADSFVIRGDEVIQIAPGQTGKIADYNYKLPDDFTGCVIAWNSNNLDSKVGGNYNYLYRLFRKSNLKPFERDISTEIYQAGSTPCNGVEGFNCYFPLQSYGFQPTNGVGYQPYRVVVLSFELLHAPATVCGPKKSTNLVKNKCVNFNFNGLTGTGVLTESNKKFLPFQQFGRDIADTTDAVRDPQTLEILDITPCSFGGVSVITPGTNTSNQVAVLYQDVNCTEVPVAIHADQLTPTWRVYSTGSNVFQTRAGCLIGAEHVNNSYECDIPIGAGICASYQTQTNSPRRARSVASQSIIAYTMSLGAENSVAYSNNSIAIPTNFTISVTTEILPVSMTKTSVDCTMYICGDSTECSNLLLQYGSFCTQLNRALTGIAVEQDKNTQEVFAQVKQIYKTPPIKDFGGFNFSQILPDPSKPSKRSFIEDLLFNKVTLADAGFIKQYGDCLGDIAARDLICAQKFNGLTVLPPLLTDEMIAQYTSALLAGTITSGWTFGAGAALQIPFAMQMAYRFNGIGVTQNVLYENQKLIANQFNSAIGKIQDSLSSTASALGKLQDVVNQNAQALNTLVKQLSSNFGCISSVLNDILSRLDKVEAEVQIDCLITGRLQSLQTYVTQQLIRAAEIRASANLAATKMSECVLGQSKRVDFCGKGYHLMSFPQSAPHGVVFLHVTYVPAQEKNFTTAPAICHDGKAHFPREGVFVSNGTHWFVTQRNFYEPQIITTDNTFVSGNCDVVIGIVNNTVYDPLQPELDSGGGSGGGQIYEGKLTAEGLRFGIVASRFNHALVDRLVEGAIDAIVRHGGREEDITLVRVPGSWEIPVAAGELARKEDIDAVIAIGVLIRGATPHFDYIASEVSKGLADLSLELRKPITFGVITADTLEQAIERAGTKHGNKGWEAALSAIEMANLFKSLR

SEQ ID NO: 8511 - protein, 1301 aa, Artificial Sequence
  SARS-CoV-2/pangolin/Guangxi/P4L/2017__EPI_ISL_410538 spike protein (1-1141)(A966C_R989C) LumSynth construct
MFVFLFVLPLVSSQCVNLTTRTGIPPGYTNSSTRGVYYPDKVFRSSILHLTQDLFLPFFSNVTWFNTINYQGGFKKFDNPVLPFNDGVYFASTEKSNIIRGWIFGTTLDARTQSLLIVNNATNVVIKVCEFQFCTDPFLGVYYHNNNKTWVENEFRVYSSANNCTFEYISQPFLMDLEGKQGNFKNLREFVFKNVDGYFKIYSKHTPIDLVRDLPRGFAALEPLVDLPIGINITRFQTLLALHRSYLTPGNLESGWTTGAAAYYVGYLQQRTFLLSYNQNGTITDAVDCSLDPLSETKCTLKSLTVEKGIYQTSNFRVQPTISIVRFPNITNLCPFGEVFNASKFASVYAWNRKRISNCVADYSVLYNSTSFSTFKCYGVSPTKLNDLCFTNVYADSFVVKGDEVRQIAPGQTGVIADYNYKLPDDFTGCVIAWNSVKQDALTGGNYGYLYRLFRKSKLKPFERDISTEIYQAGSTPCNGQVGLNCYYPLERYGFHPTTGVNYQPFRVVVLSFELLNGPATVCGPKLSTTLVKDKCVNFNFNGLTGTGVLTTSKKQFLPFQQFGRDISDTTDAVRDPQTLEILDITPCSFGGVSVITPGTNTSNQVAVLYQDVNCTEVPMAIHAEQLTPAWRVYSAGANVFQTRAGCLVGAEHVNNSYECDIPVGAGICASYHSMSSLRSVNQRSIIAYTMSLGAENSVAYSNNSIAIPTNFTISVTTEILPVSMTKTSVDCTMYICGDSIECSNLLLQYGSFCTQLNRALTGIAVEQDKNTQEVFAQVKQIYKTPPIKDFGGFNFSQILPDPSKPSKRSFIEDLLFNKVTLADAGFIKQYGDCLGDIAARDLICAQKFNGLTVLPPLLTDEMIAQYTSALLAGTITSGWTFGAGAALQIPFAMQMAYRFNGIGVTQNVLYENQKLIANQFNSAIGKIQDSLSSTASALGKLQDVVNQNAQALNTLVKQLSSNFGCISSVLNDILSRLDKVEAEVQIDCLITGRLQSLQTYVTQQLIRAAEIRASANLAATKMSECVLGQSKRVDFCGKGYHLMSFPQSAPHGVVFLHVTYVPAQEKNFTTAPAICHEGKAHFPREGVFVSNGTHWFITQRNFYEPQIITTDNTFVSGSCDVVIGIVNNTVYDPLQPELDSGGGSGGGQIYEGKLTAEGLRFGIVASRFNHALVDRLVEGAIDAIVRHGGREEDITLVRVPGSWEIPVAAGELARKEDIDAVIAIGVLIRGATPHFDYIASEVSKGLADLSLELRKPITFGVITADTLEQAIERAGTKHGNKGWEAALSAIEMANLFKSLR

SEQ ID NO: 8512 - protein, 1301 aa, Artificial Sequence
  SARS-CoV-2/pangolin/Guangxi/P5L/2017__EPI_ISL_410540 spike protein (1-1141)(A966C_R989C) LumSynth construct
MFVFLFVLPLVSSQCVNLTTRTGIPPGYTNSSTRGVYYPDKVFRSSILHLTQDLFLPFFSNVTWFNTINYQGGFKKFDNPVLPFNDGVYFASTEKSNIIRGWIFGTTLDARTQSLLIVNNATNVVIKVCEFQFCTDPFLGVYYHNNNKTWVENEFRVYSSANNCTFEYISQPFLMDLEGKQGNFKNLREFVFKNVDGYFKIYSKHTPIDLVRDLPRGFAALEPLVDLPIGINITRFQTLLALHRSYLTPGKLESGWTTGAAAYYVGYLQQRTFLLSYNQNGTITDAVDCSLDPLSETKCTLKSLTVEKGIYQTSNFRVQPTISIVRFPNITNLCPFGEVFNASKFASVYAWNRKRISNCVADYSVLYNSTSFSTFKCYGVSPTKLNDLCFTNVYADSFVVKGDEVRQIAPGQTGVIADYNYKLPDDFTGCVIAWNSVKQDALTGGNYGYLYRLFRKSKLKPFERDISTEIYQAGSTPCNGQVGLNCYYPLERYGFHPTTGVNYQPFRVVVLSFELLNGPATVCGPKLSTTLVKDKCVNFNFNGLTGTGVLTTSKKQFLPFQQFGRDISDTTDAVRDPQTLEILDITPCSFGGVSVITPGTNTSNQVAVLYQDVNCTEVPMAIHAEQLTPAWRVYSAGANVFQTRAGCLVGAEHVNNSYECDIPVGAGICASYHSMSSFRSVNQRSIIAYTMSLGAENSVAYSNNSIAIPTNFTISVTTEILPVSMTKTSVDCTMYICGDSIECSNLLLQYGSFCTQLNRALTGIAVEQDKNTQEVFAQVKQIYKTPPIKDFGGFNFSQILPDPSKPSKRSFIEDLLFNKVTLADAGFIKQYGDCLGDIAARDLICAQKFNGLTVLPPLLTDEMIAQYTSALLAGTITSGWTFGAGAALQIPFAMQMAYRFNGIGVTQNVLYENQKLIANQFNSAIGKIQDSLSSTASALGKLQDVVNQNAQALNTLVKQLSSNFGCISSVLNDILSRLDKVEAEVQIDCLITGRLQSLQTYVTQQLIRAAEIRASANLAATKMSECVLGQSKRVDFCGKGYHLMSFPQSAPHGVVFLHVTYVPAQEKNFTTAPAICHEGKAHFPREGVFVSNGTHWFITQRNFYEPQIITTDNTFVSGSCDVVIGIVNNTVYDPLQPELDSGGGSGGGQIYEGKLTAEGLRFGIVASRFNHALVDRLVEGAIDAIVRHGGREEDITLVRVPGSWEIPVAAGELARKEDIDAVIAIGVLIRGATPHFDYIASEVSKGLADLSLELRKPITFGVITADTLEQAIERAGTKHGNKGWEAALSAIEMANLFKSLR

SEQ ID NO: 8513 - protein, 1301 aa, Artificial Sequence
  SARS-CoV-2/pangolin/Guangxi/P5E/2017__EPI_ISL_410541 spike protein (1-1141)(A966C_R989C) LumSynth construct
MFVFLFVLPLVSSQCVNLTTRTGIPPGYTNSSTRGVYYPDKVFRSSILHLTQDLFLPFFSNVTWFNTITYQGGSKKFDNPVLPFNDGVYFASTEKSNIIRGWIFGTTLDARTQSLLIVNNATNVVIKVCEFQFCTDPFLGVYYHNNNKTWVENEFRVYSSANNCTFEYISQPFLMDLEGKQGNFKNLREFVFKNVDGYFKIYSKHTPIDLVRDLPRGFAALEPLVDLPIGINITRFQTLLALHRSYLTPGKLESGWTTGAAAYYVGYLQQRTFLLSYNQNGTITDAVDCSLDPLSETKCTLKSLTVEKGIYQTSNFRVQPTISIVRFPNITNLCPFGEVFNASKFASVYAWNRKRISNCVADYSVLYNSTSFSTFKCYGVSPTKLNDLCFTNVYADSFVVKGDEVRQIAPGQTGVIADYNYKLPDDFTGCVIAWNSVKQDALTGDNYGYLYRLFRKSKLKPFERDISTEIYQAGSTPCNGQVGLNCYYPLERYGFHPTTGVNYQPFRVVVLSFELLNGPATVCGPKLSTTLVKDKCVNFNFNGLTGTGVLTTSKKQFLPFQQFGRDISDTTDAVRDPQTLEILDITPCSFGGVSVITPGTNTSNQVAVLYQDVNCTEVPMAIHAEQLTPAWRVYSAGANVFQTRAGCLVGAEHVNNSYECDIPVGAGICASYHSMSSFRSVNQRSIIAYTMSLGAENSVAYSNNSIAIPTNFTISVTTEILPVSMTKTSVDCTMYICGDSIECSNLLLQYGSFCTQLNRALTGIAVEQDKNTQEVFAQVKQIYKTPPIKDFGGFNFSQILPDPSKPSKRSFIEDLLFNKVTLADAGFIKQYGDCLGDIAARDLICAQKFNGLTVLPPLLTDEMIAQYTSALLAGTITSGWTFGAGAALQIPFAMQMAYRFNGIGVTQNVLYENQKLIANQFNSAIGKIQDSLSSTASALGKLQDVVNQNAQALNTLVKQLSSNFGCISSVLNDILSRLDKVEAEVQIDCLITGRLQSLQTYVTQQLIRAAEIRASANLAATKMSECVLGQSKRVDFCGKGYHLMSFPQSAPHGVVFLHVTYVPAQEKNFTTAPAICHEGKAHFPREGVFVSNGTHWFITQRNFYEPQIITTDNTFVSGSCDVVIGIVNNTVYDPLQPELDSGGGSGGGQIYEGKLTAEGLRFGIVASRFNHALVDRLVEGAIDAIVRHGGREEDITLVRVPGSWEIPVAAGELARKEDIDAVIAIGVLIRGATPHFDYIASEVSKGLADLSLELRKPITFGVITADTLEQAIERAGTKHGNKGWEAALSAIEMANLFKSLR

SEQ ID NO: 8514 - protein, 1299 aa, Artificial Sequence
  SARS-CoV-2/pangolin/Guangxi/P1E/2017__EPI_ISL_410539 spike protein (1-1139)(A964C_R987C) LumSynth construct
MFVFLFVLPLVSSQCVNLTTRTGIQPGYTNSSTRGVYYPDKVFRSSILHLTQDLFLPFFSNVTWFNTINYQGGFKKFDNPVLPFNDGVYFASTEKSNIIRGWIFGTTLDARTQSLLIVNNATNVVIKVCEFQFCTDPFLGVYYHNNNKTWVENEFRVYSSANNCTFEYISQPFLMDLEGKQGNFKNLREFVFKNVDGYFKIYSKHTPIDLVRDLPRGFAALEPLVDLPIGINITRFQTLLALHRSYLTPGKLESGWTTGAAAYYVGYLQQRTFLLSYNQNGTITDAVDCSLDPLSETKCTLKSLTVEKGIYQTSNFRVQPTISIVRFPNITNLCPFGEVFNASKFASVYAWNRKRISNCVADYSVLYNSTSFSTFKCYGVSPTKLNDLCFTNVYADSFVVKGDEVRQIAPGQTGVIADYNYKLPDDFTGCVIAWNSVKQDALTGGNYLYRLFRKSKLKPFERDISTEIYQAGSTPCNGQVGLNCYYPLERYGFHPTTGVNYQPFRVVVLSFELLNGPATVCGPKLSTTLVKDKCVNFNFNGLTGTGVLTTSKKQFLPFQQFGRDISDTTDAVRDPQTLEILDITPCSFGGVSVITPGTNTSNQVAVLYQDVNCTEVPMAIHAEQLTPAWRVYSAGANVFQTRAGCLVGAEHVNNSYECDIPVGAGICASYHSMSSLRSVNQRSIIAYTMSLGAENSVAYSNNSIAIPTNFTISVTTEILPVSMTKTSVDCTMYICGDSIECSNLLLQYGSFCTQLNRALTGIAVEQDKNTQEVFAQVKQIYKTPPIKDFGGFNFSQILPDPSKPSKRSFIEDLLFNKVTLADAGFIKQYGDCLGDIAARDLICAQKFNGLTVLPPLLTDEMIAQYTSALLAGTITSGWTFGAGAALQIPFAMQMAYRFNGIGVTQNVLYENQKLIANQFNSAIGKIQDSLSSTASALGKLQDVVNQNAQALNTLVKQLSSNFGCISSVLNDILSRLDKVEAEVQIDCLITGRLQSLQTYVTQQLIRAAEIRASANLAATKMSECVLGQSKRVDFCGKGYHLMSFPQSAPHGVVFLHVTYVPAQEKNFTTAPAICHEGKAHFPREGVFVSNGTHWFITQRNFYEPQIITTDNTFVSGSCDVVIGIVNNTVYDPLQPELDSGGGSGGGQIYEGKLTAEGLRFGIVASRFNHALVDRLVEGAIDAIVRHGGREEDITLVRVPGSWEIPVAAGELARKEDIDAVIAIGVLIRGATPHFDYIASEVSKGLADLSLELRKPITFGVITADTLEQAIERAGTKHGNKGWEAALSAIEMANLFKSLR

SEQ ID NO: 8515 - protein, 1307 aa, Artificial Sequence
  SARS-CoV-2/Wuhan/WIV05/2019__EPI_ISL_402128 spike protein (1-1147)(A890C_V1040C) LumSynth construct
MFVFLVLLPLVSSQCVNLTTRTQLPPAYTNSFTRGVYYPDKVFRSSVLHSTQDLFLPFFSNVTWFHAIHVSGTNGTKRFDNPVLPFNDGVYFASTEKSNIIRGWIFGTTLDSKTQSLLIVNNATNVVIKVCEFQFCNDPFLGVYYHKNNKSWMESEFRVYSSANNCTFEYVSQPFLMDLEGKQGNFKNLREFVFKNIDGYFKIYSKHTPINLVRDLPQGFSALEPLVDLPIGINITRFQTLLALHRSYLTPGDSSSGWTAGAAAYYVGYLQPRTFLLKYNENGTITDAVDCALDPLSETKCTLKSFTVEKGIYQTSNFRVQPTESIVRFPNITNLCPFGEVFNATRFASVYAWNRKRISNCVADYSVLYNSASFSTFKCYGVSPTKLNDLCFTNVYADSFVIRGDEVRQIAPGQTGKIADYNYKLPDDFTGCVIAWNSNNLDSKVGGNYNYLYRLFRKSNLKPFERDISTEIYQAGSTPCNGVEGFNCYFPLQSYGFQPTNGVGYQPYRVVVLSFELLHAPATVCGPKKSTNLVKNKCVNFNFNGLTGTGVLTESNKKFLPFQQFGRDIADTTDAVRDPQTLEILDITPCSFGGVSVITPGTNTSNQVAVLYQDVNCTEVPVAIHADQLTPTWRVYSTGSNVFQTRAGCLIGAEHVNNSYECDIPIGAGICASYQTQTNSPRRARSVASQSIIAYTMSLGAENSVAYSNNSIAIPTNFTISVTTEILPVSMTKTSVDCTMYICGDSTECSNLLLQYGSFCTQLNRALTGIAVEQDKNTQEVFAQVKQIYKTPPIKDFGGFNFSQILPDPSKPSKRSFIEDLLFNKVTLADAGFIKQYGDCLGDIAARDLICAQKFNGLTVLPPLLTDEMIAQYTSALLAGTITSGWTFGCGAALQIPFAMQMAYRFNGIGVTQNVLYENQKLIANQFNSAIGKIQDSLSSTASALGKLQDVVNQNAQALNTLVKQLSSNFGAISSVLNDILSRLDKVEAEVQIDRLITGRLQSLQTYVTQQLIRAAEIRASANLAATKMSECVLGQSKRCDFCGKGYHLMSFPQSAPHGVVFLHVTYVPAQEKNFTTAPAICHDGKAHFPREGVFVSNGTHWFVTQRNFYEPQIITTDNTFVSGNCDVVIGIVNNTVYDPLQPELDSGGGSGGGQIYEGKLTAEGLRFGIVASRFNHALVDRLVEGAIDAIVRHGGREEDITLVRVPGSWEIPVAAGELARKEDIDAVIAIGVLIRGATPHFDYIASEVSKGLADLSLELRKPITFGVITADTLEQAIERAGTKHGNKGWEAALSAIEMANLFKSLR

SEQ ID NO: 8516 - protein, 1303 aa, Artificial Sequence; identical to SEQ ID NO: 8248
  SARS-CoV-2/bat/Yunnan/RaTG13/2013__EPI_ISL_402131 spike protein (1-1143)(A886C_V1036C) LumSynth construct

SEQ ID NO: 8517 - protein, 1307 aa, Artificial Sequence; identical to SEQ ID NO: 8249
  SARS-CoV-2/Wuhan/HBCDC-HB-01/2019__EPI_ISL_402132 spike protein (1-1147)(A890C_V1040C) LumSynth construct

SEQ ID NO: 8518 - protein, 1307 aa, Artificial Sequence; identical to SEQ ID NO: 8250
  SARS-CoV-2/Guangdong/20SF028/2020__EPI_ISL_403936 spike protein (1-1147)(A890C_V1040C) LumSynth construct

SEQ ID NO: 8519 - protein, 1307 aa, Artificial Sequence; identical to SEQ ID NO: 8251
  SARS-CoV-2/Shenzhen/SZTH-001/2020__EPI_ISL_406592 spike protein (1-1147)(A890C_V1040C) LumSynth construct

SEQ ID NO: 8520 - protein, 1307 aa, Artificial Sequence; identical to SEQ ID NO: 8252
  SARS-CoV-2/Shenzhen/SZTH-004/2020__EPI_ISL_406595 spike protein (1-1147)(A890C_V1040C) LumSynth construct

SEQ ID NO: 8521 - protein, 1307 aa, Artificial Sequence; identical to SEQ ID NO: 8253
  SARS-CoV-2/France/IDF0372/2020__EPI_ISL_406596 spike protein (1-1147)(A890C_V1040C) LumSynth construct

SEQ ID NO: 8522 - protein, 1307 aa, Artificial Sequence; identical to SEQ ID NO: 8254
  SARS-CoV-2/Australia/VIC01/2020__EPI_ISL_406844 spike protein (1-1147)(A890C_V1040C) LumSynth construct

SEQ ID NO: 8523 - protein, 1307 aa, Artificial Sequence; identical to SEQ ID NO: 8255
  SARS-CoV-2/Germany/BavPat1/2020__EPI_ISL_406862 spike protein (1-1147)(A890C_V1040C) LumSynth construct

SEQ ID NO: 8524 - protein, 1307 aa, Artificial Sequence; identical to SEQ ID NO: 8256
  SARS-CoV-2/Wuhan/HBCDC-HB-02/2020__EPI_ISL_412978 spike protein (1-1147)(A890C_V1040C) LumSynth construct

SEQ ID NO: 8525 - protein, 1307 aa, Artificial Sequence; identical to SEQ ID NO: 8257
  SARS-CoV-2/Australia/QLD02/2020__EPI_ISL_407896 spike protein (1-1147)(A890C_V1040C) LumSynth construct

SEQ ID NO: 8526 - protein, 1307 aa, Artificial Sequence; identical to SEQ ID NO: 8258
  SARS-CoV-2/India/1-31/2020__EPI_ISL_413523 spike protein (1-1147)(A890C_V1040C) LumSynth construct

SEQ ID NO: 8527 - protein, 1307 aa, Artificial Sequence; identical to SEQ ID NO: 8259
  SARS-CoV-2/Guangdong/GD2020087-P0008/2020__EPI_ISL_413863 spike protein (1-1147)(A890C_V1040C) LumSynth construct

SEQ ID NO: 8528 - protein, 1307 aa, Artificial Sequence; identical to SEQ ID NO: 8260
  SARS-CoV-2/Sweden/01/2020__EPI_ISL_411951 spike protein (1-1147)(A890C_V1040C) LumSynth construct

SEQ ID NO: 8529 - protein, 1307 aa, Artificial Sequence; identical to SEQ ID NO: 8261
  SARS-CoV-2/Tianmen/HBCDC-HB-07/2020__EPI_ISL_412983 spike protein (1-1147)(A890C_V1040C) LumSynth construct

SEQ ID NO: 8530 - protein, 1307 aa, Artificial Sequence; identical to SEQ ID NO: 8262
  SARS-CoV-2/Hong Kong/case42_VM20002493/2020__EPI_ISL_414527 spike protein (1-1147)(A890C_V1040C) LumSynth construct

SEQ ID NO: 8531 - protein, 1307 aa, Artificial Sequence; identical to SEQ ID NO: 8263
  SARS-CoV-2/USA/CruiseA-23/2020__EPI_ISL_414482 spike protein (1-1147)(A890C_V1040C) LumSynth construct

SEQ ID NO: 8532 - protein, 1307 aa, Artificial Sequence; identical to SEQ ID NO: 8264
  SARS-CoV-2/Hong Kong/case85_VM20002868/2020__EPI_ISL_414519 spike protein (1-1147)(A890C_V1040C) LumSynth construct

SEQ ID NO: 8533 - protein, 1307 aa, Artificial Sequence; identical to SEQ ID NO: 8255
  SARS-CoV-2/England/200990660/2020__EPI_ISL_414523 spike protein (1-1147)(A890C_V1040C) LumSynth construct

SEQ ID NO: 8534 - protein, 1307 aa, Artificial Sequence; identical to SEQ ID NO: 8266
  SARS-CoV-2/Australia/NSW09/2020__EPI_ISL_413595 spike protein (1-1147)(A890C_V1040C) LumSynth construct

SEQ ID NO: 8535 - protein, 1307 aa, Artificial Sequence; identical to SEQ ID NO: 8247
  SARS-CoV-2/Australia/NSW10/2020__EPI_ISL_413596 spike protein (1-1147)(A890C_V1040C) LumSynth construct

SEQ ID NO: 8536 - protein, 1307 aa, Artificial Sequence; identical to SEQ ID NO: 8268
  SARS-CoV-2/Switzerland/1000477797/2020__EPI_ISL_413023 spike protein (1-1147)(A890C_V1040C) LumSynth construct

SEQ ID NO: 8537 - protein, 1307 aa, Artificial Sequence; identical to SEQ ID NO: 8269
  SARS-CoV-2/Belgium/BA-02291/2020__EPI_ISL_415159 spike protein (1-1147)(A890C_V1040C) LumSynth construct

SEQ ID NO: 8538 - protein, 1307 aa, Artificial Sequence; identical to SEQ ID NO: 8270
  SARS-CoV-2/USA/WA8-UW5/2020__EPI_ISL_413486 spike protein (1-1147)(A890C_V1040C) LumSynth construct

SEQ ID NO: 8539 - protein, 1307 aa, Artificial Sequence; identical to SEQ ID NO: 8271
  SARS-CoV-2/England/20102000506/2020__EPI_ISL_415147 spike protein (1-1147)(A890C_V1040C) LumSynth construct

SEQ ID NO: 8540 - protein, 1307 aa, Artificial Sequence; identical to SEQ ID NO: 8272
  SARS-CoV-2/Belgium/VAG-03013/2020__EPI_ISL_415155 spike protein (1-1147)(A890C_V1040C) LumSynth construct

SEQ ID NO: 8541 - protein, 1307 aa, Artificial Sequence; identical to SEQ ID NO: 8273
  SARS-CoV-2/Belgium/BC-03016/2020__EPI_ISL_415157 spike protein (1-1147)(A890C_V1040C) LumSynth construct

SEQ ID NO: 8542 - protein, 1307 aa, Artificial Sequence; identical to SEQ ID NO: 8274
  SARS-CoV-2/Germany/BavPat3/2020__EPI_ISL_414521 spike protein (1-1147)(A890C_V1040C) LumSynth construct

SEQ ID NO: 8543 - protein, 1307 aa, Artificial Sequence; identical to SEQ ID NO: 8275
  SARS-CoV-2/France/HF1805/2020__EPI_ISL_414628 spike protein (1-1147)(A890C_V1040C) LumSynth construct

SEQ ID NO: 8544 - protein, 1307 aa, Artificial Sequence; identical to SEQ ID NO: 8276
  SARS-CoV-2/Netherlands/ZuidHolland_9/2020__EPI_ISL_414445 spike protein (1-1147)(A890C_V1040C) LumSynth construct

SEQ ID NO: 8545 - protein, 1307 aa, Artificial Sequence; identical to SEQ ID NO: 8277
  SARS-CoV-2/Finland/FIN03032020A/2020__EPI_ISL_413602 spike protein (1-1147)(A890C_V1040C) LumSynth construct

SEQ ID NO: 8546 - protein, 1307 aa, Artificial Sequence; identical to SEQ ID NO: 8278
  SARS-CoV-2/France/GE1977/2020__EPI_ISL_414632 spike protein (1-1147)(A890C_V1040C) LumSynth construct

SEQ ID NO: 8547 - protein, 1307 aa, Artificial Sequence; identical to SEQ ID NO: 8279
  SARS-CoV-2/Finland/FIN-313/2020__EPI_ISL_414641 spike protein (1-1147)(A890C_V1040C) LumSynth construct

SEQ ID NO: 8548 - protein, 1307 aa, Artificial Sequence; identical to SEQ ID NO: 8280
  SARS-CoV-2/Netherlands/ZuidHolland_2/2020__EPI_ISL_414556 spike protein (1-1147)(A890C_V1040C) LumSynth construct

SEQ ID NO: 8549 - protein, 1307 aa, Artificial Sequence; identical to SEQ ID NO: 8281
  SARS-CoV-2/USA/WA-UW31/2020__EPI_ISL_414618 spike protein (1-1147)(A890C_V1040C) LumSynth construct

SEQ ID NO: 8550 - protein, 1307 aa, Artificial Sequence; identical to SEQ ID NO: 8282
  SARS-CoV-2/South Korea/SNU01/2020__EPI_ISL_411929 spike protein (1-1147)(A890C_V1040C) LumSynth construct

SEQ ID NO: 8551 - protein, 1307 aa, Artificial Sequence; identical to SEQ ID NO: 8283
  SARS-CoV-2/China/WF0004/2020__EPI_ISL_413694 spike protein (1-1147)(A890C_V1040C) LumSynth construct

SEQ ID NO: 8552 - protein, 1307 aa, Artificial Sequence; identical to SEQ ID NO: 8284
  SARS-CoV-2/China/WF0028/2020__EPI_ISL_413791 spike protein (1-1147)(A890C_V1040C) LumSynth construct

SEQ ID NO: 8553 - protein, 1307 aa, Artificial Sequence; identical to SEQ ID NO: 8285
  SARS-CoV-2/2019-nCoV/USA-CruiseA-18/2020__MT159716.1 spike protein (1-1147)(A890C_V1040C) LumSynth construct

SEQ ID NO: 8554 - protein, 1307 aa, Artificial Sequence; identical to SEQ ID NO: 8286
  SARS-CoV-2/SARS-CoV-2/Yunnan-01/human/2020/CHN__MT049951.1 spike protein (1-1147)(A890C_V1040C) LumSynth construct

SEQ ID NO: 8555 - protein, 1307 aa, Artificial Sequence; identical to SEQ ID NO: 8287
  SARS-CoV-2/USA/WA-UW292/2020__EPI_ISL_418077 spike protein (1-1147)(A890C_V1040C) LumSynth construct

SEQ ID NO: 8556 - protein, 1307 aa, Artificial Sequence; identical to SEQ ID NO: 8288
  SARS-CoV-2/Iceland/192/2020__EPI_ISL_417819 spike protein (1-1147)(A890C_V1040C) LumSynth construct

SEQ ID NO: 8557 - protein, 1307 aa, Artificial Sequence; identical to SEQ ID NO: 8289
  SARS-CoV-2/Belgium/ULG-6939/2020__EPI_ISL_417020 spike protein (1-1147)(A890C_V1040C) LumSynth construct

SEQ ID NO: 8558 - protein, 1307 aa, Artificial Sequence; identical to SEQ ID NO: 8290
  SARS-CoV-2/France/HF2496/2020__EPI_ISL_418231 spike protein (1-1147)(A890C_V1040C) LumSynth construct

SEQ ID NO: 8559 - protein, 1307 aa, Artificial Sequence; identical to SEQ ID NO: 8291
  SARS-CoV-2/USA/WA-UW291/2020__EPI_ISL_418076 spike protein (1-1147)(A890C_V1040C) LumSynth construct

SEQ ID NO: 8560 - protein, 1307 aa, Artificial Sequence; identical to SEQ ID NO: 8255
  SARS-CoV-2/Portugal/PT0034/2020__EPI_ISL_418019 spike protein (1-1147)(A890C_V1040C) LumSynth construct

SEQ ID NO: 8561 - protein, 1307 aa, Artificial Sequence; identical to SEQ ID NO: 8247
  SARS-CoV-2/Iceland/202/2020__EPI_ISL_417750 spike protein (1-1147)(A890C_V1040C) LumSynth construct

SEQ ID NO: 8562 - protein, 1307 aa, Artificial Sequence; identical to SEQ ID NO: 8294
  SARS-CoV-2/USA/WA-UW261/2020__EPI_ISL_418046 spike protein (1-1147)(A890C_V1040C) LumSynth construct

SEQ ID NO: 8563 - protein, 1307 aa, Artificial Sequence; identical to SEQ ID NO: 8295
  SARS-CoV-2/Portugal/PT0035/2020__EPI_ISL_418020 spike protein (1-1147)(A890C_V1040C) LumSynth construct

SEQ ID NO: 8564 - protein, 1307 aa, Artificial Sequence; identical to SEQ ID NO: 8296
  SARS-CoV-2/USA/NY-NYUMC7/2020__EPI_ISL_418192 spike protein (1-1147)(A890C_V1040C) LumSynth construct

SEQ ID NO: 8565 - protein, 1307 aa, Artificial Sequence; identical to SEQ ID NO: 8297
  SARS-CoV-2/Iceland/189/2020__EPI_ISL_417709 spike protein (1-1147)(A890C_V1040C) LumSynth construct

SEQ ID NO: 8566 - protein, 1307 aa, Artificial Sequence; identical to SEQ ID NO: 8298
  SARS-CoV-2/Australia/NSW56/2020__EPI_ISL_417408 spike protein (1-1147)(A890C_V1040C) LumSynth construct

SEQ ID NO: 8567 - protein, 1307 aa, Artificial Sequence; identical to SEQ ID NO: 8299
  SARS-CoV-2/Iceland/280/2020__EPI_ISL_417608 spike protein (1-1147)(A890C_V1040C) LumSynth construct

SEQ ID NO: 8568 - protein, 1307 aa, Artificial Sequence; identical to SEQ ID NO: 8255
  SARS-CoV-2/Iceland/247/2020__EPI_ISL_417575 spike protein (1-1147)(A890C_V1040C) LumSynth construct

SEQ ID NO: 8569 - protein, 1307 aa, Artificial Sequence; identical to SEQ ID NO: 8301
  SARS-CoV-2/Iceland/238/2020__EPI_ISL_417566 spike protein (1-1147)(A890C_V1040C) LumSynth construct

SEQ ID NO: 8570 - protein, 1307 aa, Artificial Sequence; identical to SEQ ID NO: 8302
  SARS-CoV-2/Greece/16/2020__EPI_ISL_418265 spike protein (1-1147)(A890C_V1040C) LumSynth construct

SEQ ID NO: 8571 - protein, 1307 aa, Artificial Sequence; identical to SEQ ID NO: 8303
  SARS-CoV-2/Iceland/319/2020__EPI_ISL_417648 spike protein (1-1147)(A890C_V1040C) LumSynth construct

SEQ ID NO: 8572 - protein, 1307 aa, Artificial Sequence; identical to SEQ ID NO: 8304
  SARS-CoV-2/Congo/94/2020__EPI_ISL_417947 spike protein (1-1147)(A890C_V1040C) LumSynth construct

SEQ ID NO: 8573 - protein, 1307 aa, Artificial Sequence; identical to SEQ ID NO: 8305
  SARS-CoV-2/Congo/158/2020__EPI_ISL_417950 spike protein (1-1147)(A890C_V1040C) LumSynth construct

SEQ ID NO: 8574 - protein, 1307 aa, Artificial Sequence; identical to SEQ ID NO: 8306
  SARS-CoV-2/USA/UT-00034/2020__EPI_ISL_417977 spike protein (1-1147)(A890C_V1040C) LumSynth construct

SEQ ID NO: 8575 - protein, 1307 aa, Artificial Sequence; identical to SEQ ID NO: 8307
  SARS-CoV-2/USA/UT-00033/2020__EPI_ISL_417976 spike protein (1-1147)(A890C_V1040C) LumSynth construct

SEQ ID NO: 8576 - protein, 1307 aa, Artificial Sequence; identical to SEQ ID NO: 8308
  SARS-CoV-2/USA/WI-13/2020__EPI_ISL_417516 spike protein (1-1147)(A890C_V1040C) LumSynth construct

SEQ ID NO: 8577 - protein, 1306 aa, Artificial Sequence; identical to SEQ ID NO: 8309
  SARS-CoV-2/India/1-27/2020__EPI_ISL_413522 spike protein (1-1146)(A889C_V1039C) LumSynth construct

SEQ ID NO: 8578 - protein, 1301 aa, Artificial Sequence; identical to SEQ ID NO: 8310
  SARS-CoV-2/pangolin/Guangxi/P4L/2017__EPI_ISL_410538 spike protein (1-1141)(A884C_V1034C) LumSynth construct

SEQ ID NO: 8579 - protein, 1301 aa, Artificial Sequence; identical to SEQ ID NO: 8311
  SARS-CoV-2/pangolin/Guangxi/P5L/2017__EPI_ISL_410540 spike protein (1-1141)(A884C_V1034C) LumSynth construct

SEQ ID NO: 8580 - protein, 1301 aa, Artificial Sequence; identical to SEQ ID NO: 8312
  SARS-CoV-2/pangolin/Guangxi/P5E/2017__EPI_ISL_410541 spike protein (1-1141)(A884C_V1034C) LumSynth construct

SEQ ID NO: 8581 - protein, 1299 aa, Artificial Sequence; identical to SEQ ID NO: 8313
  SARS-CoV-2/pangolin/Guangxi/P1E/2017__EPI_ISL_410539 spike protein (1-1139)(A882C_V1032C) LumSynth construct

SEQ ID NO: 8582 - protein, 1307 aa, Artificial Sequence
  SARS-CoV-2/Wuhan/WIV05/2019__EPI_ISL_402128 spike protein (1-1147)(T874C_S1055C) LumSynth construct
MFVFLVLLPLVSSQCVNLTTRTQLPPAYTNSFTRGVYYPDKVFRSSVLHSTQDLFLPFFSNVTWFHAIHVSGTNGTKRFDNPVLPFNDGVYFASTEKSNIIRGWIFGTTLDSKTQSLLIVNNATNVVIKVCEFQFCNDPFLGVYYHKNNKSWMESEFRVYSSANNCTFEYVSQPFLMDLEGKQGNFKNLREFVFKNIDGYFKIYSKHTPINLVRDLPQGFSALEPLVDLPIGINITRFQTLLALHRSYLTPGDSSSGWTAGAAAYYVGYLQPRTFLLKYNENGTITDAVDCALDPLSETKCTLKSFTVEKGIYQTSNFRVQPTESIVRFPNITNLCPFGEVFNATRFASVYAWNRKRISNCVADYSVLYNSASFSTFKCYGVSPTKLNDLCFTNVYADSFVIRGDEVRQIAPGQTGKIADYNYKLPDDFTGCVIAWNSNNLDSKVGGNYNYLYRLFRKSNLKPFERDISTEIYQAGSTPCNGVEGFNCYFPLQSYGFQPTNGVGYQPYRVVVLSFELLHAPATVCGPKKSTNLVKNKCVNFNFNGLTGTGVLTESNKKFLPFQQFGRDIADTTDAVRDPQTLEILDITPCSFGGVSVITPGTNTSNQVAVLYQDVNCTEVPVAIHADQLTPTWRVYSTGSNVFQTRAGCLIGAEHVNNSYECDIPIGAGICASYQTQTNSPRRARSVASQSIIAYTMSLGAENSVAYSNNSIAIPTNFTISVTTEILPVSMTKTSVDCTMYICGDSTECSNLLLQYGSFCTQLNRALTGIAVEQDKNTQEVFAQVKQIYKTPPIKDFGGFNFSQILPDPSKPSKRSFIEDLLFNKVTLADAGFIKQYGDCLGDIAARDLICAQKFNGLTVLPPLLTDEMIAQYCSALLAGTITSGWTFGAGAALQIPFAMQMAYRFNGIGVTQNVLYENQKLIANQFNSAIGKIQDSLSSTASALGKLQDVVNQNAQALNTLVKQLSSNFGAISSVLNDILSRLDKVEAEVQIDRLITGRLQSLQTYVTQQLIRAAEIRASANLAATKMSECVLGQSKRVDFCGKGYHLMSFPQCAPHGVVFLHVTYVPAQEKNFTTAPAICHDGKAHFPREGVFVSNGTHWFVTQRNFYEPQIITTDNTFVSGNCDVVIGIVNNTVYDPLQPELDSGGGSGGGQIYEGKLTAEGLRFGIVASRFNHALVDRLVEGAIDAIVRHGGREEDITLVRVPGSWEIPVAAGELARKEDIDAVIAIGVLIRGATPHFDYIASEVSKGLADLSLELRKPITFGVITADTLEQAIERAGTKHGNKGWEAALSAIEMANLFKSLR

SEQ ID NO: 8583 - protein, 1303 aa, Artificial Sequence
  SARS-CoV-2/bat/Yunnan/RaTG13/2013__EPI_ISL_402131 spike protein (1-1143)(T870C_S1051C) LumSynth construct
MFVFLVLLPLVSSQCVNLTTRTQLPPAYTNSSTRGVYYPDKVFRSSVLHLTQDLFLPFFSNVTWFHAIHVSGTNGIKRFDNPVLPFNDGVYFASTEKSNIIRGWIFGTTLDSKTQSLLIVNNATNVVIKVCEFQFCNDPFLGVYYHKNNKSWMESEFRVYSSANNCTFEYVSQPFLMDLEGKQGNFKNLREFVFKNIDGYFKIYSKHTPINLVRDLPPGFSALEPLVDLPIGINITRFQTLLALHRSYLTPGDSSSGWTAGAAAYYVGYLQPRTFLLKYNENGTITDAVDCALDPLSETKCTLKSFTVEKGIYQTSNFRVQPTDSIVRFPNITNLCPFGEVFNATTFASVYAWNRKRISNCVADYSVLYNSTSFSTFKCYGVSPTKLNDLCFTNVYADSFVITGDEVRQIAPGQTGKIADYNYKLPDDFTGCVIAWNSKHIDAKEGGNFNYLYRLFRKANLKPFERDISTEIYQAGSKPCNGQTGLNCYYPLYRYGFYPTDGVGHQPYRVVVLSFELLNAPATVCGPKKSTNLVKNKCVNFNFNGLTGTGVLTESNKKFLPFQQFGRDIADTTDAVRDPQTLEILDITPCSFGGVSVITPGTNASNQVAVLYQDVNCTEVPVAIHADQLTPTWRVYSTGSNVFQTRAGCLIGAEHVNNSYECDIPIGAGICASYQTQTNSRSVASQSIIAYTMSLGAENSVAYSNNSIAIPTNFTISVTTEILPVSMTKTSVDCTMYICGDSTECSNLLLQYGSFCTQLNRALTGIAVEQDKNTQEVFAQVKQIYKTPPIKDFGGFNFSQILPDPSKPSKRSFIEDLLFNKVTLADAGFIKQYGDCLGDIAARDLICAQKFNGLTVLPPLLTDEMIAQYCSALLAGTITSGWTFGAGAALQIPFAMQMAYRFNGIGVTQNVLYENQKLIANQFNSAIGKIQDSLSSTASALGKLQDVVNQNAQALNTLVKQLSSNFGAISSVLNDILSRLDKVEAEVQIDRLITGRLQSLQTYVTQQLIRAAEIRASANLAATKMSECVLGQSKRVDFCGKGYHLMSFPQCAPHGVVFLHVTYVPAQEKNFTTAPAICHDGKAHFPREGVFVSNGTHWFVTQRNFYEPQIITTDNTFVSGSCDVVIGIVNNTVYDPLQPELDSGGGSGGGQIYEGKLTAEGLRFGIVASRFNHALVDRLVEGAIDAIVRHGGREEDITLVRVPGSWEIPVAAGELARKEDIDAVIAIGVLIRGATPHFDYIASEVSKGLADLSLELRKPITFGVITADTLEQAIERAGTKHGNKGWEAALSAIEMANLFKSLR

SEQ ID NO: 8584 - protein, 1307 aa, Artificial Sequence
  SARS-CoV-2/Wuhan/HBCDC-HB-01/2019__EPI_ISL_402132 spike protein (1-1147)(T874C_S1055C) LumSynth construct
MFVFLVLLPLVSSQCVNLTTRTQLPPAYTNSITRGVYYPDKVFRSSVLHSTQDLFLPFFSNVTWFHAIHVSGTNGTKRFDNPVLPFNDGVYFASTEKSNIIRGWIFGTTLDSKTQSLLIVNNATNVVIKVCEFQFCNDPFLGVYYHKNNKSWMESEFRVYSSANNCTFEYVSQPFLMDLEGKQGNFKNLREFVFKNIDGYFKIYSKHTPINLVRDLPQGFSALEPLVDLPIGINITRFQTLLALHRSYLTPGDSSSGWTAGAAAYYVGYLQPRTFLLKYNENGTITDAVDCALDPLSETKCTLKSFTVEKGIYQTSNFRVQPTESIVRFPNITNLCPFGEVFNATRFASVYAWNRKRISNCVADYSVLYNSASFSTFKCYGVSPTKLNDLCFTNVYADSFVIRGDEVRQIAPGQTGKIADYNYKLPDDFTGCVIAWNSNNLDSKVGGNYNYLYRLFRKSNLKPFERDISTEIYQAGSTPCNGVEGFNCYFPLQSYGFQPTNGVGYQPYRVVVLSFELLHAPATVCGPKKSTNLVKNKCVNFNFNGLTGTGVLTESNKKFLPFQQFGRDIADTTDAVRDPQTLEILDITPCSFGGVSVITPGTNTSNQVAVLYQDVNCTEVPVAIHADQLTPTWRVYSTGSNVFQTRAGCLIGAEHVNNSYECDIPIGAGICASYQTQTNSPRRARSVASQSIIAYTMSLGAENSVAYSNNSIAIPTNFTISVTTEILPVSMTKTSVDCTMYICGDSTECSNLLLQYGSFCTQLNRALTGIAVEQDKNTQEVFAQVKQIYKTPPIKDFGGFNFSQILPDPSKPSKRSFIEDLLFNKVTLADAGFIKQYGDCLGDIAARDLICAQKFNGLTVLPPLLTDEMIAQYCSALLAGTITSGWTFGAGAALQIPFAMQMAYRFNGIGVTQNVLYENQKLIANQFNSAIGKIQDSLSSTASALGKLQDVVNQNAQALNTLVKQLSSNFGAISSVLNDILSRLDKVEAEVQIDRLITGRLQSLQTYVTQQLIRAAEIRASANLAATKMSECVLGQSKRVDFCGKGYHLMSFPQCAPHGVVFLHVTYVPAQEKNFTTAPAICHDGKAHFPREGVFVSNGTHWFVTQRNFYEPQIITTDNTFVSGNCDVVIGIVNNTVYDPLQPELDSGGGSGGGQIYEGKLTAEGLRFGIVASRFNHALVDRLVEGAIDAIVRHGGREEDITLVRVPGSWEIPVAAGELARKEDIDAVIAIGVLIRGATPHFDYIASEVSKGLADLSLELRKPITFGVITADTLEQAIERAGTKHGNKGWEAALSAIEMANLFKSLR

SEQ ID NO: 8585 - protein, 1307 aa, Artificial Sequence
  SARS-CoV-2/Guangdong/20SF028/2020__EPI_ISL_403936 spike protein (1-1147)(T874C_S1055C) LumSynth construct
MFVFLVLLPLVSSQCVNLTTRTQLPPAYTNSFTRGVYYPDKVFRSSVLYSTQDLFLPFFSNVTWFHAIHVSGTNGTKRFDNPVLPFNDGVYFASTEKSNIIRGWIFGTTLDSKTQSLLIVNNATNVVIKVCEFQFCNDPFLGVYYHKNNKSWMESEFRVYSSANNCTFEYVSQPFLMDLEGKQGNFKNLREFVFKNIDGYFKIYSKHTPINLVRDLPQGFSALEPLVDLPIGINITRFQTLLALHRSYLTPGDSSSGWTAGAAAYYVGYLQPRTFLLKYNENGTITDAVDCALDPLSETKCTLKSFTVEKGIYQTSNFRVQPTESIVRFPNITNLCPFGEVFNATRFASVYAWNRKRISNCVADYSVLYNSASFSTFKCYGVSPTKLNDLCFTNVYADSFVIRGDEVRQIAPGQTGKIADYNYKLPDDFTGCVIAWNSNNLDSKVGGNYNYLYRLFRKSNLKPFERDISTEIYQAGSTPCNGVEGFNCYFPLQSYGFQPTNGVGYQPYRVVVLSFELLHAPATVCGPKKSTNLVKNKCVNFNFNGLTGTGVLTESNKKFLPFQQFGRDIADTTDAVRDPQTLEILDITPCSFGGVSVITPGTNTSNQVAVLYQDVNCTEVPVAIHADQLTPTWRVYSTGSNVFQTRAGCLIGAEHVNNSYECDIPIGAGICASYQTQTNSPRRARSVASQSIIAYTMSLGAENSVAYSNNSIAIPTNFTISVTTEILPVSMTKTSVDCTMYICGDSTECSNLLLQYGSFCTQLNRALTGIAVEQDKNTQEVFAQVKQIYKTPPIKDFGGFNFSQILPDPSKPSKRSFIEDLLFNKVTLADAGFIKQYGDCLGDIAARDLICAQKFNGLTVLPPLLTDEMIAQYCSALLAGTITSGWTFGAGAALQIPFAMQMAYRFNGIGVTQNVLYENQKLIANQFNSAIGKIQDSLSSTASALGKLQDVVNQNAQALNTLVKQLSSNFGAISSVLNDILSRLDKVEAEVQIDRLITGRLQSLQTYVTQQLIRAAEIRASANLAATKMSECVLGQSKRVDFCGKGYHLMSFPQCAPHGVVFLHVTYVPAQEKNFTTAPAICHDGKAHFPREGVFVSNGTHWFVTQRNFYEPQIITTDNTFVSGNCDVVIGIVNNTVYDPLQPELDSGGGSGGGQIYEGKLTAEGLRFGIVASRFNHALVDRLVEGAIDAIVRHGGREEDITLVRVPGSWEIPVAAGELARKEDIDAVIAIGVLIRGATPHFDYIASEVSKGLADLSLELRKPITFGVITADTLEQAIERAGTKHGNKGWEAALSAIEMANLFKSLR

SEQ ID NO: 8586 - protein, 1307 aa, Artificial Sequence
  SARS-CoV-2/Shenzhen/SZTH-001/2020__EPI_ISL_406592 spike protein (1-1147)(T874C_S1055C) LumSynth construct
MFVFLVLLPLVSSQCVNLTTRTQLPPAYTNSFTRGVYYPDKVFRSSVLHSTQDLFLPFFSNVTWFHAIHVSGTNGTKRFDNPVLPFNDGVYFASTEKSNIIRGWIFGTTLDSKTQSLLIVNNATNVVIKVCEFQFCNDPFLGVYYHKNNKSWMESEFRVYSSANNCTFEYVSQPFLMDLEGKQGNFKNLREFVFKNIDGYFKIYSKHTPINLVRDLPQGFSALEPLVDLPIGINITRFQTLLALHRSYLTPGDSSSGWTAGAAAYYVGYLQPRTFLLKYNENGTITDAVDCALDPLSETKCTLKSFTVEKGIYQTSNFRVQPTESIVRFPNITNLCPFGEVFNATRFASVYAWNRKRISNCVADYSVLYNSASFSTFKCYGVSPTKLNDLCFTNVYADSFVIRGDEVRQIAPGQTGKIADYNYKLPDDFTGCVIAWNSNNLDSKVGGNYNYLYRLFRKSNLKPFERDISTEIYQAGSTPCNGVEGFNCYFPLQSYGFQPTNGVGYQPYRVVVLSFELLHAPATVCGPKKSTNLVKNKCVNFNFNGLTGTGVLTESNKKFLPFQQFGRDIADTTDAVRDPQTLEILDITPCSFGGVSVITPGTNTSNQVAVLYQDVNCTEVPVAIHADQLTPTWRVYSTGSNVFQTRAGCLIGAEHVNNSYECDIPIGAGICASYQTQTNSPRRARSVASQSIIAYTMSLGAENSVAYSNNSIAIPTNFTISVTTEILPVSMTKTSVDCTMYICGDSTECSNLLLQYGSFCTQLNRALTGIAVEQDKNTQEVFAQVKQIYKTPPIKDFGGFNFSQILPDPSKPSKRSFIEDLLFNKVTLADAGFIKQYGDCLGDIAARDLICAQKFNGLTVLPPLLTDEMIAQYCSALLAGTITSGWTFGAGAALQIPFAMQMAYRFNGIGVTQNVLYENQKLIANQFNSAIGKIQDSLSSTASALGKLQDVVNQNAQALNTLVKQLSSNFGAISSVLNDILSRLDKVEAEVQIDRLITGRLQSLQTYVTQQLIRAAEIRASANLAATKMSECVLGQSKRVDFCGKGYHLMSFPQCAPHGVVFLHVTYVPAQEKNFTTAPAICHDGKAHFPREGVFVSNGTHWFVTQRNFYEPQIITTDNTFVSGNCDVLIGIVNNTVYDPLQPELDSGGGSGGGQIYEGKLTAEGLRFGIVASRFNHALVDRLVEGAIDAIVRHGGREEDITLVRVPGSWEIPVAAGELARKEDIDAVIAIGVLIRGATPHFDYIASEVSKGLADLSLELRKPITFGVITADTLEQAIERAGTKHGNKGWEAALSAIEMANLFKSLR

SEQ ID NO: 8587 - protein, 1307 aa, Artificial Sequence
  SARS-CoV-2/Shenzhen/SZTH-004/2020__EPI_ISL_406595 spike protein (1-1147)(T874C_S1055C) LumSynth construct
MFVFLVLLPLVSSQCVNLTTRTQLPPAYTNSFTRGVYYPDKVFRSSVLHSTQDLFLPFFSNVTWFHAIHVSGTNGTKRFDNPVLPFNDGVYFASTEKSNIIRGWIFGTTLDSKTQSLLIVNNATNVVIKVCEFQFCNDPFLGVYYHKNNKSWMESEFRVYSSANNCTFEYVSQPFLMDLEGKQGNFKNLREFVFKNIDGYFKIYSKHTPINLVRDLPQGFSALEPLVDLPIGINITRFQTLLALHRSYLTPGDSSSGWTAGAAAYYVGYLQPRTFLLKYNENGTITDAVDCALDPLSETKCTLKSFTVEKGIYQTSNFRVQPTESIVRFPNITNLCPFGEVFNATRFASVYAWDRKRISNCVAYYSVLYNSASFSTFKCYGVSPTKLNDLCFTNVYADSFVIRGDEVRQIAPGQTGKIADYNYKLPDDFTGCVIAWNSNNLDSKVGGNYNYLYRLFRKSNLKPFERDISTEIYQAGSTPCNGVEGFNCYFPLQSYGFQPTNGVGYQPYRVVVLSFELLHAPATVCGPKKSTNLVKNKCVNFNFNGLTGTGVLTESNKKFLPFQQFGRDIADTTDAVRDPQTLEILDITPCSFGGVSVITPGTNTSNQVAVLYQDVNCTEVPVAIHADQLTPTWRVYSTGSNVFQTRAGCLIGAEHVNNSYECDIPIGAGICASYQTQTNSPRRARSVASQSIIAYTMSLGAENSVAYSNNSIAIPTNFTISVTTEILPVSMTKTSVDCTMYICGDSTECSNLLLQYGSFCTQLNRALTGIAVEQDKNTQEVFAQVKQIYKTPPIKDFGGFNFSQILPDPSKPSKRSFIEDLLFNKVTLADAGFIKQYGDCLGDIAARDLICAQKFNGLTVLPPLLTDEMIAQYCSALLAGTITSGWTFGAGAALQIPFAMQMAYRFNGIGVTQNVLYENQKLIANQFNSAIGKIQDSLSSTASALGKLQDVVNQNAQALNTLVKQLSSNFGAISSVLNDILSRLDKVEAEVQIDRLITGRLQSLQTYVTQQLIRAAEIRASANLAATKMSECVLGQSKRVDFCGKGYHLMSFPQCAPHGVVFLHVTYVPAQEKNFTTAPAICHDGKAHFPREGVFVSNGTHWFVTQRNFYEPQIITTDNTFVSGNCDVVIGIVNNTVYDPLQPELDSGGGSGGGQIYEGKLTAEGLRFGIVASRFNHALVDRLVEGAIDAIVRHGGREEDITLVRVPGSWEIPVAAGELARKEDIDAVIAIGVLIRGATPHFDYIASEVSKGLADLSLELRKPITFGVITADTLEQAIERAGTKHGNKGWEAALSAIEMANLFKSLR

SEQ ID NO: 8588 - protein, 1307 aa, Artificial Sequence
  SARS-CoV-2/France/IDF0372/2020__EPI_ISL_406596 spike protein (1-1147)(T874C_S1055C) LumSynth construct
MFVFLVLLPLVSSQCVNLTTRTQLPPAYTNSFTRGVYYPDKVFRSSVLHSTQDLFLPFFSNVTWFHAIHVSGTNGTKRFDNPVLPFNDGVYFASTEKSNIIRGWIFGTTLDSKTQSLLIVNNATNVVIKVCEFQFCNDPFLGVYYHKNNKSWMESEFRVYSSANNCTFEYVSQPFLMDLEGKQGNFKNLREFVFKNIDGYFKIYSKHTPINLVRDLPQGFSALEPLVDLPIGINITRFQTLLALHRSYLTPGDSSSGWTAGAAAYYVGYLQPRTFLLKYNENGTITDAVDCALDPLSETKCTLKSFTVEKGIYQTSNFRVQPTESIVRFPNITNLCPFGEVFNATRFASVYAWNRKRISNCVADYSFLYNSASFSTFKCYGVSPTKLNDLCFTNVYADSFVIRGDEVRQIAPGQTGKIADYNYKLPDDFTGCVIAWNSNNLDSKVGGNYNYLYRLFRKSNLKPFERDISTEIYQAGSTPCNGVEGFNCYFPLQSYGFQPTNGVGYQPYRVVVLSFELLHAPATVCGPKKSTNLVKNKCVNFNFNGLTGTGVLTESNKKFLPFQQFGRDIADTTDAVRDPQTLEILDITPCSFGGVSVITPGTNTSNQVAVLYQDVNCTEVPVAIHADQLTPTWRVYSTGSNVFQTRAGCLIGAEHVNNSYECDIPIGAGICASYQTQTNSPRRARSVASQSIIAYTMSLGAENSVAYSNNSIAIPTNFTISVTTEILPVSMTKTSVDCTMYICGDSTECSNLLLQYGSFCTQLNRALTGIAVEQDKNTQEVFAQVKQIYKTPPIKDFGGFNFSQILPDPSKPSKRSFIEDLLFNKVTLADAGFIKQYGDCLGDIAARDLICAQKFNGLTVLPPLLTDEMIAQYCSALLAGTITSGWTFGAGAALQIPFAMQMAYRFNGIGVTQNVLYENQKLIANQFNSAIGKIQDSLSSTASALGKLQDVVNQNAQALNTLVKQLSSNFGAISSVLNDILSRLDKVEAEVQIDRLITGRLQSLQTYVTQQLIRAAEIRASANLAATKMSECVLGQSKRVDFCGKGYHLMSFPQCAPHGVVFLHVTYVPAQEKNFTTAPAICHDGKAHFPREGVFVSNGTHWFVTQRNFYEPQIITTDNTFVSGNCDVVIGIVNNTVYDPLQPELDSGGGSGGGQIYEGKLTAEGLRFGIVASRFNHALVDRLVEGAIDAIVRHGGREEDITLVRVPGSWEIPVAAGELARKEDIDAVIAIGVLIRGATPHFDYIASEVSKGLADLSLELRKPITFGVITADTLEQAIERAGTKHGNKGWEAALSAIEMANLFKSLR

SEQ ID NO: 8589 - protein, 1307 aa, Artificial Sequence
  SARS-CoV-2/Australia/VIC01/2020__EPI_ISL_406844 spike protein (1-1147)(T874C_S1055C) LumSynth construct
MFVFLVLLPLVSSQCVNLTTRTQLPPAYTNSFTRGVYYPDKVFRSSVLHSTQDLFLPFFSNVTWFHAIHVSGTNGTKRFDNPVLPFNDGVYFASTEKSNIIRGWIFGTTLDSKTQSLLIVNNATNVVIKVCEFQFCNDPFLGVYYHKNNKSWMESEFRVYSSANNCTFEYVSQPFLMDLEGKQGNFKNLREFVFKNIDGYFKIYSKHTPINLVRDLPQGFSALEPLVDLPIGINITRFQTLLALHRRYLTPGDSSSGWTAGAAAYYVGYLQPRTFLLKYNENGTITDAVDCALDPLSETKCTLKSFTVEKGIYQTSNFRVQPTESIVRFPNITNLCPFGEVFNATRFASVYAWNRKRISNCVADYSVLYNSASFSTFKCYGVSPTKLNDLCFTNVYADSFVIRGDEVRQIAPGQTGKIADYNYKLPDDFTGCVIAWNSNNLDSKVGGNYNYLYRLFRKSNLKPFERDISTEIYQAGSTPCNGVEGFNCYFPLQSYGFQPTNGVGYQPYRVVVLSFELLHAPATVCGPKKSTNLVKNKCVNFNFNGLTGTGVLTESNKKFLPFQQFGRDIADTTDAVRDPQTLEILDITPCSFGGVSVITPGTNTSNQVAVLYQDVNCTEVPVAIHADQLTPTWRVYSTGSNVFQTRAGCLIGAEHVNNSYECDIPIGAGICASYQTQTNSPRRARSVASQSIIAYTMSLGAENSVAYSNNSIAIPTNFTISVTTEILPVSMTKTSVDCTMYICGDSTECSNLLLQYGSFCTQLNRALTGIAVEQDKNTQEVFAQVKQIYKTPPIKDFGGFNFSQILPDPSKPSKRSFIEDLLFNKVTLADAGFIKQYGDCLGDIAARDLICAQKFNGLTVLPPLLTDEMIAQYCSALLAGTITSGWTFGAGAALQIPFAMQMAYRFNGIGVTQNVLYENQKLIANQFNSAIGKIQDSLSSTASALGKLQDVVNQNAQALNTLVKQLSSNFGAISSVLNDILSRLDKVEAEVQIDRLITGRLQSLQTYVTQQLIRAAEIRASANLAATKMSECVLGQSKRVDFCGKGYHLMSFPQCAPHGVVFLHVTYVPAQEKNFTTAPAICHDGKAHFPREGVFVSNGTHWFVTQRNFYEPQIITTDNTFVSGNCDVVIGIVNNTVYDPLQPELDSGGGSGGGQIYEGKLTAEGLRFGIVASRFNHALVDRLVEGAIDAIVRHGGREEDITLVRVPGSWEIPVAAGELARKEDIDAVIAIGVLIRGATPHFDYIASEVSKGLADLSLELRKPITFGVITADTLEQAIERAGTKHGNKGWEAALSAIEMANLFKSLR

SEQ ID NO: 8590 - protein, 1307 aa, Artificial Sequence
  SARS-CoV-2/Germany/BavPat1/2020__EPI_ISL_406862 spike protein (1-1147)(T874C_S1055C) LumSynth construct
MFVFLVLLPLVSSQCVNLTTRTQLPPAYTNSFTRGVYYPDKVFRSSVLHSTQDLFLPFFSNVTWFHAIHVSGTNGTKRFDNPVLPFNDGVYFASTEKSNIIRGWIFGTTLDSKTQSLLIVNNATNVVIKVCEFQFCNDPFLGVYYHKNNKSWMESEFRVYSSANNCTFEYVSQPFLMDLEGKQGNFKNLREFVFKNIDGYFKIYSKHTPINLVRDLPQGFSALEPLVDLPIGINITRFQTLLALHRSYLTPGDSSSGWTAGAAAYYVGYLQPRTFLLKYNENGTITDAVDCALDPLSETKCTLKSFTVEKGIYQTSNFRVQPTESIVRFPNITNLCPFGEVFNATRFASVYAWNRKRISNCVADYSVLYNSASFSTFKCYGVSPTKLNDLCFTNVYADSFVIRGDEVRQIAPGQTGKIADYNYKLPDDFTGCVIAWNSNNLDSKVGGNYNYLYRLFRKSNLKPFERDISTEIYQAGSTPCNGVEGFNCYFPLQSYGFQPTNGVGYQPYRVVVLSFELLHAPATVCGPKKSTNLVKNKCVNFNFNGLTGTGVLTESNKKFLPFQQFGRDIADTTDAVRDPQTLEILDITPCSFGGVSVITPGTNTSNQVAVLYQGVNCTEVPVAIHADQLTPTWRVYSTGSNVFQTRAGCLIGAEHVNNSYECDIPIGAGICASYQTQTNSPRRARSVASQSIIAYTMSLGAENSVAYSNNSIAIPTNFTISVTTEILPVSMTKTSVDCTMYICGDSTECSNLLLQYGSFCTQLNRALTGIAVEQDKNTQEVFAQVKQIYKTPPIKDFGGFNFSQILPDPSKPSKRSFIEDLLFNKVTLADAGFIKQYGDCLGDIAARDLICAQKFNGLTVLPPLLTDEMIAQYCSALLAGTITSGWTFGAGAALQIPFAMQMAYRFNGIGVTQNVLYENQKLIANQFNSAIGKIQDSLSSTASALGKLQDVVNQNAQALNTLVKQLSSNFGAISSVLNDILSRLDKVEAEVQIDRLITGRLQSLQTYVTQQLIRAAEIRASANLAATKMSECVLGQSKRVDFCGKGYHLMSFPQCAPHGVVFLHVTYVPAQEKNFTTAPAICHDGKAHFPREGVFVSNGTHWFVTQRNFYEPQIITTDNTFVSGNCDVVIGIVNNTVYDPLQPELDSGGGSGGGQIYEGKLTAEGLRFGIVASRFNHALVDRLVEGAIDAIVRHGGREEDITLVRVPGSWEIPVAAGELARKEDIDAVIAIGVLIRGATPHFDYIASEVSKGLADLSLELRKPITFGVITADTLEQAIERAGTKHGNKGWEAALSAIEMANLFKSLR

SEQ ID NO: 8591 - protein, 1307 aa, Artificial Sequence
  SARS-CoV-2/Wuhan/HBCDC-HB-02/2020__EPI_ISL_412978 spike protein (1-1147)(T874C_S1055C) LumSynth construct
MFVFLVLLPLVSSQCVNLTTRTQLPPAYTNSFTRGVYYPDKVFRSSVLHSTQDLFLPFFSNVTWFHAIHVSGTNGTKRFDNPVLPFNDGVYFASTEKSNIIRGWIFGTTLDSKTQSLLIVNNATNVVIKVCEFQFCNDPFLGVYYHKNNKSWMESEFRVYSSANNCTFEYVSQPFLMDLEGKQGNFKNLREFVFKNIDGYFKIYSKHTPINLVRDLPQGFSALEPLVDLPIGINITRFQTLLALHRSYLTPGDSSSGWTAGAAAYYVGYLQPRTFLLKYNENGTITDAVDCALDPLSETKCTLKSFTVEKGIYQTSNFRVQPTESIVRFPNITNLCPFGEVFNATRFASVYAWNRKRISNCVADYSVLYNSASFSTFKCYGVSPTKLNDLCFTNVYADSFVIRGDEVRQIAPGQTGKIADYNYKLPDDFTGCVIAWNSNNLDSKVGGNYNYLYRLFRKSNLKPFERDISTEIYQAGSTPCNGVEGFNCYFPLQSYGFQPTNGVGYQPYRVVVLSFELLHAPATVCGPKKSTNLVKNKCVNFNFNGLTGTGVLTESNKKFLPFQQFGRDIADTTDAVRDPQTLEILDITPCSFGGVSVITPGTNTSNQVAVLYQDVNCTEVPVAIHADQLTPTWRVYSTGSNVFQTRAGCLIGAEHVNNSYECDIPIGAGICASYQTQTNSPRRARSVASQSIIAYTMSLGAENSVAYSNNSIAIPTNFTISVTTEILPVSMTKTSVDCTMYICGDSTECSNFLLQYGSFCTQLNRALTGIAVEQDKNTQEVFAQVKQIYKTPPIKDFGGFNFSQILPDPSKPSKRSFIEDLLFNKVTLADAGFIKQYGDCLGDIAARDLICAQKFNGLTVLPPLLTDEMIAQYCSALLAGTITSGWTFGAGAALQIPFAMQMAYRFNGIGVTQNVLYENQKLIANQFNSAIGKIQDSLSSTASALGKLQDVVNQNAQALNTLVKQLSSNFGAISSVLNDILSRLDKVEAEVQIDRLITGRLQSLQTYVTQQLIRAAEIRASANLAATKMSECVLGQSKRVDFCGKGYHLMSFPQCAPHGVVFLHVTYVPAQEKNFTTAPAICHDGKAHFPREGVFVSNGTHWFVTQRNFYEPQIITTDNTFVSGNCDVVIGIVNNTVYDPLQPELDSGGGSGGGQIYEGKLTAEGLRFGIVASRFNHALVDRLVEGAIDAIVRHGGREEDITLVRVPGSWEIPVAAGELARKEDIDAVIAIGVLIRGATPHFDYIASEVSKGLADLSLELRKPITFGVITADTLEQAIERAGTKHGNKGWEAALSAIEMANLFKSLR

SEQ ID NO: 8592 - protein, 1307 aa, Artificial Sequence
  SARS-CoV-2/Australia/QLD02/2020__EPI_ISL_407896 spike protein (1-1147)(T874C_S1055C) LumSynth construct
MFVFLVLLPLVSSQCVNLTTRTQLPPAYTNSFTRGVYYPDKVFRSSVLHSTQDLFLPFFSNVTWFHAIHVSGTNGTKRFDNPVLPFNDGVYFASTEKSNIIRGWIFGTTLDSKTQSLLIVNNATNVVIKVCEFQFCNDPFLGVYYHKNNKSWMESEFRVYSSANNCTFEYVSQPFLMDLEGKQGNFKNLREFVFKNIDGYFKIYSKHTPINLVRDLPQGFSALEPLVDLPIGINITRFQTLLALHRSYLTPGDSSSGWTAGAAAYYVGYLQPRTFLLKYNENGTITDAVDCALDPLSETKCTLKSFTVEKGIYQTSNFRVQPTESIVRFPNITNLCPFGEVFNATRFASVYAWNRKRISNCVADYSVLYNSASFSTFKCYGVSPTKLNDLCFTNVYADSFVIRGDEVRQIAPGQTGKIADYNYKLPDDFTGCVIAWNSNNLDSKVGGNYNYLYRLFRKSNLKPFERDISTEIYQAGSTPCNGVEGFNCYFPLQSYGFQPTNGVGYQPYRVVVLSFELLHAPATVCGPKKSTNLVKNKCVNFNFNGLTGTGVLTESNKKFLPFQQFGRDIADTTDAVRDPQTLEILDITPCSFGGVSVITPGTNTSNQVAVLYQDVNCTEVPVAIHADQLTPTWRVYSTGSNVFQTRAGCLIGAEHVNNSYECDIPIGAGICASYQTQTNSPRRARSVASQSIIAYTMSLGAENSVAYSNNSIAIPTNFTISVTTEILPVSMTKTSVDCTMYICGDSTECSNLLLQYGSFCTQLNRALTGIAVEQDKNTQEVFAQVKQIYKTPPIKDFGGFNFSQILPDPSKPSKRSFIEDLLFNKVTLADAGFIKQYGDCLGDIAARDLICAQKFNGLTVLPPLLTDEMIAQYCSALLAGTITSGWTFGAGAALQIPFAMQMAYRFNGIGVTQNVLYENQKLIANQFNSAIGKIQDSLSSTASALGKLQDVVNQNAQALNTLVKQLSSNFGAISSVLNDILSRLDKVEAEVQIDRLITGRLQSLQTYVTQQLIRAAEIRASANLAATKMSECVLGQSKRVDFCGKGYHLMSFPQCAPHGVVFLHVTYVPAQEKNFTTAPAICHDGKAHFPREGVFVSNGTHWFVTQRNFYEPQIITTDNTFVSGNCDVVIGIVNNTVYDPLQLELDSGGGSGGGQIYEGKLTAEGLRFGIVASRFNHALVDRLVEGAIDAIVRHGGREEDITLVRVPGSWEIPVAAGELARKEDIDAVIAIGVLIRGATPHFDYIASEVSKGLADLSLELRKPITFGVITADTLEQAIERAGTKHGNKGWEAALSAIEMANLFKSLR

SEQ ID NO: 8593 - protein, 1307 aa, Artificial Sequence
  SARS-CoV-2/India/1-31/2020__EPI_ISL_413523 spike protein (1-1147)(T874C_S1055C) LumSynth construct
MFVFLVLLPLVSSQCVNLTTRTQLPPAYTNSFTRGVYYPDKVFRSSVLHSTQDLFLPFFSNVTWFHAIHVSGTNGTKRFDNPVLPFNDGVYFASTEKSNIIRGWIFGTTLDSKTQSLLIVNNATNVVIKVCEFQFCNDPFLGVYYHKNNKSWMESEFRVYSSANNCTFEYVSQPFLMDLEGKQGNFKNLREFVFKNIDGYFKIYSKHTPINLVRDLPQGFSALEPLVDLPIGINITRFQTLLALHRSYLTPGDSSSGWTAGAAAYYVGYLQPRTFLLKYNENGTITDAVDCALDPLSETKCTLKSFTVEKGIYQTSNFRVQPTESIVRFPNITNLCPFGEVFNATRFASVYAWNRKRISNCVADYSVLYNSASFSTFKCYGVSPTKLNDLCFTNVYADSFVIRGDEVRQIAPGQTGKIADYNYKLPDDFTGCVIAWNSNNLDSKVGGNYNYLYRLFRKSNLKPFERDISTEIYQAGSTPCNGVEGFNCYFPLQSYGFQPTNGVGYQPYRVVVLSFELLHAPATVCGPKKSTNLVKNKCVNFNFNGLTGTGVLTESNKKFLPFQQFGRDIADTTDAVRDPQTLEILDITPCSFGGVSVITPGTNTSNQVAVLYQDVNCTEVPVAIHADQLTPTWRVYSTGSNVFQTRAGCLIGAEHVNNSYECDIPIGAGICASYQTQTNSPRRARSVASQSIIAYTMSLGAENSVAYSNNSIAIPTNFTISVTTEILPVSMTKTSVDCTMYICGDSTECSNLLLQYGSFCTQLNRALTGIAVEQDKNTQEVFAQVKQIYKTPPIKDFGGFNFSQILPDPSKPSKRSFIEDLLFNKVTLADAGFIKQYGDCLGDIAARDLICAQKFNGLTVLPPLLTDEMIAQYCSALLAGTITSGWTFGAGAALQIPFAMQMAYRFNGIGVTQNVLYENQKLIANQFNSVIGKIQDSLSSTASALGKLQDVVNQNAQALNTLVKQLSSNFGAISSVLNDILSRLDKVEAEVQIDRLITGRLQSLQTYVTQQLIRAAEIRASANLAATKMSECVLGQSKRVDFCGKGYHLMSFPQCAPHGVVFLHVTYVPAQEKNFTTAPAICHDGKAHFPREGVFVSNGTHWFVTQRNFYEPQIITTDNTFVSGNCDVVIGIVNNTVYDPLQPELDSGGGSGGGQIYEGKLTAEGLRFGIVASRFNHALVDRLVEGAIDAIVRHGGREEDITLVRVPGSWEIPVAAGELARKEDIDAVIAIGVLIRGATPHFDYIASEVSKGLADLSLELRKPITFGVITADTLEQAIERAGTKHGNKGWEAALSAIEMANLFKSLR

SEQ ID NO: 8594 - protein, 1307 aa, Artificial Sequence
  SARS-CoV-2/Guangdong/GD2020087-P0008/2020__EPI_ISL_413863 spike protein (1-1147)(T874C_S1055C) LumSynth construct
MFVFLVLLPLVSSQCVNLTTRTQLPPAYTNSFTRGVYYPDKVFRSSVLHSTQDLFLPFFSNVTWFHAIHVSGTNGTKRFDNPVLPFNDGVYFASTEKSNIIRGWIFGTTLDSKTQSLLIVNNATNVVIKVCEFQFCNDPFLGVYYHKNNKSWMESEFRVYSSANNCTFEYVSQPFLMDLEGKQGNFKNLREFVFKNIDGYFKIYSKHTPINLVRDLPQGFSALEPLVDLPIGINITRFQTLLALHRSYLTPGDSSSGWTAGAAAYYVGYLQPRTFLLKYNENGTITDAVDCALDPLSETKCTLKSFTVEKGIYQTSNFRVQPTESIVRFPNITNLCPFGEVFNATRFASVYAWNRKRISNCVADYSVLYNSASFSTFKCYGVSPTKLNDLCFTNVYADSFVIRGDEVREIAPGQTGKIADYNYKLPDDFTGCVIAWNSNNLDSKVGGNYNYLYRLFRKSNLKPFERDISTEIYQAGSTPCNGVEGFNCYFPLQSYGFQPTNGVGYQPYRVVVLSFELLHAPATVCGPKKSTNLVKNKCVNFNFNGLTGTGVLTESNKKFLPFQQFGRDIADTTDAVRDPQTLEILDITPCSFGGVSVITPGTNTSNQVAVLYQDVNCTEVPVAIHADQLTPTWRVYSTGSNVFQTRAGCLIGAEHVNNSYECDIPIGAGICASYQTQTNSPRRARSVASQSIIAYTMSLGAENSVAYSNNSIAIPTNFTISVTTEILPVSMTKTSVDCTMYICGDSTECSNLLLQYGSFCTQLNRALTGIAVEQDKNTQEVFAQVKQIYKTPPIKDFGGFNFSQILPDPSKPSKRSFIEDLLFNKVTLADAGFIKQYGDCLGDIAARDLICAQKFNGLTVLPPLLTDEMIAQYCSALLAGTITSGWTFGAGAALQIPFAMQMAYRFNGIGVTQNVLYENQKLIANQFNSAIGKIQDSLSSTASALGKLQDVVNQNAQALNTLVKQLSSNFGAISSVLNDILSRLDKVEAEVQIDRLITGRLQSLQTYVTQQLIRAAEIRASANLAATKMSECVLGQSKRVDFCGKGYHLMSFPQCAPHGVVFLHVTYVPAQEKNFTTAPAICHDGKAHFPREGVFVSNGTHWFVTQRNFYEPQIITTDNTFVSGNCDVVIGIVNNTVYDPLQPELDSGGGSGGGQIYEGKLTAEGLRFGIVASRFNHALVDRLVEGAIDAIVRHGGREEDITLVRVPGSWEIPVAAGELARKEDIDAVIAIGVLIRGATPHFDYIASEVSKGLADLSLELRKPITFGVITADTLEQAIERAGTKHGNKGWEAALSAIEMANLFKSLR

SEQ ID NO: 8595 - protein, 1307 aa, Artificial Sequence
  SARS-CoV-2/Sweden/01/2020__EPI_ISL_411951 spike protein (1-1147)(T874C_S1055C) LumSynth construct
MFVFLVLLPLVSSQCVNLTTRTQLPPAYTNSFTRGVYYPDKVFRSSVLHSTQDLFLPFFSNVTWFHAIHVSGTNGTKRFDNPVLPFNDGVYFASTEKSNIIRGWIFGTTLDSKTQSLLIVNNATNVVIKVCEFQFCNDPFLGVYYHKNNKSWMESEFRVYSSANNCTFEYVSQPFLMDLEGKQGNFKNLREFVFKNIDGYFKIYSKHTPINLVRDLPQGFSALEPLVDLPIGINITRFQTLLALHRSYLTPGDSSSGWTAGAAAYYVGYLQPRTFLLKYNENGTITDAVDCALDPLSETKCTLKSFTVEKGIYQTSNFRVQPTESIVRFPNITNLCPFGEVFNATRFASVYAWNRKRISNCVADYSVLYNSASFSTFKCYGVSPTKLNDLCFTNVYADSFVIRGDEVRQIAPGQTGKIADYNYKLPDDFTGCVIAWNSNNLDSKVGGNYNYLYRLFRKSNLKPFERDISTEIYQAGSTPCNGVEGFNCYFPLQSYGFQPTNGVGYQPYRVVVLSFELLHAPATVCGPKKSTNLVKNKCVNFNFNGLTGTGVLTESNKKFLPFQQFGRDIADTTDAVRDPQTLEILDITPCSFGGVSVITPGTNTSNQVAVLYQDVNCTEVPVAIHADQLTPTWRVYSTGSNVFQTRAGCLIGAEHVNNSYECDIPIGAGICASYQTQTNSPRRARSVASQSIIAYTMSLGAENSVAYSNNSIAIPTNFTISVTTEILPVSMTKTSVDCTMYICGDSTECSNLLLQYGSFCTQLNRALTGIAVEQDKNTQEVFAQVKQIYKTPPIKDCGGFNFSQILPDPSKPSKRSFIEDLLFNKVTLADAGFIKQYGDCLGDIAARDLICAQKFNGLTVLPPLLTDEMIAQYCSALLAGTITSGWTFGAGAALQIPFAMQMAYRFNGIGVTQNVLYENQKLIANQFNSAIGKIQDSLSSTASALGKLQDVVNQNAQALNTLVKQLSSNFGAISSVLNDILSRLDKVEAEVQIDRLITGRLQSLQTYVTQQLIRAAEIRASANLAATKMSECVLGQSKRVDFCGKGYHLMSFPQCAPHGVVFLHVTYVPAQEKNFTTAPAICHDGKAHFPREGVFVSNGTHWFVTQRNFYEPQIITTDNTFVSGNCDVVIGIVNNTVYDPLQPELDSGGGSGGGQIYEGKLTAEGLRFGIVASRFNHALVDRLVEGAIDAIVRHGGREEDITLVRVPGSWEIPVAAGELARKEDIDAVIAIGVLIRGATPHFDYIASEVSKGLADLSLELRKPITFGVITADTLEQAIERAGTKHGNKGWEAALSAIEMANLFKSLR

SEQ ID NO: 8596 - protein, 1307 aa, Artificial Sequence
  SARS-CoV-2/Tianmen/HBCDC-HB-07/2020__EPI_ISL_412983 spike protein (1-1147)(T874C_S1055C) LumSynth construct
MFVFLVLLPLVSSQCVNLTTRTQLPPAYTNSFTRGVYYPDKVFRSSVLHSTQDLFLPFFSNVTWFHAIHVSGTNGTKRFDNPVLPFNDGVYFASTEKSNIIRGWIFGTTLDSKTQSLLIVNNATNVVIKVCEFQFCNDPFLGVYYHKNNKSWMESEFRVYSSANNCTFEYVSQPFLMDLEGKQGNFKNLREFVFKNIDGYFKIYSKHTPINLVRDLPQGFSALEPLVDLPIGINITRFQTLLALHRSYLTPGDSSSGWTAGAAAYYVGYLQPRTFLLKYNENGTITDAVDCALDPLSETKCTLKSFTVEKGIYQTSNFRVQPTESIVRFPNITNLCPFGEVFNATRFASVYAWNRKRISNCVADYSVLYNSASFSTFKCYGVSPTKLNDLCFTNVYADSFVIRGDEVRQIAPGQTGKIADYNYKLPDDFTGCVIAWNSNNLDSKVGGNYNYLYRLFRKSNLKPFERDISTEIYQAGSTPCNGVEGFNCYFPLQSYGFQPTNGVGYQPYRVVVLSFELLHAPATVCGPKKSTNLVKNKCVNFNFNGLTGTGVLTESNKKFLPFQQFGRDIADTTDAVRDPQTLEILDITPCSFGGVSVITPGTNTSNQVAVLYQDLNCTEVPVAIHADQLTPTWRVYSTGSNVFQTRAGCLIGAEHVNNSYECDIPIGAGICASYQTQTNSPRRARSVASQSIIAYTMSLGAENSVAYSNNSIAIPTNFTISVTTEILPVSMTKTSVDCTMYICGDSTECSNLLLQYGSFCTQLNRALTGIAVEQDKNTQEVFAQVKQIYKTPPIKDFGGFNFSQILPDPSKPSKRSFIEDLLFNKVTLADAGFIKQYGDCLGDIAARDLICAQKFNGLTVLPPLLTDEMIAQYCSALLAGTITSGWTFGAGAALQIPFAMQMAYRFNGIGVTQNVLYENQKLIANQFNSAIGKIQDSLSSTASALGKLQDVVNQNAQALNTLVKQLSSNFGAISSVLNDILSRLDKVEAEVQIDRLITGRLQSLQTYVTQQLIRAAEIRASANLAATKMSECVLGQSKRVDFCGKGYHLMSFPQCAPHGVVFLHVTYVPAQEKNFTTAPAICHDGKAHFPREGVFVSNGTHWFVTQRNFYEPQIITTDNTFVSGNCDVVIGIVNNTVYDPLQPELDSGGGSGGGQIYEGKLTAEGLRFGIVASRFNHALVDRLVEGAIDAIVRHGGREEDITLVRVPGSWEIPVAAGELARKEDIDAVIAIGVLIRGATPHFDYIASEVSKGLADLSLELRKPITFGVITADTLEQAIERAGTKHGNKGWEAALSAIEMANLFKSLR

SEQ ID NO: 8597 - protein, 1307 aa, Artificial Sequence
  SARS-CoV-2/Hong Kong/case42_VM20002493/2020__EPI_ISL_414527 spike protein (1-1147)(T874C_S1055C) LumSynth construct
MFVFLVLLPLVSSQCVNLTTRTQLPPAYTNSFTRGVYYPDKVFRSSVLHSTQDLFLPFFSNVTWFHAIHVSGTNGTKRFDNPVLPFNDGVYFASTEKSNIIRGWIFGTTLDSKTQSLLIVNNATNVVIKVCEFQFCNDPFLGVYYHKNNKSWMESEFRVYSSANNCTFEYVSQPFLMDLEGKQGNFKNLREFVFKNIDGYFKIYSKHTPINLVRDLPQGFSALEPLVDLPIGINITRFQTLLALHRSYLTPGDSSSGWTAGAAAYYVGYLQPRTFLLKYNENGTITDAVDCALDPLSETKCTLKSFTVEKGIYQTSNFRVQPTESIVRFPNITNLCPFGEVFNATRFASVYAWNRKRISNCVADYSVLYNSASFSTFKCYGVSPTKLNDLCFTNVYADSFVIRGDEVRQIAPGQTGKIADYNYKLPDDFTGCVIAWNSNNLDSKVGGNYNYLYRLFRKSNLKPFERDISTEIYQAGSTPCNGVEGFNCYFPLQSYGFQPTNGVGYQPYRVVVLSFELLHAPATVCGPKKSTNLVKNKCVNFNFNGLTGTGVLTESNKKFLPFQQFGRDIADTTDAVRDPQTLEILDITPCSFGGVSVITPGTNTSNQVAVLYQDVNCTEVPVAIHADQLTPTWRVYSTGSNVFQTRAGCLIGAEHVNNSYECDIPIGAGICASYQTQTNSPRRARSVASQSIIAYTMSLGAENSVAYSNNSIAIPTNFAISVTTEILPVSMTKTSVDCTMYICGDSTECSNLLLQYGSFCTQLNRALTGIAVEQDKNTQEVFAQVKQIYKTPPIKDFGGFNFSQILPDPSKPSKRSFIEDLLFNKVTLADAGFIKQYGDCLGDIAARDLICAQKFNGLTVLPPLLTDEMIAQYCSALLAGTITSGWTFGAGAALQIPFAMQMAYRFNGIGVTQNVLYENQKLIANQFNSAIGKIQDSLSSTASALGKLQDVVNQNAQALNTLVKQLSSNFGAISSVLNDILSRLDKVEAEVQIDRLITGRLQSLQTYVTQQLIRAAEIRASANLAATKMSECVLGQSKRVDFCGKGYHLMSFPQCAPHGVVFLHVTYVPAQEKNFTTAPAICHDGKAHFPREGVFVSNGTHWFVTQRNFYEPQIITTDNTFVSGNCDVVIGIVNNTVYDPLQPELDSGGGSGGGQIYEGKLTAEGLRFGIVASRFNHALVDRLVEGAIDAIVRHGGREEDITLVRVPGSWEIPVAAGELARKEDIDAVIAIGVLIRGATPHFDYIASEVSKGLADLSLELRKPITFGVITADTLEQAIERAGTKHGNKGWEAALSAIEMANLFKSLR

SEQ ID NO: 8598 - protein, 1307 aa, Artificial Sequence
  SARS-CoV-2/USA/CruiseA-23/2020__EPI_ISL_414482 spike protein (1-1147)(T874C_S1055C) LumSynth construct
MFVFLVLLPLVSSQCVNLTTRTQLPPAYTNSFTRGVYYPDKVFRSSVLHSTQDLFLPFFSNVTWFHAIHVSGTNGTKRFDNPVLPFNDGVYFASTEKSNIIRGWIFGTTLDSKTQSLLIVNNATNVVIKVCEFQFCNDPFLGVYYHKNNKSWMESEFRVYSSANNCTFEYVSQPFLMDLEVKQGNFKNLREFVFKNIDGYFKIYSKHTPINLVRDLPQGFSALEPLVDLPIGINITRFQTLLALHRSYLTPGDSSSGWTAGAAAYYVGYLQPRTFLLKYNENGTITDAVDCALDPLSETKCTLKSFTVEKGIYQTSNFRVQPTESIVRFPNITNLCPFGEVFNATRFASVYAWNRKRISNCVADYSVLYNSASFSTFKCYGVSPTKLNDLCFTNVYADSFVIRGDEVRQIAPGQTGKIADYNYKLPDDFTGCVIAWNSNNLDSKVGGNYNYLYRLFRKSNLKPFERDISTEIYQAGSTPCNGVEGFNCYFPLQSYGFQPTNGVGYQPYRVVVLSFELLHAPATVCGPKKSTNLVKNKCVNFNFNGLTGTGVLTESNKKFLPFQQFGRDIADTTDAVRDPQTLEILDITPCSFGGVSVITPGTNTSNQVAVLYQDVNCTEVPVAIHADQLTPTWRVYSTGSNVFQTRAGCLIGAEHVNNSYECDIPIGAGICASYQTQTNSPRRARSVASQSIIAYTMSLGAENSVAYSNNSIAIPTNFTISVTTEILPVSMTKTSVDCTMYICGDSTECSNLLLQYGSFCTQLNRALTGIAVEQDKNTQEVFAQVKQIYKTPPIKDFGGFNFSQILPDPSKPSKRSFIEDLLFNKVTLADAGFIKQYGDCLGDIAARDLICAQKFNGLTVLPPLLTDEMIAQYCSALLAGTITSGWTFGAGAALQIPFAMQMAYRFNGIGVTQNVLYENQKLIANQFNSAIGKIQDSLSSTASALGKLQDVVNQNAQALNTLVKQLSSNFGAISSVLNDILSRLDKVEAEVQIDRLITGRLQSLQTYVTQQLIRAAEIRASANLAATKMSECVLGQSKRVDFCGKGYHLMSFPQCAPHGVVFLHVTYVPAQEKNFTTAPAICHDGKAHFPREGVFVSNGTHWFVTQRNFYEPQIITTDNTFVSGNCDVVIGIVNNTVYDPLQPELDSGGGSGGGQIYEGKLTAEGLRFGIVASRFNHALVDRLVEGAIDAIVRHGGREEDITLVRVPGSWEIPVAAGELARKEDIDAVIAIGVLIRGATPHFDYIASEVSKGLADLSLELRKPITFGVITADTLEQAIERAGTKHGNKGWEAALSAIEMANLFKSLR

SEQ ID NO: 8599 - protein, 1307 aa, Artificial Sequence
  SARS-CoV-2/Hong Kong/case85_VM20002868/2020__EPI_ISL_414519 spike protein (1-1147)(T874C_S1055C) LumSynth construct
MFVFLVLVPLVSSQCVNLTTRTQLPPAYTNSFTRGVYYPDKVFRSSVLHSTQDLFLPFFSNVTWFHAIHVSGTNGTKRFDNPVLPFNDGVYFASTEKSNIIRGWIFGTTLDSKTQSLLIVNNATNVVIKVCEFQFCNDPFLGVYYHKNNKSWMESEFRVYSSANNCTFEYVSQPFLMDLEGKQGNFKNLREFVFKNIDGYFKIYSKHTPINLVRDLPQGFSALEPLVDLPIGINITRFQTLLALHRSYLTPGDSSSGWTAGAAAYYVGYLQPRTFLLKYNENGTITDAVDCALDPLSETKCTLKSFTVEKGIYQTSNFRVQPTESIVRFPNITNLCPFGEVFNATRFASVYAWNRKRISNCVADYSVLYNSASFSTFKCYGVSPTKLNDLCFTNVYADSFVIRGDEVRQIAPGQTGKIADYNYKLPDDFTGCVIAWNSNNLDSKVGGNYNYLYRLFRKSNLKPFERDISTEIYQAGSTPCNGVEGFNCYFPLQSYGFQPTNGVGYQPYRVVVLSFELLHAPATVCGPKKSTNLVKNKCVNFNFNGLTGTGVLTESNKKFLPFQQFGRDIADTTDAVRDPQTLEILDITPCSFGGVSVITPGTNTSNQVAVLYQDVNCTEVPVAIHADQLTPTWRVYSTGSNVFQTRAGCLIGAEHVNNSYECDIPIGAGICASYQTQTNSPRRARSVASQSIIAYTMSLGAENSVAYSNNSIAIPTNFTISVTTEILPVSMTKTSVDCTMYICGDSTECSNLLLQYGSFCTQLNRALTGIAVEQDKNTQEVFAQVKQIYKTPPIKDFGGFNFSQILPDPSKPSKRSFIEDLLFNKVTLADAGFIKQYGDCLGDIAARDLICAQKFNGLTVLPPLLTDEMIAQYCSALLAGTITSGWTFGAGAALQIPFAMQMAYRFNGIGVTQNVLYENQKLIANQFNSAIGKIQDSLSSTASALGKLQDVVNQNAQALNTLVKQLSSNFGAISSVLNDILSRLDKVEAEVQIDRLITGRLQSLQTYVTQQLIRAAEIRASANLAATKMSECVLGQSKRVDFCGKGYHLMSFPQCAPHGVVFLHVTYVPAQEKNFTTAPAICHDGKAHFPREGVFVSNGTHWFVTQRNFYEPQIITTDNTFVSGNCDVVIGIVNNTVYDPLQPELDSGGGSGGGQIYEGKLTAEGLRFGIVASRFNHALVDRLVEGAIDAIVRHGGREEDITLVRVPGSWEIPVAAGELARKEDIDAVIAIGVLIRGATPHFDYIASEVSKGLADLSLELRKPITFGVITADTLEQAIERAGTKHGNKGWEAALSAIEMANLFKSLR

SEQ ID NO: 8600 - protein, 1307 aa, Artificial Sequence; identical to SEQ ID NO: 8590
  SARS-CoV-2/England/200990660/2020__EPI_ISL_414523 spike protein (1-1147)(T874C_S1055C) LumSynth construct

SEQ ID NO: 8601 - protein, 1307 aa, Artificial Sequence
  SARS-CoV-2/Australia/NSW09/2020__EPI_ISL_413595 spike protein (1-1147)(T874C_S1055C) LumSynth construct
MFVFLVLLPLVSSQCVNLTTRTQLPPAYTNSFTRGVYYPDKVFRSSVLHSTQDLFLPFFSNVTWFHAIHVSGTNGTKRFDNPVLPFNDGVYFASTEKSNIIRGWIFGTTLDSKTQSLLIVNNATNVVIKVCEFQFCNDPFLGVYYHKNNKSWMESEFRVYSSANNCTFEYVSQPFLMDLEGKQGNFKNLREFVFKNIDGYFKIYSKHTPINLVRDLPQGFSALEPLVDLPIGINITRFQTLLALHRSYLTPGDSSSGWTAGAAAYYVGYLQPRTFLLKYNENGTITDAVDCALDPLSETKCTLKSFTVEKGIYQTSNFRVQPTESIVRFPNITNLCPFGEVFNATRFASVYAWNRKRISNCVADYSVLYNSASFSTFKCYGVSPTKLNDLCFTNVYADSFVIRGDEVRQIAPGQTGKIADYNYKLPDDFTGCVIAWNSNNLDSKVGGNYNYLYRLFRKSNLKPFERDISTEIYQAGSTPCNGVEGFNCYFPLQSYGFQPTNGVGYQPYRVVVLSFELLHAPATVCGPKKSTNLVKNKCVNFNFNGLTGTGVLTESNKKFLPFQQFGRDIADTTDAVRDPQTLEILDITPCSFGGVSVITPGTNTSNQVAVLYQDVNCTEVPVAIHADQLTPTWRVYSTGSNVFQTRAGCLIGAEHVNNSYECDIPIGAGICASYQTQTNSPRRARSVASQSIIAYTMSLGAENSVAYSNNSIAIPTNFTISVTTEILPVSMTKTSVDCTMYICGDSTECSNLLLQYGSFCTQLNRALTGIAVEQDKNTQEVFAQVKQIYKTPPIKDFGGFNFSQILPDPSKPSKRSFIEDLLFNKVTLADAGFIKQYGDCLGDIAARDLICAQKFNGLTVLPPLLTDEMIAQYCSALLAGTITSGWTFGAGAALQIPFAMQMAYRFNGIGVTQNVLYENQKLIANQFNSAIGKIQDSLSFTASALGKLQDVVNQNAQALNTLVKQLSSNFGAISSVLNDILSRLDKVEAEVQIDRLITGRLQSLQTYVTQQLIRAAEIRASANLAATKMSECVLGQSKRVDFCGKGYHLMSFPQCAPHGVVFLHVTYVPAQEKNFTTAPAICHDGKAHFPREGVFVSNGTHWFVTQRNFYEPQIITTDNTFVSGNCDVVIGIVNNTVYDPLQPELDSGGGSGGGQIYEGKLTAEGLRFGIVASRFNHALVDRLVEGAIDAIVRHGGREEDITLVRVPGSWEIPVAAGELARKEDIDAVIAIGVLIRGATPHFDYIASEVSKGLADLSLELRKPITFGVITADTLEQAIERAGTKHGNKGWEAALSAIEMANLFKSLR

SEQ ID NO: 8602 - protein, 1307 aa, Artificial Sequence; identical to SEQ ID NO: 8582
  SARS-CoV-2/Australia/NSW10/2020__EPI_ISL_413596 spike protein (1-1147)(T874C_S1055C) LumSynth construct

SEQ ID NO: 8603 - protein, 1307 aa, Artificial Sequence
  SARS-CoV-2/Switzerland/1000477797/2020__EPI_ISL_413023 spike protein (1-1147)(T874C_S1055C) LumSynth construct
MFVFLVLLPLVSSQCVNLTTRTQLPPAYTNSFTRGVYYPDKVFRSSVLHSTQDLFLPFFSNVTWFHAIHVSGTNGTKRFDNPVLPFNDGVYFASTEKSNIIRGWIFGTTLDSKTQSLLIVNNATNVVIKVCEFQFCNDPFLGVYYHKNNKSWMESEFRVYSSANNCTFEYVSQPFLMDLEGKQGNFKNLREFVFKNIDGYFNIYSKHTPINLVRDLPQGFSALEPLVDLPIGINITRFQTLLALHRSYLTPGDSSSGWTAGAAAYYVGYLQPRTFLLKYNENGTITDAVDCALDPLSETKCTLKSFTVEKGIYQTSNFRVQPTESIVRFPNITNLCPFGEVFNATRFASVYAWNRKRISNCVADYSVLYNSASFSTFKCYGVSPTKLNDLCFTNVYADSFVIRGDEVRQIAPGQTGKIADYNYKLPDDFTGCVIAWNSNNLDSKVGGNYNYLYRLFRKSNLKPFERDISTEIYQAGSTPCNGVEGFNCYFPLQSYGFQPTNGVGYQPYRVVVLSFELLHAPATVCGPKKSTNLVKNKCVNFNFNGLTGTGVLTESNKKFLPFQQFGRDIADTTDAVRDPQTLEILDITPCSFGGVSVITPGTNTSNQVAVLYQGVNCTEVPVAIHADQLTPTWRVYSTGSNVFQTRAGCLIGAEHVNNSYECDIPIGAGICASYQTQTNSPRRARSVASQSIIAYTMSLGAENSVAYSNNSIAIPTNFTISVTTEILPVSMTKTSVDCTMYICGDSTECSNLLLQYGSFCTQLNRALTGIAVEQDKNTQEVFAQVKQIYKTPPIKDFGGFNFSQILPDPSKPSKRSFIEDLLFNKVTLADAGFIKQYGDCLGDIAARDLICAQKFNGLTVLPPLLTDEMIAQYCSALLAGTITSGWTFGAGAALQIPFAMQMAYRFNGIGVTQNVLYENQKLIANQFNSAIGKIQDSLSSTASALGKLQDVVNQNAQALNTLVKQLSSNFGAISSVLNDILSRLDKVEAEVQIDRLITGRLQSLQTYVTQQLIRAAEIRASANLAATKMSECVLGQSKRVDFCGKGYHLMSFPQCAPHGVVFLHVTYVPAQEKNFTTAPAICHDGKAHFPREGVFVSNGTHWFVTQRNFYEPQIITTDNTFVSGNCDVVIGIVNNTVYDPLQPELDSGGGSGGGQIYEGKLTAEGLRFGIVASRFNHALVDRLVEGAIDAIVRHGGREEDITLVRVPGSWEIPVAAGELARKEDIDAVIAIGVLIRGATPHFDYIASEVSKGLADLSLELRKPITFGVITADTLEQAIERAGTKHGNKGWEAALSAIEMANLFKSLR

SEQ ID NO: 8604 - protein, 1307 aa, Artificial Sequence
  SARS-CoV-2/Belgium/BA-02291/2020__EPI_ISL_415159 spike protein (1-1147)(T874C_S1055C) LumSynth construct
MFVFLVLLPLVSSQCVNLTTRTQLPPAYTNSFTRGVYYPDKVFRSSVLHSTQDLFLPFFSNVTWFHAIHVSGTNGTKRFDNPVLPFNDGVYFASTEKSNIIRGWIFGTTLDSKTQSLLIVNNATNVVIKVCEFQFCNDPFLGVYYHKNNKSWMESEFRVYSSANNCTFEYVSQPFLMDLEGKQGNFKNLREFVFKNIDGYFKIYSKHTPINLVRDLPQGFSALEPLVDLPIGINITRFQTLLALHRSYLTPGDSSSGWTAGAAAYYVGYLQPRTFLLKYNENGTITDAVDCALDPLSETKCTLKSFTVEKGIYQTSNFRVQPTESIVRFPNITNLCPFGEVFNATRFASVYAWNRKRISNCVADYSVLYNSASFSTFKCYGVSPTKLNDLCFTNVYADSFVIRGDEVRQIAPGQTGKIADYNYKLPDDFTGCVIAWNSNNLDSKVGGNYNYLYRLFRRSNLKPFERDISTEIYQAGSTPCNGVEGFNCYFPLQSYGFQPTNGVGYQPYRVVVLSFELLPAPATVCGPKKSTNLVKNKCVNFNFNGLTGTGVLTESNKKFLPFQQFGRDIADTTDAVRDPQTLEILDITPCSFGGVSVITPGTNTSNQVAVLYQGVNCTEVPVAIHADQLTPTWRVYSTGSNVFQTRAGCLIGAEHVNNSYECDIPIGAGICASYQTQTNSPRRARSVASQSIIAYTMSLGAENSVAYSNNSIAIPTNFTISVTTEILPVSMTKTSVDCTMYICGDSTECSNLLLQYGSFCTQLNRALTGIAVEQDKNTQEVFAQVKQIYKTPPIKDFGGFNFSQILPDPSKPSKRSFIEDLLFNKVTLADAGFIKQYGDCLGDIAARDLICAQKFNGLTVLPPLLTDEMIAQYCSALLAGTITSGWTFGAGAALQIPFAMQMAYRFNGIGVTQNVLYENQKLIANQFNSAIGKIQDSLSSAAPALGKLQDVVNQNAQALNTLVKQLSSNFGAISSVLNDILSRLDKVEAEVQIDRLITGRLQSLQTYVTQQLIRAAEIRASANLAATKMSECVLGQSKRVDFCGKGYHLMSFPQCAPHGVVFLHVTYVPAQEKNFTTAPAICHDGKAHFPREGVFVSNGTHWFVTQRNFYEPQIITTDNTFVSGNCDVVIGIVNNTVYDPLQPELDSGGGSGGGQIYEGKLTAEGLRFGIVASRFNHALVDRLVEGAIDAIVRHGGREEDITLVRVPGSWEIPVAAGELARKEDIDAVIAIGVLIRGATPHFDYIASEVSKGLADLSLELRKPITFGVITADTLEQAIERAGTKHGNKGWEAALSAIEMANLFKSLR

SEQ ID NO: 8605 - protein, 1307 aa, Artificial Sequence
  SARS-CoV-2/USA/WA8-UW5/2020__EPI_ISL_413486 spike protein (1-1147)(T874C_S1055C) LumSynth construct
MFVFLVLLPLVSSQCVNLTTRTQLPPAYTNSFTRGVYYPDKVFRSSVLHSTQDLFLPFFSNVTWFHAIHVSGTNGTKRFDNPVLPFNDGVYFASTEKSNIIRGWIFGTTLDSKTQSLLIVNNATNVVIKVCEFQFCNDPFLGVYYHKNNKSWMESEFRVYSSANNCTFEYVSQPFLMDLEGKQGNFKNLREFVFKNIDGYFKIYSKHTPINLVRDLPQGFSALEPLVDLPIGINITRFQTLLALHRSYLTPGDSSSGWTAGAAAYYVGYLQPRTFLLKYNENGTITDAVDCALDPLSETKCTLKSFTVEKGIYQTSNFRVQPTESIVRFPNITNLCPFGEVFNATRFASVYAWNRKRISNCVADYSVLYNSASFSTFKCYGVSPTKLNDLCFTNVYADSFVIRGDEVRQIAPGQTGKIADYNYKLPDDFTGCVIAWNSNNLDSKVGGNYNYLYRLFRKSNLKPFERDISTEIYQAGSTPCNGVEGFNCYFPLQSYGFQPTNGVGYQPYRVVVLSFELLHAPATVCGPKKSTNLVKNKCVNFNFNGLTGTGVLTESNKKFLPFQQFGRDIADTTDAVRDPQTLEILDITPCSFGGVSVITPGTNTSNQVAVLYQDVNCTEVPVAIHADQLTPTWRVYSTGSNVFQTRAGCLIGAEYVNNSYECDIPIGAGICASYQTQTNSPRRARSVASQSIIAYTMSLGAENSVAYSNNSIAIPTNFTISVTTEILPVSMTKTSVDCTMYICGDSTECSNLLLQYGSFCTQLNRALTGIAVEQDKNTQEVFAQVKQIYKTPPIKDFGGFNFSQILPDPSKPSKRSFIEDLLFNKVTLADAGFIKQYGDCLGDIAARDLICAQKFNGLTVLPPLLTDEMIAQYCSALLAGTITSGWTFGAGAALQIPFAMQMAYRFNGIGVTQNVLYENQKLIANQFNSAIGKIQDSLSSTASALGKLQDVVNQNAQALNTLVKQLSSNFGAISSVLNDILSRLDKVEAEVQIDRLITGRLQSLQTYVTQQLIRAAEIRASANLAATKMSECVLGQSKRVDFCGKGYHLMSFPQCAPHGVVFLHVTYVPAQEKNFTTAPAICHDGKAHFPREGVFVSNGTHWFVTQRNFYEPQIITTDNTFVSGNCDVVIGIVNNTVYDPLQPELDSGGGSGGGQIYEGKLTAEGLRFGIVASRFNHALVDRLVEGAIDAIVRHGGREEDITLVRVPGSWEIPVAAGELARKEDIDAVIAIGVLIRGATPHFDYIASEVSKGLADLSLELRKPITFGVITADTLEQAIERAGTKHGNKGWEAALSAIEMANLFKSLR

SEQ ID NO: 8606 - protein, 1307 aa, Artificial Sequence
  SARS-CoV-2/England/20102000506/2020__EPI_ISL_415147 spike protein (1-1147)(T874C_S1055C) LumSynth construct
MFVFLVLLPLVSSQCVNLTTRTQLPPAYTNSFTRGVYYPDKVFRSSVLHSTQDLFLPFFSNVTWFHAIHVSGTNGTKRFDNPVLPFNDGVYFASTEKSNIIRGWIFGTTLDSKTQSLLIVNNATNVVIKVCEFQFCNDPFLGVYYHKNNKSWMESEFRVYSSANNCTFEYVSQPFLMDLEGKQGNFKNLREFVFKNIDGYFKIYSKHTPINLVRDLPQGFSALEPLVDLPIGINITRFQTLLALHRSYLTPGDSSSGWTAGAAAYYVGYLQPRTFLLKYNENGTITDAVDCALDPLSETKCTLKSFTVEKGIYQTSNFRVQPTESIVRFPNITNLCPFGEVFNATRFASVYAWNRKRISNCVADYSVLYNSASFSTFKCYGVSPTKLNDLCFTNVYADSFVIRGDEVRQIAPGQTGKIADYNYKLPDDFTGCVIAWNSNNLDSKVGGNYNYLYRLFRKSNLKPFERDISTEIYQAGSTPCNGVEGFNCYFPLQSYGFQPTNGVGYQPYRVVVLSFELLHAPATVCGPKKSTNLVKNKCVNFNFNGLTGTGVLTESNKKFLPFQQFGRDIADTTDAVRDPQTLEILDITPCSFGGVSVITPGTNTSNQVAVLYQGVNCTEVPVAIHADQLTPTWRVYSTGSNVFQTRAGCLIGAEHVNNSYECDIPIGAGICASYQTQTNSPRRARSVASQSIIAYTMSLGAENSVAYSNNSIAIPTNFTISVTTEILPVSMTKTSVDCTMYICGDSTECSNLLLQYGSFCTQLNRALTGIAVEQDKNTQEVFAQVKQIYKTPPIKDFGGFNFSQILPDPSKPSKRSFIEDLLFNKVTLADAGFIKQYGYCLGDIAARDLICAQKFNGLTVLPPLLTDEMIAQYCSALLAGTITSGWTFGAGAALQIPFAMQMAYRFNGIGVTQNVLYENQKLIANQFNSAIGKIQDSLSSTASALGKLQDVVNQNAQALNTLVKQLSSNFGAISSVLNDILSRLDKVEAEVQIDRLITGRLQSLQTYVTQQLIRAAEIRASANLAATKMSECVLGQSKRVDFCGKGYHLMSFPQCAPHGVVFLHVTYVPAQEKNFTTAPAICHDGKAHFPREGVFVSNGTHWFVTQRNFYEPQIITTDNTFVSGNCDVVIGIVNNTVYDPLQPELDSGGGSGGGQIYEGKLTAEGLRFGIVASRFNHALVDRLVEGAIDAIVRHGGREEDITLVRVPGSWEIPVAAGELARKEDIDAVIAIGVLIRGATPHFDYIASEVSKGLADLSLELRKPITFGVITADTLEQAIERAGTKHGNKGWEAALSAIEMANLFKSLR

SEQ ID NO: 8607 - protein, 1307 aa, Artificial Sequence
  SARS-CoV-2/Belgium/VAG-03013/2020__EPI_ISL_415155 spike protein (1-1147)(T874C_S1055C) LumSynth construct
MFVFLVLLPLVSSQCVNLTTRTQLPPAYTNSFTRGVYYPDKVFRSSVLHSTQDLFLPFFSNVTWFHAIHVSGTNGTKRFDNPVLPFNDGVYFASTEKSNIIRGWIFGTTLDSKTQSLLIVNNATNVVIKVCEFQFCNDPFLGVYYHKNNKSWMESEFRVYSSANNCTFEYVSQPFLMDLEGKQGNFKNLREFVFKNIDGYFKIYSKHTPINLVRDLPQGFSALEPLVDLPIGINITRFQTLLALHRSYLTPGDSSSGWTAGAAAYYVGYLQPRTFLLKYNENGTITDAVDCALDPLSETKCTLKSFTVEKGIYQTSNFRVQPTESIVRFPNITNLCPFGEVFNATRFASVYAWNRKRISNCVADYSVLYNSASFSTFKCYGVSPTKLNDLCFTNVYADSFVIRGDEVRQIAPGQTGKIADYNYKLPDDFTGCVIAWNSNNLDSKVGGNYNYLYRLFRKSNLKPFERDISTEIYQAGSTPCNGVEGFNCYFPLQSYGFQPTNGVGYQPYRVVVLSFELLHAPATVCGPKKSTNLVKNKCVNFNFNGLTGTGVLTESNKKFLPFQQFGRDIADTTDAVRDPQTLEILDITPCSFGGVSVITPGTNTSNQVAVLYQGVNCTEVPVAIHADQLTPTWRVYSTGSNVFQTRAGCLIGAEHVNNSYECDIPIGAGICASYQTQTNSPRRARSVASQSIIAYTMSLGAENSVAYSNNSIAIPTNFTISVTTEILPVSMTKTSVDCTMYICGDSTECSNLLLQYGSFCTQLNRALTGIAVEQDKNTQEVFAQVKQIYKTPPIKDFGGFNFSQILPDPSKPSKRSFIEDLLFNKVTLADAGFIKQYGDCLGDIAARDLICAQKFNGLTVLPPLLTDEMIAQYCSALLAGTITSGWTFGAGAALQIPFAMQMAYRFNGIGVTQNVLYENQKLIANQFNSAIGKIQDSLSSTATALGKLQDVVNQNAQALNTLVKQLSSNFGAISSVLNDILSRLDKVEAEVQIDRLITGRLQSLQTYVTQQLIRAAEIRASANLAATKMSECVLGQSKRVDFCGKGYHLMSFPQCAPHGVVFLHVTYVPAQEKNFTTAPAICHDGKAHFPREGVFVSNGTHWFVTQRNFYEPQIITTDNTFVSGNCDVVIGIVNNTVYDPLQPELDSGGGSGGGQIYEGKLTAEGLRFGIVASRFNHALVDRLVEGAIDAIVRHGGREEDITLVRVPGSWEIPVAAGELARKEDIDAVIAIGVLIRGATPHFDYIASEVSKGLADLSLELRKPITFGVITADTLEQAIERAGTKHGNKGWEAALSAIEMANLFKSLR

SEQ ID NO: 8608 - protein, 1307 aa, Artificial Sequence
  SARS-CoV-2/Belgium/BC-03016/2020__EPI_ISL_415157 spike protein (1-1147)(T874C_S1055C) LumSynth construct
MFVFLVLLPLVSSQCVNLTTRTQLPPAYTNSFTRGVYYPDKVFRSSVLHSTQDLFLPFFSNVTWFHAIHVSGTNGTKRFDNPVLPFNDGVYFASTEKSNIIRGWIFGTTLDSKTQSLLIVNNATNVVIKVCEFQFCNDPFLGVYYHKNNKSWMESEFRVYSSANNCTFEYVSQPFLMDLEGKQGNFKNLREFVFKNIDGYFKIYSKHTPINLVRDLPQGFSALEPLVDLPIGINITRFQTLLALHRSYLTPGDSSSGWTAGAAAYYVGYLQPRTFLLKYNENGTITDAVDCALDPLSETKCTLKSFTVEKGIYQTSNFRVQPTESIVRFPNITNLCPFGEVFNATRFASVYAWNRKRISNCVADYSVLYNSASFSTFKCYGVSPTKLNDLCFTNVYADSFVIRGDEVRQIAPGQTGKIADYNYKLPDDFTGCVIAWNSNNLDSKVGGNYNYLYRLFRKSNLKPFERDISTEIYQAGSTPCNGVEGFNCYFPLQSYGFQPTNGVGYQPYRVVVLSFELLHAPATVCGPKKSTNLVKNKCVNFNFNGLTGTGVLTESNKKFLPFQQFGRDIADTTDAVRDPQTLEILDITPCSFGGVSVITPGTNTSNQVAVLYQGVNCTEVPVAIHADQLTPTWRVYSTGSNVFQTRAGCLIGAEHVNNSYECDIPIGAGICASYQTQTNSPRRARSVASQSIIAYTMSLGAENSVAYSNNSIAIPTNFTISVTTEILPVSMTKTSVDCTMYICGDSTECSNLLLQYGSFCTQLNRALTGIAVEQDKNTQEVFAQVKQIYKTPPIKDFGGFNFSQILPDPSKPSKRSFIEDLLFNKVTLADAGFIKQYGDCLGDIAARDLICAQKFNGLTVLPPLLTDEMIAQYCSALLAGTITSGWTFGAGAALQIPFAMQMAYRFNGIGVTQNVLYENQKLIANQFNSAIGKIQDSLSSTAPALGKLQDVVNQNAQALNTLVKQLSSNFGAISSVLNDILSRLDKVEAEVQIDRLITGRLQSLQTYVTQQLIRAAEIRASANLAATKMSECVLGQSKRVDFCGKGYHLMSFPQCAPHGVVFLHVTYVPAQEKNFTTAPAICHDGKAHFPREGVFVSNGTHWFVTQRNFYEPQIITTDNTFVSGNCDVVIGIVNNTVYDPLQPELDSGGGSGGGQIYEGKLTAEGLRFGIVASRFNHALVDRLVEGAIDAIVRHGGREEDITLVRVPGSWEIPVAAGELARKEDIDAVIAIGVLIRGATPHFDYIASEVSKGLADLSLELRKPITFGVITADTLEQAIERAGTKHGNKGWEAALSAIEMANLFKSLR

SEQ ID NO: 8609 - protein, 1307 aa, Artificial Sequence
  SARS-CoV-2/Germany/BavPat3/2020__EPI_ISL_414521 spike protein (1-1147)(T874C_S1055C) LumSynth construct
MFVFLVLLPLVSSQCVNLTTRTQLPPAYTNSFTRGVYYPDKVFRSSVLHSTQDLFLPFFSNVTWFHAIHVSGTNGTKRFDNPVLPFNDGVYFASTEKSNIIRGWIFGTTLDSKTQSLLIVNNATNVVIKVCEFQFCNDPFLGVYYHKNNKSWMESEFRVYSSANNCTFEYVSQPFLMDLEGKQGNFKNLREFVFKNIDGYFKIYSKHTPINLVRDLPQGFSALEPLVDLPIGINITRFQTLLALHRSYLTPGDSSSGWTAGAAAYYVGYLQPRTFLLKYNENGTITDAVDCALDPLSETKCTLKSFTVEKGIYQTSNFRVQPTESIVRFPNITNLCPFGEVFNATRFASVYAWNRKRISNCVADYSVLYNSASFSTFKCYGVSPTKLNDLCFTNVYADSFVIRGDEVRQIAPGQTGKIADYNYKLPDDFTGCVIAWNSNNLDSKVGGNYNYLYRLFRKSNLKPFERDISTEIYQAGSTPCNGVEGFNCYFPLQSYGFQPTNGVGYQPYRVVVLSFELLHAPATVCGPKKSTNLVKNKCVNFNFNGLTGTGVLTESNKKFLPFQQFGRDIADTTDAVRDPQTLEILDITPCSFGGVSVITPGTNTSNQVAVLYQDVNCTEVPVAIHADQLTPTWRVYSTGSNVFQTRAGCLIGAEHVNNSYECDIPIGAGICASYQTQTNSPRRARSVASQSIIAYTMSLGAENSVAYSNNSIAIPTNFTISVTTEILPVSMTKTSVDCTMYICGDSTECSNLLLQYGSFCTQLNRALTGIAVEQDKNTQQVFAQVKQIYKTPPIKDFGGFNFSQILPDPSKPSKRSFIEDLLFNKVTLADAGFIKQYGDCLGDIAARDLICAQKFNGLTVLPPLLTDEMIAQYCSALLAGTITSGWTFGAGAALQIPFAMQMAYRFNGIGVTQNVLYENQKLIANQFNSAIGKIQDSLSSTASALGKLQDVVNQNAQALNTLVKQLSSNFGAISSVLNDILSRLDKVEAEVQIDRLITGRLQSLQTYVTQQLIRAAEIRASANLAATKMSECVLGQSKRVDFCGKGYHLMSFPQCAPHGVVFLHVTYVPAQEKNFTTAPAICHDGKAHFPREGVFVSNGTHWFVTQRNFYEPQIITTDNTFVSGNCDVVIGIVNNTVYDPLQPELDSGGGSGGGQIYEGKLTAEGLRFGIVASRFNHALVDRLVEGAIDAIVRHGGREEDITLVRVPGSWEIPVAAGELARKEDIDAVIAIGVLIRGATPHFDYIASEVSKGLADLSLELRKPITFGVITADTLEQAIERAGTKHGNKGWEAALSAIEMANLFKSLR

SEQ ID NO: 8610 - protein, 1307 aa, Artificial Sequence
  SARS-CoV-2/France/HF1805/2020__EPI_ISL_414628 spike protein (1-1147)(T874C_S1055C) LumSynth construct
MFVFLVLLPLVSSQCVNLTTRTQLPPAYTNSFTRGVYYPDKVFRSSVLHSTQDLFLPFFSNVTWFHAIHVSGTNGTKRFDNPVLPFNDGVYFASTEKSNIIRGWIFGTTLDSKTQSLLIVNNATNVVIKVCEFQFCNDPFLGVYYHKNNKSWMESEFRVYSSANNCTFEYVSQPFLMDLEGKQGNFKNLREFVFKNIDGYFKIYSKHTPINLVRDLPQGFSALEPLVDLPIGINITRFQTLLALHRSYLTPGDSSSGWTAGAAAYYVGYLQPRTFLLKYNENGTITDAVDCALDPLSETKCTLKSFTVEKGIYQTSNFRVQPTESIVRFPNITNLCPFGEVFNATRFASVYAWNRKRISNCVADYSVLYNSASFSTFKCYGVSPTKLNDLCFTNVYADSFVIRGDEVRQIAPGQTGKIADYNYKLPDDFTGCVIAWNSNNLDSKVGGNYNYLYRLFRKSNLKPFERDISTEIYQAGSTPCNGVEGFNCYFPLQSYGFQPTNGVGYQPYRVVVLSFELLHAPATVCGPKKSTNLVKNKCVNFNFNGLTGTGVLTESNKKFLPFQQFGRDIADTTDAVRDPQTLEILDITPCSFGGVSVITPGTNTSNQVAVLYQGVNCTEVPVAIHADQLTPTWRVYSTGSNVFQTRAGCLIGAEHVNNSYECDIPIGAGICASYQTQTNSPRRARSVASQSIIAYTMSLGAENSVAYSNNSIAIPTNFTISVTTEILPVSMTKTSVDCTMYICGDSTECSNLLLQYGSFCTQLNRALTGIAVEQDKNTQEVFAQVKQIYKTPPIKDFGGFNFSQILPDPSKPSKRSFIEDLLFNKVTLADAGFIKQYGDCLGDIAARDLICAQKFNGLTVLPPLLTDEMIAQYCSALLAGTITSGWTFGAGAALQIPFAMQMAYRFNGIGVTQNVLYENQKLIANQFNSAIGKIQDSLSSTASALGKLQDVVNQNAQALNTLVKQLSSNFGAISSVLNDILSRLDKVEAEVQIDRLITGRLQSLQTYVTQQLIRAAEIRASANLAATKMSECVLGQSKRVDFCGKGYHLMSFPQCAPHGVVFLHVTYVPAQEKNFTTAPAICHDGKAHFPREGVFVSNGTHWFVTQRNFYEPQIITTDNTFVSGNCDVVIGVVNNTVYDPLQPELDSGGGSGGGQIYEGKLTAEGLRFGIVASRFNHALVDRLVEGAIDAIVRHGGREEDITLVRVPGSWEIPVAAGELARKEDIDAVIAIGVLIRGATPHFDYIASEVSKGLADLSLELRKPITFGVITADTLEQAIERAGTKHGNKGWEAALSAIEMANLFKSLR

SEQ ID NO: 8611 - protein, 1307 aa, Artificial Sequence
  SARS-CoV-2/Netherlands/ZuidHolland_9/2020__EPI_ISL_414445 spike protein (1-1147)(T874C_S1055C) LumSynth construct
MFVFLVLLPLVSSQCVNLTTRTQLPPAYTNSFTRGVYYPDKVFRSSVLHSTQDLFLPFFSNVTWFHAIHVSGTNGTKRFDNPVLPFNDGVYFASTEKSNIIRGWIFGTTLDSKTQSLLIVNNATNVVIKVCEFQFCNDPFLGVYYHKNNKSWMESEFRVYSSANNCTFEYVSQPFLMDLEGKQGNFKNLREFVFKNIDGYFKIYSKHTPINLVRDLPQGFSALEPLVDLPIGINITRFQTLLALHRSYLTPGDSSSGWTAGAAAYYVGYLQPRTFLLKYNENGTITDAVDCALDPLSETKCTLKSFTVEKGIYQTSNFRVQPTESIVRFPNITNLCPFGEVFNATRFASVYAWNRKRISNCVADYSVLYNSASFSTFKCYGVSPTKLNDLCFTNVYADSFVIRGDEVRQIAPGQTGKIADYNYKLPDDFTGCVIAWNSNNLDSKVGGNYNYLYRLFRKSNLKPFERDISTEIYQAGSTPCNGVEGFNCYFPLQSYGFQPTNGVGYQPYRVVVLSFELLHAPATVCGPKKSTNLVKNKCVNFNFNGLTGTGVLTESNKKFLPFQQFGRDIADTTDAVRDPQTLEILDITPCSFGGVSVITPGTNTSNQVAVLYQGVNCTEVPVAIHADQLTPTWRVYSTGSNVFQTRAGCLIGAEHVNNSYECDIPIGAGICASYQTQTNSPRRARSVASQSIIAYTMSLGAENSVAYSNNSIAIPTNFTISVTTEILPVSMTKTSVDCTMYICGDSTECSNLLLQYGSFCTQLNRALTGIAVEQDKNTQEVFAQVKQIYKTPPIKDFGGFNFSQILPDPSKPSKRSFIEDLLFNKVTLADAGFIKQYGDCLGDIAARDLICVQKFNGLTVLPPLLTDEMIAQYCSALLAGTITSGWTFGAGAALQIPFAMQMAYRFNGIGVTQNVLYENQKLIANQFNSAIGKIQDSLSSTASALGKLQDVVNQNAQALNTLVKQLSSNFGAISSVLNDILSRLDKVEAEVQIDRLITGRLQSLQTYVTQQLIRAAEIRASANLAATKMSECVLGQSKRVDFCGKGYHLMSFPQCAPHGVVFLHVTYVPAQEKNFTTAPAICHDGKAHFPREGVFVSNGTHWFVTQRNFYEPQIITTDNTFVSGNCDVVIGIVNNTVYDPLQPELDSGGGSGGGQIYEGKLTAEGLRFGIVASRFNHALVDRLVEGAIDAIVRHGGREEDITLVRVPGSWEIPVAAGELARKEDIDAVIAIGVLIRGATPHFDYIASEVSKGLADLSLELRKPITFGVITADTLEQAIERAGTKHGNKGWEAALSAIEMANLFKSLR

SEQ ID NO: 8612 - protein, 1307 aa, Artificial Sequence
  SARS-CoV-2/Finland/FIN03032020A/2020__EPI_ISL_413602 spike protein (1-1147)(T874C_S1055C) LumSynth construct
MFVFLVLLPLVSSQCVNLTTRTQLPPAYTNSFTRGVYYPDKVFRSSVLHSTQDLFLPFFSNVTWFHAIHVSGTNGTKRFDNPVLPFNDGVYFASTEKSNIIRGWIFGTTLDSKTQSLLIVNNATNVVIKVCEFQFCNDPFLGVYYHKNNKSWMESEFRVYSSANNCTFEYVSQPFLMDLEGKQGNFKNLREFVFKNIDGYFKIYSKHTPINLVRDLPQGFSALEPLVDLPIGINITRFQTLLALHRSYLTPGDSSSGWTAGAAAYYVGYLQPRTFLLKYNENGTITDAVDCALDPLSETKCTLKSFTVEKGIYQTSNFRVQPTESIVRFPNITNLCPFGEVFNATRFASVYAWNRKRISNCVADYSVLYNSASFSTFKCYGVSPTKLNDLCFTNVYADSFVIRGDEVRQIAPGQTGKIADYNYKLPDDFTGCVISWNSNNLDSKVGGNYNYLYRLFRKSNLKPFERDISTEIYQAGSTPCNGVEGFNCYFPLQSYGFQPTNGVGYQPYRVVVLSFELLHAPATVCGPKKSTNLVKNKCVNFNFNGLTGTGVLTESNKKFLPFQQFGRDIADTTDAVRDPQTLEILDITPCSFGGVSVITPGTNTSNQVAVLYQGVNCTEVPVAIHADQLTPTWRVYSTGSNVFQTRAGCLIGAEHVNNSYECDIPIGAGICASYQTQTNSPRRARSVASQSIIAYTMSLGAENSVAYSNNSIAIPTNFTISVTTEILPVSMTKTSVDCTMYICGDSTECSNLLLQYGSFCTQLNRALTGIAVEQDKNTQEVFAQVKQIYKTPPIKDFGGFNFSQILPDPSKPSKRSFIEDLLFNKVTLADAGFIKQYGDCLGDIAARDLICAQKFNGLTVLPPLLTDEMIAQYCSALLAGTITSGWTFGAGAALQIPFAMQMAYRFNGIGVTQNVLYENQKLIANQFNSAIGKIQDSLSSTASALGKLQDVVNQNAQALNTLVKQLSSNFGAISSVLNDILSRLDKVEAEVQIDRLITGRLQSLQTYVTQQLIRAAEIRASANLAATKMSECVLGQSKRVDFCGKGYHLMSFPQCAPHGVVFLHVTYVPAQEKNFTTAPAICHDGKAHFPREGVFVSNGTHWFVTQRNFYEPQIITTDNTFVSGNCDVVIGIVNNTVYDPLQPELDSGGGSGGGQIYEGKLTAEGLRFGIVASRFNHALVDRLVEGAIDAIVRHGGREEDITLVRVPGSWEIPVAAGELARKEDIDAVIAIGVLIRGATPHFDYIASEVSKGLADLSLELRKPITFGVITADTLEQAIERAGTKHGNKGWEAALSAIEMANLFKSLR

SEQ ID NO: 8613 - protein, 1307 aa, Artificial Sequence
  SARS-CoV-2/France/GE1977/2020__EPI_ISL_414632 spike protein (1-1147)(T874C_S1055C) LumSynth construct
MFVFLVLLPLVSSQCVNLTTRTQLPPAYTNSFTRGVYYPDKVFRSSVLHSTQDLFLPFFSNVTWFHAIHVSGTNGTKRFDNPVLPFNDGVYFASTEKSNIIRGWIFGTTLDSKTQSLLIVNNATNVVIKVCEFQFCNDPFLGVYYHKNNKSWMESEFRVYSSANNCTFEYVSQPFLMDLEGKQGNFKNLREFVFKNIDGYFKIYSKHTPINLVRDLPQGFSALEPLVDLPIGINITRFQTLLALHRSYLTPGDSSSGWTAGAAAYYVGYLQPRTFLLKYNENGTITDAVDCALDPLSETKCTLKSFTVEKGIYQTSNFRVQPTESIVRFPNITNLCPFGEVFNATRFASVYAWNRKRISNCVADYSVLYNSASFSTFKCYGVSPTKLNDLCFTNVYADSFVIRGDEVRQIAPGQTGKIADYNYKLPDDFTGCVIAWNSNNLDSKVGGNYNYLYRLFRKSNLKPFERDISTEIYQAGSTPCNGVEGFNCYFPLQSYGFQPTNGVGYQPYRVVVLSFELLHAPATVCGPKKSTNLVKNKCVNFNFNGLTGTGVLTESNKKFLPFQQFGRDIADTTDAVRDPQTLEILDITPCSFGGVSVITPGTNTSNQVAVLYQGVNCTEVPVAIHADQLTPTWRVYSTGSNVFQTRAGCLIGAEHVNNSYECDIPIGAGICASYQTQTNSPRRARSVASQSIIAYTMSLGAENSVAYSNNSIAIPTNFTISVTTEILPVSMTKTSVDCTMYICGDSTECSNLLLQYGSFCTQLNRALTGIAVEQDKNTQEVFAQVKQIYKTPPIKDFGGFNFSQILPDPSKPSKRSFIEDLLFNKVTLADAGFIKQYGDCLGDIAARDLICAQKFNGLTVLPPLLTDEMIAQYCSALLAGTITSGWTFGAGAALQIPFAMQMAYRFNGIGVTQNVLYENQKLIANQFNSAIGKIQDSLFSTASALGKLQDVVNQNAQALNTLVKQLSSNFGAISSVLNDILSRLDKVEAEVQIDRLITGRLQSLQTYVTQQLIRAAEIRASANLAATKMSECVLGQSKRVDFCGKGYHLMSFPQCAPHGVVFLHVTYVPAQEKNFTTAPAICHDGKAHFPREGVFVSNGTHWFVTQRNFYEPQIITTDNTFVSGNCDVVIGIVNNTVYDPLQPELDSGGGSGGGQIYEGKLTAEGLRFGIVASRFNHALVDRLVEGAIDAIVRHGGREEDITLVRVPGSWEIPVAAGELARKEDIDAVIAIGVLIRGATPHFDYIASEVSKGLADLSLELRKPITFGVITADTLEQAIERAGTKHGNKGWEAALSAIEMANLFKSLR

SEQ ID NO: 8614 - protein, 1307 aa, Artificial Sequence
  SARS-CoV-2/Finland/FIN-313/2020__EPI_ISL_414641 spike protein (1-1147)(T874C_S1055C) LumSynth construct
MFVFLVLLPLVSSQCVNLTTRTQLPPAYTNSFTRGVYYPDKVFRSSVLHSTQDLFLPFFSNVTWFHAIHVSGTNGTKRFDNPVLPFNDGVYFASTEKSNIIRGWIFGTTLDSKTQSLLIVNNATNVVIKVCEFQFCNDPFLGVYYHKNNKSWMESEFRVYSSANNCTFEYVSQPFLMDLEGKQGNFKNLREFVFKNIDGYFKIYSKHTPINLVRDLPQGFSALEPLVDLPIGINITRFKTLLALHRSYLTPGDSSSGWTAGAAAYYVGYLQPRTFLLKYNENGTITDAVDCALDPLSETKCTLKSFTVEKGIYQTSNFRVQPTESIVRFPNITNLCPFGEVFNATRFASVYAWNRKRISNCVADYSVLYNSASFSTFKCYGVSPTKLNDLCFTNVYADSFVIRGDEVRQIAPGQTGKIADYNYKLPDDFTGCVIAWNSNNLDSKVGGNYNYLYRLFRKSNLKPFERDISTEIYQAGSTPCNGVEGFNCYFPLQSYGFQPTNGVGYQPYRVVVLSFELLHAPATVCGPKKSTNLVKNKCVNFNFNGLTGTGVLTESNKKFLPFQQFGRDIADTTDAVRDPQTLEILDITPCSFGGVSVITPGTNTSNQVAVLYQGVNCTEVPVAIHADQLTPTWRVYSTGSNVFQTRAGCLIGAEHVNNSYECDIPIGAGICASYQTQTNSPRRARSVASQSIIAYTMSLGAENSVAYSNNSIAIPTNFTISVTTEILPVSMTKTSVDCTMYICGDSTECSNLLLQYGSFCTQLNRALTGIAVEQDKNTQEVFAQVKQIYKTPPIKDFGGFNFSQILPDPSKPSKRSFIEDLLFNKVTLADAGFIKQYGDCLGDIAARDLICAQKFNGLTVLPPLLTDEMIAQYCSALLAGTITSGWTFGAGAALQIPFAMQMAYRFNGIGVTQNVLYENQKLIANQFNSAIGKIQDSLSSTASALGKLQDVVNQNAQALNTLVKQLSSNFGAISSVLNDILSRLDKVEAEVQIDRLITGRLQSLQTYVTQQLIRAAEIRASANLAATKMSECVLGQSKRVDFCGKGYHLMSFPQCAPHGVVFLHVTYVPAQEKNFTTAPAICHDGKAHFPREGVFVSNGTHWFVTQRNFYEPQIITTDNTFVSGNCDVVIGIVNNTVYDPLQPELDSGGGSGGGQIYEGKLTAEGLRFGIVASRFNHALVDRLVEGAIDAIVRHGGREEDITLVRVPGSWEIPVAAGELARKEDIDAVIAIGVLIRGATPHFDYIASEVSKGLADLSLELRKPITFGVITADTLEQAIERAGTKHGNKGWEAALSAIEMANLFKSLR

SEQ ID NO: 8615 - protein, 1307 aa, Artificial Sequence
  SARS-CoV-2/Netherlands/ZuidHolland_2/2020__EPI_ISL_414556 spike protein (1-1147)(T874C_S1055C) LumSynth construct
MFVFLVLLPLVSSQCVNLTTRTQLPPAYTNSFTRGVYYPDKVFRSSVLHSTQDLFLPFFSNVTWFHAIHVSGTNGTKRFDNPVLPFNDGVYFASTEKSNIIRGWIFGTTLDSKTQSLLIVNNATNVVIKVCEFQFCNDPFLGVYYHKNNKSWMESEFRVYSSANNCTFEYVSQPFLMDLEGKQGNFKNLREFVFKNIDGYFKIYSKHTPINLVRDLPQGFSALEPLVDLPIGINITRFQTLLALHRSYLTPGDSSSGWTAGAAAYYVGYLQPRTFLLKYNENGTITDAVDCALDPLSETKCTLKSFTVEKGIYQTSNFRVQPTESIVRFPNITNLCPFGEVFNATRFASVYAWNRKRISNCVADYSVLYNSASFSTFKCYGVSPTKLNDLCFTNVYADSFVIRGDEVRQIAPGQTGKIADYNYKLPDDFTGCVIAWNSNNLDSKVGGNYNYLYRLFRKSNLKPFERDISTEIYQAGSTPCNGVEGFNCYFPLQSYGFQPTNGVGYQPYRVVVLSFELLHAPATVCGPKKSTNLVKNKCVNFNFNGLTGTGVLTESNKKFLPFQQFGRDIADTTDAVRDPQTLEILDITPCSFGGVSVITPGTNTSNQVAVLYQGVNCTEVPVAIHADQLTPTWRVYSTGSNVFQTRAGCLIGAEHVNNSYECDIPIGAGICASYQTQTNSPRRARSVASQSIIAYTMSLGAENSVAYSNNSIAIPTNFTISVTTEILPVSMTKTSVDCTMYICGDSTECSNLLLQYGSFCTQLNRALTGIALEQDKNTQEVFAQVKQIYKTPPIKDFGGFNFSQILPDPSKPSKRSFIEDLLFNKVTLADAGFIKQYGDCLGDIAARDLICAQKFNGLTVLPPLLTDEMIAQYCSALLAGTITSGWTFGAGAALQIPFAMQMAYRFNGIGVTQNVLYENQKLIANQFNSAIGKIQDSLSSTASALGKLQDVVNQNAQALNTLVKQLSSNFGAISSVLNDILSRLDKVEAEVQIDRLITGRLQSLQTYVTQQLIRAAEIRASANLAATKMSECVLGQSKRVDFCGKGYHLMSFPQCAPHGVVFLHVTYVPAQEKNFTTAPAICHDGKAHFPREGVFVSNGTHWFVTQRNFYEPQIITTDNTFVSGNCDVVIGIVNNTVYDPLQPELDSGGGSGGGQIYEGKLTAEGLRFGIVASRFNHALVDRLVEGAIDAIVRHGGREEDITLVRVPGSWEIPVAAGELARKEDIDAVIAIGVLIRGATPHFDYIASEVSKGLADLSLELRKPITFGVITADTLEQAIERAGTKHGNKGWEAALSAIEMANLFKSLR

SEQ ID NO: 8616 - protein, 1307 aa, Artificial Sequence
  SARS-CoV-2/USA/WA-UW31/2020__EPI_ISL_414618 spike protein (1-1147)(T874C_S1055C) LumSynth construct
MFVFLVLLPLVSSQCVNLTTRTQLPPAYTNSFTRGVYYPDKVFRSSVLHSTQDLFLPFFSNVTWFHAIHVSGTNGTKRFDNPVLPFNDGVYFASTEKSNIIRGWIFGTTLDSKTQSLLIVNNATNVVIKVCEFQFCNDPFLGVYYHKNNKSWMESEFRVYSSANNCTFEYVSQPFLMDLEGKQGNFKNLREFVFKNIDGYFKIYSKHTPINLVRDLPQGFSALEPLVDLPIGINITRFQTLLALHRSYLTPGDSSSGWTAGAAAYYVGYLQPRTFLLKYNENGTITDAVDCALDPLSETKCTLKSFTVEKGIYQTSNFRVQPTESIVRFPNITNLCPFGEVFNATRFASVYAWNRKRISNCVADYSVLYNSASFSTFKCYGVSPTKLNDLCFTNVYADSFVIRGDEVRQIAPGQTGKIADYNYKLPDDFTGCVIAWNSNNLDSKVGGNYNYLYRLFRKSNLKPFERDISTEIYQAGSTPCNGAEGFNCYFPLQSYGFQPTNGVGYQPYRVVVLSFELLHAPATVCGPKKSTNLVKNKCVNFNFNGLTGTGVLTESNKKFLPFQQFGRDIADTTDAVRDPQTLEILDITPCSFGGVSVITPGTNTSNQVAVLYQDVNCTEVPVAIHADQLTPTWRVYSTGSNVFQTRAGCLIGAEHVNNSYECDIPIGAGICASYQTQTNSPRRARSVASQSIIAYTMSLGAENSVAYSNNSIAIPTNFTISVTTEILPVSMTKTSVDCTMYICGDSTECSNLLLQYGSFCTQLNRALTGIAVEQDKNTQEVFAQVKQIYKTPPIKDFGGFNFSQILPDPSKPSKRSFIEDLLFNKVTLADAGFIKQYGDCLGDIAARDLICAQKFNGLTVLPPLLTDEMIAQYCSALLAGTITSGWTFGAGAALQIPFAMQMAYRFNGIGVTQNVLYENQKLIANQFNSAIGKIQDSLSSTASALGKLQDVVNQNAQALNTLVKQLSSNFGAISSVLNDILSRLDKVEAEVQIDRLITGRLQSLQTYVTQQLIRAAEIRASANLAATKMSECVLGQSKRVDFCGKGYHLMSFPQCAPHGVVFLHVTYVPAQEKNFTTAPAICHDGKAHFPREGVFVSNGTHWFVTQRNFYEPQIITTDNTFVSGNCDVVIGIVNNTVYDPLQPELDSGGGSGGGQIYEGKLTAEGLRFGIVASRFNHALVDRLVEGAIDAIVRHGGREEDITLVRVPGSWEIPVAAGELARKEDIDAVIAIGVLIRGATPHFDYIASEVSKGLADLSLELRKPITFGVITADTLEQAIERAGTKHGNKGWEAALSAIEMANLFKSLR

SEQ ID NO: 8617 - protein, 1307 aa, Artificial Sequence
  SARS-CoV-2/South Korea/SNU01/2020__EPI_ISL_411929 spike protein (1-1147)(T874C_S1055C) LumSynth construct
MFVFLVLLPLVSSQCVNLTTRTQLPPAYTNSFTRGVYYPDKVFRSSVLHSTQDLFLPFFSNVTWFHAIHVSGTNGTKRFDNPVLPFNDGVYFASTEKSNIIRGWIFGTTLDSKTQSLLIVNNATNVVIKVCEFQFCNDPFLGVYYHKNNKSWMESEFRVYSSANNCTFEYVSQPFLMDLEGKQGNFKNLREFVFKNIDGYFKIYSKHTPINLVRDLPQGFWALEPLVDLPIGINITRFQTLLALHRSYLTPGDSSSGWTAGAAAYYVGYLQPRTFLLKYNENGTITDAVDCALDPLSETKCTLKSFTVEKGIYQTSNFRVQPTESIVRFPNITNLCPFGEVFNATRFASVYAWNRKRISNCVADYSVLYNSASFSTFKCYGVSPTKLNDLCFTNVYADSFVIRGDEVRQIAPGQTGKIADYNYKLPDDFTGCVIAWNSNNLDSKVGGNYNYLYRLFRKSNLKPFERDISTEIYQAGSTPCNGVEGFNCYFPLQSYGFQPTNGVGYQPYRVVVLSFELLHAPATVCGPKKSTNLVKNKCVNFNFNGLTGTGVLTESNKKFLPFQQFGRDIADTTDAVRDPQTLEILDITPCSFGGVSVITPGTNTSNQVAVLYQDVNCTEVPVAIHADQLTPTWRVYSTGSNVFQTRAGCLIGAEHVNNSYECDIPIGAGICASYQTQTNSPRRARSVASQSIIAYTMSLGAENSVAYSNNSIAIPTNFTISVTTEILPVSMTKTSVDCTMYICGDSTECSNLLLQYGSFCTQLNRALTGIAVEQDKNTQEVFAQVKQIYKTPPIKDFGGFNFSQILPDPSKPSKRSFIEDLLFNKVTLADAGFIKQYGDCLGDIAARDLICAQKFNGLTVLPPLLTDEMIAQYCSALLAGTITSGWTFGAGAALQIPFAMQMAYRFNGIGVTQNVLYENQKLIANQFNSAIGKIQDSLSSTASALGKLQDVVNQNAQALNTLVKQLSSNFGAISSVLNDILSRLDKVEAEVQIDRLITGRLQSLQTYVTQQLIRAAEIRASANLAATKMSECVLGQSKRVDFCGKGYHLMSFPQCAPHGVVFLHVTYVPAQEKNFTTAPAICHDGKAHFPREGVFVSNGTHWFVTQRNFYEPQIITTDNTFVSGNCDVVIGIVNNTVYDPLQPELDSGGGSGGGQIYEGKLTAEGLRFGIVASRFNHALVDRLVEGAIDAIVRHGGREEDITLVRVPGSWEIPVAAGELARKEDIDAVIAIGVLIRGATPHFDYIASEVSKGLADLSLELRKPITFGVITADTLEQAIERAGTKHGNKGWEAALSAIEMANLFKSLR

SEQ ID NO: 8618 - protein, 1307 aa, Artificial Sequence
  SARS-CoV-2/China/WF0004/2020__EPI_ISL_413694 spike protein (1-1147)(T874C_S1055C) LumSynth construct
MFVFLVLLPLVSSQCVNLTTRTQLPPAYTNSFTRGVYYPDKVFRSSVLHSTQDLFLPFFSNVTWFHAIHVSGTNGTKRFDNPVLPFNDGVYFASTEKSNIIRGWIFGTTLDSKTQSLLIVNNATNVVIKVCEFQFCNDPFLGVYYHKNNKSWTESEFRVYSSANNCTFEYVSQPFLMDLEGKQGNFKNLREFVFKNIDGYFKIYSKHTPINLVRDLPQGFSALEPLVDLPIGINITRFQTLLALHRSYLTPGDSSSGWTAGAAAYYVGYLQPRTFLLKYNENGTITDAVDCALDPLSETKCTLKSFTVEKGIYQTSNFRVQPTESIVRFPNITNLCPFGEVFNATRFASVYAWNRKRISNCVADYSVLYNSASFSTFKCYGVSPTKLNDLCFTNVYADSFVIRGDEVRQIAPGQTGKIADYNYKLPDDFTGCVIAWNSNNLDSKVGGNYNYLYRLFRKSNLKPFERDISTEIYQAGSTPCNGVEGFNCYFPLQSYGFQPTNGVGYQPYRVVVLSFELLHAPATVCGPKKSTNLVKNKCVNFNFNGLTGTGVLTESNKKFLPFQQFGRDIADTTDAVRDPQTLEILDITPCSFGGVSVITPGTNTSNQVAVLYQDVNCTEVPVAIHADQLTPTWRVYSTGSNVFQTRAGCLIGAEHVNNSYECDIPIGAGICASYQTQTNSPRRARSVASQSIIAYTMSLGAENSVAYSNNSIAIPTNFTISVTTEILPVSMTKTSVDCTMYICGDSTECSNLLLQYGSFCTQLNRALTGIAVEQDKNTQEVFAQVKQIYKTPPIKDFGGFNFSQILPDPSKPSKRSFIEDLLFNKVTLADAGFIKQYGDCLGDIAARDLICAQKFNGLTVLPPLLTDEMIAQYCSALLAGTITSGWTFGAGAALQIPFAMQMAYRFNGIGVTQNVLYENQKLIANQFNSAIGKIQDSLSSTASALGKLQDVVNQNAQALNTLVKQLSSNFGAISSVLNDILSRLDKVEAEVQIDRLITGRLQSLQTYVTQQLIRAAEIRASANLAATKMSECVLGQSKRFDFCGKGYHLMSFPQCAPHGVVFLHVTYVPAQEKNFTTAPAICHDGKAHFPREGVFVSNGTHWFVTQRNFYEPQIITTDNTFVSGNCDVVIGIVNNTVYDPLQPELDSGGGSGGGQIYEGKLTAEGLRFGIVASRFNHALVDRLVEGAIDAIVRHGGREEDITLVRVPGSWEIPVAAGELARKEDIDAVIAIGVLIRGATPHFDYIASEVSKGLADLSLELRKPITFGVITADTLEQAIERAGTKHGNKGWEAALSAIEMANLFKSLR

SEQ ID NO: 8619 - protein, 1307 aa, Artificial Sequence
  SARS-CoV-2/China/WF0028/2020__EPI_ISL_413791 spike protein (1-1147)(T874C_S1055C) LumSynth construct
MFVFLVLLPLVSSQCVNLTTRTQLPPAYTNSFTRGVYYPDKVFRSSVLHSTQDLFLPFFSNVTWFHAIHVSGTNGTKRFDNPVLPFNDGVYFASTEKSNIIRGWIFGTTLDSKTQSLLIVNNATNVVIKVCEFQFCNDPFLGVYYHKNNKSWMESEFRVYSSANNCTFEYVSQPFLMDLEGKQGNFKNLREFVFKNIDGYFKIYSKHTPINLVRDLPQGFSALEPLVDLPIGINITRFQTLLALHRSYLTPGDSSSGWTAGAAAYYVGYLQPRTFLLKYNENGTITDAVDCALDPLSETKCTLKSFTVEKGIYQTSNFRVQPTESIVRFPNITNLCPFGEVFNATRFASVYAWNRKRISNCVADYSVLYNSASFSTFKCYGVSPTKLNDLCFTNVYADSFVIRGDEVRQIAPGQTGKIADYNYKLPDDFTGCVIAWNSNNLDSKVGGNYNYLYRLFRKSNLKPFERDISTEIYQAGSTPCNGVEGFNCYFPLQSYGFQPTNGVGYQPYRVVVLSFELLHAPATVCGPKKSTNLVKNKCVNFNFNGLTGTGVLTESNKKFLPFQQFGRDIADTTDAVRDPQTLEILDITPCSFGGVSVITPGTNTSNQVAVLYQDVNCTEVPVAIHADQLTPTWRVYSTGSNVFQTRAGCLIGAEHVNNSYECDIPIGAGICASYQTQTNSPRRARSVASQSIIAYTMSLGAENSVAYSNNSIAIPTNFTISVTTEILPVSMTKTSVDCTMYICGDSTECSNLLLQYGSFCTQLNRALTGIAVEQDKNTQEVFAQVKQIYKTPPIKDFGGFNFSQILPDPSKPSKRSFIEDLLFNKVTLADAGFIKQYGDCLGDIAARDLICAQKFNGLTVLPPLLTDEMIAQYCSALLAGTITSGWTFGAGAALQIPFAMQMAYRFNGIGVTQNVLYENQKLIANQFNSAIGKIQDSLSSTASALGKLQDVVNQNAQALNTLVKQLSSNFGAISSVLNDILSRLDKVEAEVQIDRLITGRLQSLQTYVTQQLIRAAEIRASANLAATKMSECVLGQSKRVDFCGKGYHLMSFPQCAPHGVVFLHVTYVPAQEKNFTTAPAICHDGKAHFPREGVFVSNGTHWFVTQRNFYEPQIITTDNTFVSGNCDVVIGIVNNTVYDPLQPELESGGGSGGGQIYEGKLTAEGLRFGIVASRFNHALVDRLVEGAIDAIVRHGGREEDITLVRVPGSWEIPVAAGELARKEDIDAVIAIGVLIRGATPHFDYIASEVSKGLADLSLELRKPITFGVITADTLEQAIERAGTKHGNKGWEAALSAIEMANLFKSLR

SEQ ID NO: 8620 - protein, 1307 aa, Artificial Sequence
  SARS-CoV-2/2019-nCoV/USA-CruiseA-18/2020__MT159716.1 spike protein (1-1147)(T874C_S1055C) LumSynth construct
MFVFLVLLPLVSSQCVNLTTRTQLPPAYTNSFTRGVYYPDKVFRSSVLHSTQDLFLPFFSNVTWFHAIHVSGTNGTKRFDNPVLPFNDGVYFASTEKSNIIRGWIFGTTLDSKTQSLLIVNNATNVVIKVCEFQFCNDPFLGVYYHKNNKSWMESELRVYSSANNCTFEYVSQPFLMDLEGKQGNFKNLREFVFKNIDGYFKIYSKHTPINLVRDLPQGFSALEPLVDLPIGINITRFQTLLALHRSYLTPGDSSSGWTAGAAAYYVGYLQPRTFLLKYNENGTITDAVDCALDPLSETKCTLKSFTVEKGIYQTSNFRVQPTESIVRFPNITNLCPFGEVFNATRFASVYAWNRKRISNCVADYSVLYNSASFSTFKCYGVSPTKLNDLCFTNVYADSFVIRGDEVRQIAPGQTGKIADYNYKLPDDFTGCVIAWNSNNLDSKVGGNYNYLYRLFRKSNLKPFERDISTEIYQAGSTPCNGVEGFNCYFPLQSYGFQPTNGVGYQPYRVVVLSFELLHAPATVCGPKKSTNLVKNKCVNFNFNGLTGTGVLTESNKKFLPFQQFGRDIADTTDAVRDPQTLEILDITPCSFGGVSVITPGTNTSNQVAVLYQDVNCTEVPVAIHADQLTPTWRVYSTGSNVFQTRAGCLIGAEHVNNSYECDIPIGAGICASYQTQTNSPRRARSVASQSIIAYTMSLGAENSVAYSNNSIAIPTNFTISVTTEILPVSMTKTSVDCTMYICGDSTECSNLLLQYGSFCTQLNRALTGIAVEQDKNTQEVFAQVKQIYKTPPIKDFGGFNFSQILPDPSKPSKRSFIEDLLFNKVTLADAGFIKQYGDCLGDIAARDLICAQKFNGLTVLPPLLTDEMIAQYCSALLAGTITSGWTFGAGAALQIPFAMQMAYRFNGIGVTQNVLYENQKLIANQFNSAIGKIQDSLSSTASALGKLQDVVNQNAQALNTLVKQLSSNFGAISSVLNDILSRLDKVEAEVQIDRLITGRLQSLQTYVTQQLIRAAEIRASANLAATKMSECVLGQSKRVDFCGKGYHLMSFPQCAPHGVVFLHVTYVPAQEKNFTTAPAICHDGKAHFPREGVFVSNGTHWFVTQRNFYEPQIITTDNTFVSGNCDVVIGIVNNTVYDPLQPELDSGGGSGGGQIYEGKLTAEGLRFGIVASRFNHALVDRLVEGAIDAIVRHGGREEDITLVRVPGSWEIPVAAGELARKEDIDAVIAIGVLIRGATPHFDYIASEVSKGLADLSLELRKPITFGVITADTLEQAIERAGTKHGNKGWEAALSAIEMANLFKSLR

SEQ ID NO: 8621 - protein, 1307 aa, Artificial Sequence
  SARS-CoV-2/SARS-CoV-2/Yunnan-01/human/2020/CHN__MT049951.1 spike protein (1-1147)(T874C_S1055C) LumSynth construct
MFVFLVLLPLVSSQCVNLTTRTQLPPANTNSFTRGVYYPDKVFRSSVLHSTQDLFLPFFSNVTWFHAIHVSGTNGTKRFDNPVLPFNDGVYFASTEKSNIIRGWIFGTTLDSKTQSLLIVNNATNVVIKVCEFQFCNDPFLGVYYHKNNKSWMESEFRVYSSANNCTFEYVSQPFLMDLEGKQGNFKNLREFVFKNIDGYFKIYSKHTPINLVRDLPQGFSALEPLVDLPIGINITRFQTLLALHRSYLTPGDSSSGWTAGAAAYYVGYLQPRTFLLKYNENGTITDAVDCALDPLSETKCTLKSFTVEKGIYQTSNFRVQPTESIVRFPNITNLCPFGEVFNATRFASVYAWNRKRISNCVADYSVLYNSASFSTFKCYGVSPTKLNDLCFTNVYADSFVIRGDEVRQIAPGQTGKIADYNYKLPDDFTGCVIAWNSNNLDSKVGGNYNYLYRLFRKSNLKPFERDISTEIYQAGSTPCNGVEGFNCYFPLQSYGFQPTNGVGYQPYRVVVLSFELLHAPATVCGPKKSTNLVKNKCVNFNFNGLTGTGVLTESNKKFLPFQQFGRDIADTTDAVRDPQTLEILDITPCSFGGVSVITPGTNTSNQVAVLYQDVNCTEVPVAIHADQLTPTWRVYSTGSNVFQTRAGCLIGAEHVNNSYECDIPIGAGICASYQTQTNSPRRARSVASQSIIAYTMSLGAENSVAYSNNSIAIPTNFTISVTTEILPVSMTKTSVDCTMYICGDSTECSNLLLQYGSFCTQLNRALTGIAVEQDKNTQEVFAQVKQIYKTPPIKDFGGFNFSQILPDPSKPSKRSFIEDLLFNKVTLADAGFIKQYGDCLGDIAARDLICAQKFNGLTVLPPLLTDEMIAQYCSALLAGTITSGWTFGAGAALQIPFAMQMAYRFNGIGVTQNVLYENQKLIANQFNSAIGKIQDSLSSTASALGKLQDVVNQNAQALNTLVKQLSSNFGAISSVLNDILSRLDKVEAEVQIDRLITGRLQSLQTYVTQQLIRAAEIRASANLAATKMSECVLGQSKRVDFCGKGYHLMSFPQCAPHGVVFLHVTYVPAQEKNFTTAPAICHDGKAHFPREGVFVSNGTHWFVTQRNFYEPQIITTDNTFVSGNCDVVIGIVNNTVYDPLQPELDSGGGSGGGQIYEGKLTAEGLRFGIVASRFNHALVDRLVEGAIDAIVRHGGREEDITLVRVPGSWEIPVAAGELARKEDIDAVIAIGVLIRGATPHFDYIASEVSKGLADLSLELRKPITFGVITADTLEQAIERAGTKHGNKGWEAALSAIEMANLFKSLR

SEQ ID NO: 8622 - protein, 1307 aa, Artificial Sequence
  SARS-CoV-2/USA/WA-UW292/2020__EPI_ISL_418077 spike protein (1-1147)(T874C_S1055C) LumSynth construct
MFVFLVLLPLVSSQCVNLTTRTQLPPAYTNSFTRGVYYPDKVFRSSVLHSTQDLFLPFFSNVTWFHAIHVSGTNGTKRFDNPVLPFNDGVYFASTEKSNIIRGWIFGTTLDSKTQSLLIVNNATNVVIKVCEFQFCNDPFLGVYYHKNNKSWMESEFRVYSSANNCTFEYVSQPFLMDLEGKQGNFKNLREFVFKNIDGYFKIYSKHTPINLVRDLPQGFSALEPLVDLPIGINITRFQTLLALHRSYLTPGDSSSGWTAGAAAYYVGYLQPRTFLLKYNENGTITDAVDCALDPLSETKCTLKSFTVEKGIYQTSNFRVQPTESIVRFPNITNLCPFGEVFNATRFASVYAWNRKRISNCVADYSVLYNSASFSTFKCYGVSPTKLNDLCFTNVYADSFVIRGDEVRQIAPGQTGKIADYNYKLPDDFTGCVIAWNSNNLDSKVGGNYNYLYRLFRKSNLKPFERDISTEIYQASSTPCNGVEGFNCYFPLQSYGFQPTNGVGYQPYRVVVLSFELLHAPATVCGPKKSTNLVKNKCVNFNFNGLTGTGVLTESNKKFLPFQQFGRDIADTTDAVRDPQTLEILDITPCSFGGVSVITPGTNTSNQVAVLYQDVNCTEVPVAIHADQLTPTWRVYSTGSNVFQTRAGCLIGAEHVNNSYECDIPIGAGICASYQTQTNSPRRARSVASQSIIAYTMSLGAENSVAYSNNSIAIPTNFTISVTTEILPVSMTKTSVDCTMYICGDSTECSNLLLQYGSFCTQLNRALTGIAVEQDKNTQEVFAQVKQIYKTPPIKDFGGFNFSQILPDPSKPSKRSFIEDLLFNKVTLADAGFIKQYGDCLGDIAARDLICAQKFNGLTVLPPLLTDEMIAQYCSALLAGTITSGWTFGAGAALQIPFAMQMAYRFNGIGVTQNVLYENQKLIANQFNSAIGKIQDSLSSTASALGKLQDVVNQNAQALNTLVKQLSSNFGAISSVLNDILSRLDKVEAEVQIDRLITGRLQSLQTYVTQQLIRAAEIRASANLAATKMSECVLGQSKRVDFCGKGYHLMSFPQCAPHGVVFLHVTYVPAQEKNFTTAPAICHDGKAHFPREGVFVSNGTHWFVTQRNFYEPQIITTDNTFVSGNCDVVIGIVNNTVYDPLQPELDSGGGSGGGQIYEGKLTAEGLRFGIVASRFNHALVDRLVEGAIDAIVRHGGREEDITLVRVPGSWEIPVAAGELARKEDIDAVIAIGVLIRGATPHFDYIASEVSKGLADLSLELRKPITFGVITADTLEQAIERAGTKHGNKGWEAALSAIEMANLFKSLR

SEQ ID NO: 8623 - protein, 1307 aa, Artificial Sequence
  SARS-CoV-2/Iceland/192/2020__EPI_ISL_417819 spike protein (1-1147)(T874C_S1055C) LumSynth construct
MFVFFVLLPLVSSQCVNLTTRTQLPPAYTNSFTRGVYYPDKVFRSSVLHSTQDLFLPFFSNVTWFHAIHVSGTNGTKRFDNPVLPFNDGVYFASTEKSNIIRGWIFGTTLDSKTQSLLIVNNATNVVIKVCEFQFCNDPFLGVYYHKNNKSWMESEFRVYSSANNCTFEYVSQPFLMDLEGKQGNFKNLREFVFKNIDGYFKIYSKHTPINLVRDLPQGFSALEPLVDLPIGINITRFQTLLALHRSYLTPGDSSSGWTAGAAAYYVGYLQPRTFLLKYNENGTITDAVDCALDPLSETKCTLKSFTVEKGIYQTSNFRVQPTESIVRFPNITNLCPFGEVFNATRFASVYAWNRKRISNCVADYSVLYNSASFSTFKCYGVSPTKLNDLCFTNVYADSFVIRGDEVRQIAPGQTGKIADYNYKLPDDFTGCVIAWNSNNLDSKVGGNYNYLYRLFRKSNLKPFERDISTEIYQAGSTPCNGVEGFNCYFPLQSYGFQPTNGVGYQPYRVVVLSFELLHAPATVCGPKKSTNLVKNKCVNFNFNGLTGTGVLTESNKKFLPFQQFGRDIADTTDAVRDPQTLEILDITPCSFGGVSVITPGTNTSNQVAVLYQGVNCTEVPVAIHADQLTPTWRVYSTGSNVFQTRAGCLIGAEHVNNSYECDIPIGAGICASYQTQTNSPRRARSVASQSIIAYTMSLGAENSVAYSNNSIAIPTNFTISVTTEILPVSMTKTSVDCTMYICGDSTECSNLLLQYGSFCTQLNRALTGIAVEQDKNTQEVFAQVKQIYKTPPIKDFGGFNFSQILPDPSKPSKRSFIEDLLFNKVTLADAGFIKQYGDCLGDIAARDLICAQKFNGLTVLPPLLTDEMIAQYCSALLAGTITSGWTFGAGAALQIPFAMQMAYRFNGIGVTQNVLYENQKLIANQFNSAIGKIQDSLSSTASALGKLQDVVNQNAQALNTLVKQLSSNFGAISSVLNDILSRLDKVEAEVQIDRLITGRLQSLQTYVTQQLIRAAEIRASANLAATKMSECVLGQSKRVDFCGKGYHLMSFPQCAPHGVVFLHVTYVPAQEKNFTTAPAICHDGKAHFPREGVFVSNGTHWFVTQRNFYEPQIITTDNTFVSGNCDVVIGIVNNTVYDPLQPELDSGGGSGGGQIYEGKLTAEGLRFGIVASRFNHALVDRLVEGAIDAIVRHGGREEDITLVRVPGSWEIPVAAGELARKEDIDAVIAIGVLIRGATPHFDYIASEVSKGLADLSLELRKPITFGVITADTLEQAIERAGTKHGNKGWEAALSAIEMANLFKSLR

SEQ ID NO: 8624 - protein, 1307 aa, Artificial Sequence
  SARS-CoV-2/Belgium/ULG-6939/2020__EPI_ISL_417020 spike protein (1-1147)(T874C_S1055C) LumSynth construct
MFVFLVLLPLVSSQCVNLTTRTQLPPAYTNSFTRGVYYPDKVFRSSVLHSTQDLFLPFFSNVTWFHAIHVSGTNGTKRFDNPVLPFNDGVYFASTEKSNIIRGWIFGTTLDSKTQSLLIVNNATNVVIKVCEFQFCNDPFLGVYYHKNNKSWMESEFRVYSSANNCTFEYVSQPFLMDLEGKQGNFKNLREFVFKNIDGYFKIYSKHTPINLVRDLPQGFSALEPLVDLPIGINITRFQTLLALHRSYLTPGDSSSGWTAGAAAYYVGYLQPRTFLLKYNENGTITDAVDCALDPLSETKCTLKSFTVEKGIYQTSNFRVQPTESIVRFPNITNLCPFGEVFNATRFASVYAWNRKRISNCVADYSVLYNSASFSTFKCYGVSPTKLNDLCFTNVYADSFVIRGDEVRQIAPGQTGKIADYNYKLPDDFTGCVIAWNSNNLDSKVGGNYNYLYRLFRKSNLKPFERDISTEIYQAGSTPCNGVEGFNCYFPLQSYGFQPTNGVGYQPYRVVVLSFELLHAPATVCGPKKSTNLVKNKCVNFNFNGLTGTGVLTESNKKFLPFQQFGRDIADTTDAVRDPQTLEILDITPCSFGGVSVITPGTNTSNQVAVLYQGVNCTEVPVAIHADQLTPTWRVYSTGSNVFQTRAGCLIGAEHVNNSYECDIPIGAGICASYQTQTNSPRRARSVASQSIIAYTMSLGAENSVVYSNNSIAIPTNFTISVTTEILPVSMTKTSVDCTMYICGDSTECSNLLLQYGSFCTQLNRALTGIAVEQDKNTQEVFAQVKQIYKTPPIKDFGGFNFSQILPDPSKPSKRSFIEDLLFNKVTLADAGFIKQYGDCLGDIAARDLICAQKFNGLTVLPPLLTDEMIAQYCSALLAGTITSGWTFGAGAALQIPFAMQMAYRFNGIGVTQNVLYENQKLIANQFNSAIGKIQDSLSSTASALGKLQDVVNQNAQALNTLVKQLSSNFGAISSVLNDILSRLDKVEAEVQIDRLITGRLQSLQTYVTQQLIRAAEIRASANLAATKMSECVLGQSKRVDFCGKGYHLMSFPQCAPHGVVFLHVTYVPAQEKNFTTAPAICHDGKAHFPREGVFVSNGTHWFVTQRNFYEPQIITTDNTFVSGNCDVVIGIVNNTVYDPLQPELDSGGGSGGGQIYEGKLTAEGLRFGIVASRFNHALVDRLVEGAIDAIVRHGGREEDITLVRVPGSWEIPVAAGELARKEDIDAVIAIGVLIRGATPHFDYIASEVSKGLADLSLELRKPITFGVITADTLEQAIERAGTKHGNKGWEAALSAIEMANLFKSLR

SEQ ID NO: 8625 - protein, 1307 aa, Artificial Sequence
  SARS-CoV-2/France/HF2496/2020__EPI_ISL_418231 spike protein (1-1147)(T874C_S1055C) LumSynth construct
MFVFLVLLPLVSSQCVNLTTRTQLPPAYTNSFTRGVYYPDKVFRSSVLHSTQDLFLPFFSNVTWFHAIHVSGTNGTKRFDNPVLPFNDGVYFASTEKSNIIRGWIFGTTLDSKTQSLLIVNNATNVVIKVCEFQFCNDPFLGVYYHKNNKSWMESEFRVYSSANNCTFEYVSQPFLMDLEGKQGNFKNLREFVFKNIDGYFKIYSKHTPINLVRDLPQGFSALEPLVDLPIGINITRFQTLLALHRSYLTPGDSSSGWTAGAAAYYVGYLQPRTFLLKYNENGTITDAVDCALDPLSETKCTLKSFTVEKGIYQTSNFRVQPTESIVRFPNITNLCPFGEVFNATRFASVYAWNRKRISNCVADYSVLYNSASFSTFKCYGVSPTKLNDLCFTNVYADSFVIRGDEVRQIAPGQTGKIADYNYKLPDDFTGCVIAWNSNNLDSKVGGNYNYLYRLFRKSNLKPFERDISTEIYQAGSTPCNGVEGFNCYFPLQSYGFQPTNGVGYQPYRVVVLSFELLHAPATVCGPKKSTNLVKNKCVNFNFNGLTGTGVLTESNKKFLPFQQFGRDIADTTDAVRDPQTLEILDITPCSFGGVSVITPGTNTSNQVAVLYQGVNCTEVPVAIHADQLTPTWRVYSTGSNVFQTRAGCLIGAEHVNNSYECDIPIGAGICASYQTQTNSPRRARSVASQSIIAYTMSLGAENSVAYSNNSIAIPTNFTISVTTEILPVSMTKTSVDCTMYICGDSTECSNLLLQYGSFCTQLNRALTGIAVEQDKNTQEVFAQVKQIYKTPPIKDFGGFNFSQILPDPSKPSKRSFIEDLLFNKVTLADAGFIKQYGDCLGDIVARDLICAQKFNGLTVLPPLLTDEMIAQYCSALLAGTITSGWTFGAGAALQIPFAMQMAYRFNGIGVTQNVLYENQKLIANQFNSAIGKIQDSLSSTASALGKLQDVVNQNAQALNTLVKQLSSNFGAISSVLNDILSRLDKVEAEVQIDRLITGRLQSLQTYVTQQLIRAAEIRASANLAATKMSECVLGQSKRVDFCGKGYHLMSFPQCAPHGVVFLHVTYVPAQEKNFTTAPAICHDGKAHFPREGVFVSNGTHWFVTQRNFYEPQIITTDNTFVSGNCDVVIGIVNNTVYDPLQPELDSGGGSGGGQIYEGKLTAEGLRFGIVASRFNHALVDRLVEGAIDAIVRHGGREEDITLVRVPGSWEIPVAAGELARKEDIDAVIAIGVLIRGATPHFDYIASEVSKGLADLSLELRKPITFGVITADTLEQAIERAGTKHGNKGWEAALSAIEMANLFKSLR

SEQ ID NO: 8626 - protein, 1307 aa, Artificial Sequence
  SARS-CoV-2/USA/WA-UW291/2020__EPI_ISL_418076 spike protein (1-1147)(T874C_S1055C) LumSynth construct
MFVFLVLLPLVSSQCVNLTTRTQLPPAYTNSFTRGVYYPDKVFRSSVLHSTQDLFLPFFSNVTWFHAIHVSGTNGTKRFDNPVLPFNDGVYFASTEKSNIIRGWIFGTTLDSKTQSLLIVNNATNVVIKVCEFQFCNDPFLGVYYHKNNKSWMESEFRVYSSANNCTFEYVSQPFLMDLEGKQGNFKNLREFVFKNIDGYFKIYSKHTPINLVRDLPQGFSALEPLVDLPIGINITRFQTLLALHRSYLTPGDSSSGWTAGAAAYYVGYLQPRTFLLKYNENGTITDAVDCALDPLSETKCTLKSFTVEKGIYQTSNFRVQPTESIVRFPNITNLCPFGEVFNATRFASVYAWNRKRISNCVADYSVLYNSASFSTFKCYGVSPTKLNDLCFTNVYADSFVIRGDEVRQIAPGQTGKIADYNYKLPDDFTGCVIAWNSNNLDSKVGGNYNYLYRLFRKSNLKPFERDISTEIYQAGSTPCNGVEGFNCYFPLQSYGFQPTNGVGYQPYRVVVLSFELLHAPATVCGPKKSTNLVKNKCVNFNFNGLTGTGVLTESNKKFLPFQQFGRDIADTTDAVRDPQTLEILDITPCSFGGVSVITPGTNTSNQVAVLYQGVNCTEVPVAIHADQLTPTWRVYSTGSNVFQTRAGCLIGAEHVNNSYECDIPIGAGICASYQTQTNSPRRARSVASQSIIAYTMSLGAENSVAYSNNSIAIPTNFTISVTTEILPVSMTKTSVDCTMYICGDSTECSNLLLQYGSFCTQLNRALTGIAVEQDKNTQEVFAQVKQIYKTPPIKDFGGFNFSQILPDPSKPSKRSFIEDLLFNKVTLADAGFIKQYGDCLGDIAARDLICAQKFNGLTVLPPLLTDEMIAQYCSALLAGTITSGWTFGAGAALQIPFAMQMAYRFNGIGVTQNVLYENQKLIANQFNSAIGKIQYSLSSTASALGKLQDVVNQNAQALNTLVKQLSSNFGAISSVLNDILSRLDKVEAEVQIDRLITGRLQSLQTYVTQQLIRAAEIRASANLAATKMSECVLGQSKRVDFCGKGYHLMSFPQCAPHGVVFLHVTYVPAQEKNFTTAPAICHDGKAHFPREGVFVSNGTHWFVTQRNFYEPQIITTDNTFVSGNCDVVIGIVNNTVYDPLQPELDSGGGSGGGQIYEGKLTAEGLRFGIVASRFNHALVDRLVEGAIDAIVRHGGREEDITLVRVPGSWEIPVAAGELARKEDIDAVIAIGVLIRGATPHFDYIASEVSKGLADLSLELRKPITFGVITADTLEQAIERAGTKHGNKGWEAALSAIEMANLFKSLR

SEQ ID NO: 8627 - protein, 1307 aa, Artificial Sequence; identical to SEQ ID NO: 8590
  SARS-CoV-2/Portugal/PT0034/2020__EPI_ISL_418019 spike protein (1-1147)(T874C_S1055C) LumSynth construct

SEQ ID NO: 8628 - protein, 1307 aa, Artificial Sequence; identical to SEQ ID NO: 8582
  SARS-CoV-2/Iceland/202/2020__EPI_ISL_417750 spike protein (1-1147)(T874C_S1055C) LumSynth construct

SEQ ID NO: 8629 - protein, 1307 aa, Artificial Sequence
  SARS-CoV-2/USA/WA-UW261/2020__EPI_ISL_418046 spike protein (1-1147)(T874C_S1055C) LumSynth construct
MFVFLVLLPLVSSQCVNLTTRTQLPPAYTNSFTRGVYYPDKVFRSSVLHSTQDLFLPFFSNVTWFHAIHVSGTNGTKRFDNPVLPFNDGVYFASTEKSNIIRGWIFGTTLDSKTQSLLIVNNATNVVIKVCEFQFCNDPFLGVYYHKNNKSWMESEFRVYSSANNCTFEYVSQPFLMDLEGKQGNFKNLREFVFKNIDGYFKIYSKHTPINLVRDLPQGFSALEPLVDLPIGINITRFQTLLALHRSYLTPGDSSSGWTAGAAAYYVGYLQPRTFLLKYNENGTITDAVDCALDPLSETKCTLKSFTVEKGIYQTSNFRVQPTESIVRFPNITNLCPFGEVFNATRFTSVYAWNRKRISNCVADYSVLYNSASFSTFKCYGVSPTKLNDLCFTNVYADSFVIRGDEVRQIAPGQTGKIADYNYKLPDDFTGCVIAWNSNNLDSKVGGNYNYLYRLFRKSNLKPFERDISTEIYQAGSTPCNGVEGFNCYFPLQSYGFQPTNGVGYQPYRVVVLSFELLHAPATVCGPKKSTNLVKNKCVNFNFNGLTGTGVLTESNKKFLPFQQFGRDIADTTDAVRDPQTLEILDITPCSFGGVSVITPGTNTSNQVAVLYQDVNCTEVPVAIHADQLTPTWRVYSTGSNVFQTRAGCLIGAEHVNNSYECDIPIGAGICASYQTQTNSPRRARSVASQSIIAYTMSLGAENSVAYSNNSIAIPTNFTISVTTEILPVSMTKTSVDCTMYICGDSTECSNLLLQYGSFCTQLNRALTGIAVEQDKNTQEVFAQVKQIYKTPPIKDFGGFNFSQILPDPSKPSKRSFIEDLLFNKVTLADAGFIKQYGDCLGDIAARDLICAQKFNGLTVLPPLLTDEMIAQYCSALLAGTITSGWTFGAGAALQIPFAMQMAYRFNGIGVTQNVLYENQKLIANQFNSAIGKIQDSLSSTASALGKLQDVVNQNAQALNTLVKQLSSNFGAISSVLNDILSRLDKVEAEVQIDRLITGRLQSLQTYVTQQLIRAAEIRASANLAATKMSECVLGQSKRVDFCGKGYHLMSFPQCAPHGVVFLHVTYVPAQEKNFTTAPAICHDGKAHFPREGVFVSNGTHWFVTQRNFYEPQIITTDNTFVSGNCDVVIGIVNNTVYDPLQPELDSGGGSGGGQIYEGKLTAEGLRFGIVASRFNHALVDRLVEGAIDAIVRHGGREEDITLVRVPGSWEIPVAAGELARKEDIDAVIAIGVLIRGATPHFDYIASEVSKGLADLSLELRKPITFGVITADTLEQAIERAGTKHGNKGWEAALSAIEMANLFKSLR

SEQ ID NO: 8630 - protein, 1307 aa, Artificial Sequence
  SARS-CoV-2/Portugal/PT0035/2020__EPI_ISL_418020 spike protein (1-1147)(T874C_S1055C) LumSynth construct
MFVFLVLLPLVSSQCVNLTTRTQLPPAYTNSFTRGVYYPDKVFRSSVLHSTQDLFLPFFSNVTWFHAIHVSGTNGTKRFDNPVLPFNDGVYFASTEKSNIIRGWIFGTTLDSKTQSLLIVNNATNVVIKVCEFQFCNDPFLGVYYHKNNKSWMESEFRVYSSANNCTFEYVSQPFLMDLEGKQGNFKNLREFVFKNIDGYFKIYSKHTPINLVRDLPQGFSALEPLVDLPIGINITRFQTLLALHRSYLTPGDSSSGWTAGAAAYYVGYLQPRTFLLKYNENGTITDAVDCALDPLSETKCTLKSFTVEKGIYQTSNFRVQPTESIVRFPNITNLCPFGEVFNATRFASVYAWNRKRISNCVADYSVLYNSASFSTFKCYGVSPTKLNDLCFTNVYADSFVIRGDEVRQIAPGQTGKIADYNYKLPDDFTGCVIAWNSNNLDSKVGGNYNYLYRLFRKSNLKPFERDISTEIYQAGSTPCNGVEGFNCYFPLQSYGFQPTNGVGYQPYRVVVLSFELLHAPATVCGPKKSTNLVKNKCVNFNFNGLTGTGVLTESNKKFLPFQQFGRDIADTTDAVRDPQTLEILDITPCSFGGVSVITPGTNTSNQVAVLYQDVNCTEVPVAIHADQLTPTWRVYSTGSNVFQTRAGCLIGAEHVNNSYECDIPIGAGICASYQTQTNSPRRARSVASQSIIAYTMSLGAENSVAYSNNSIAIPTNFTISVTTEILPVSMTKTSVDCTMYICGDSTECSNLLLQYGSFCTQLNRALTGIAVEQDKNTQEVFAQVKQIYKTPPIKDFGGFNFSQILPDPSKPSKRSFIEDLLFNKVTLADAGFIKQYGDCLGDISARDLICAQKFNGLTVLPPLLTDEMIAQYCSALLAGTITSGWTFGAGAALQIPFAMQMAYRFNGIGVTQNVLYENQKLIANQFNSAIGKIQDSLSSTASALGKLQDVVNQNAQALNTLVKQLSSNFGAISSVLNDILSRLDKVEAEVQIDRLITGRLQSLQTYVTQQLIRAAEIRASANLAATKMSECVLGQSKRVDFCGKGYHLMSFPQCAPHGVVFLHVTYVPAQEKNFTTAPAICHDGKAHFPREGVFVSNGTHWFVTQRNFYEPQIITTDNTFVSGNCDVVIGIVNNTVYDPLQPELDSGGGSGGGQIYEGKLTAEGLRFGIVASRFNHALVDRLVEGAIDAIVRHGGREEDITLVRVPGSWEIPVAAGELARKEDIDAVIAIGVLIRGATPHFDYIASEVSKGLADLSLELRKPITFGVITADTLEQAIERAGTKHGNKGWEAALSAIEMANLFKSLR

SEQ ID NO: 8631 - protein, 1307 aa, Artificial Sequence
  SARS-CoV-2/USA/NY-NYUMC7/2020__EPI_ISL_418192 spike protein (1-1147)(T874C_S1055C) LumSynth construct
MFVFLVLLPLVSSQCVNLTTRTQLPPAYTNSFTRGVYYPDKVFRSSVLHSTQDLFLPFFSNVTWFHAIHVSGTNGTKRFDNPVLPFNDGVYFASTEKSNIIRGWIFGTTLDSKTQSLLIVNNATNVVIKVCEFQFCNDPFLGVYHHKNNKSWMESEFRVYSSANNCTFEYVSQPFLMDLEGKQGNFKNLREFVFKNIDGYFKIYSKHTPINLVRDLPQGFSALEPLVDLPIGINITRFQTLLALHRSYLTPGDSSSGWTAGAAAYYVGYLQPRTFLLKYNENGTITDAVDCALDPLSETKCTLKSFTVEKGIYQTSNFRVQPTESIVRFPNITNLCPFGEVFNATRFASVYAWNRKRISNCVADYSVLYNSASFSTFKCYGVSPTKLNDLCFTNVYADSFVIRGDEVRQIAPGQTGKIADYNYKLPDDFTGCVIAWNSNNLDSKVGGNYNYLYRLFRKSNLKPFERDISTEIYQAGSTPCNGVEGFNCYFPLQSYGFQPTNGVGYQPYRVVVLSFELLHAPATVCGPKKSTNLVKNKCVNFNFNGLTGTGVLTESNKKFLPFQQFGRDIADTTDAVRDPQTLEILDITPCSFGGVSVITPGTNTSNQVAVLYQGVNCTEVPVAIHADQLTPTWRVYSTGSNVFQTRAGCLIGAEHVNNSYECDIPIGAGICASYQTQTNSPRRARSVASQSIIAYTMSLGAENSVAYSNNSIAIPTNFTISVTTEILPVSMTKTSVDCTMYICGDSTECSNLLLQYGSFCTQLNRALTGIAVEQDKNTQEVFAQVKQIYKTPPIKDFGGFNFSQILPDPSKPSKRSFIEDLLFNKVTLADAGFIKQYGDCLGDIAARDLICAQKFNGLTVLPPLLTDEMIAQYCSALLAGTITSGWTFGAGAALQIPFAMQMAYRFNGIGVTQNVLYENQKLIANQFNSAIGKIQDSLSSTASALGKLQDVVNQNAQALNTLVKQLSSNFGAISSVLNDILSRLDKVEAEVQIDRLITGRLQSLQTYVTQQLIRAAEIRASANLAATKMSECVLGQSKRVDFCGKGYHLMSFPQCAPHGVVFLHVTYVPAQEKNFTTAPAICHDGKAHFPREGVFVSNGTHWFVTQRNFYEPQIITTDNTFVSGNCDVVIGIVNNTVYDPLQPELDSGGGSGGGQIYEGKLTAEGLRFGIVASRFNHALVDRLVEGAIDAIVRHGGREEDITLVRVPGSWEIPVAAGELARKEDIDAVIAIGVLIRGATPHFDYIASEVSKGLADLSLELRKPITFGVITADTLEQAIERAGTKHGNKGWEAALSAIEMANLFKSLR

SEQ ID NO: 8632 - protein, 1307 aa, Artificial Sequence
  SARS-CoV-2/Iceland/189/2020__EPI_ISL_417709 spike protein (1-1147)(T874C_S1055C) LumSynth construct
MFVFLVLLPLVSSQCVNLTTRTQLPPAYTNSFTRGVYYPDKVFRSSVLHSTQDLFLPFFSNVTWFHAIHVSGTNGTKRFDNPVLPFNDGVYFASTEKSNIIRGWIFGTTLDSKTQSLLIVNNATNVVIKVCEFQFCNDPFLGVYYHKNNKSWMESEFRVYSSANNCTFEYVSQPFLMDLEGKQGNFKNLREFVFKNIDGYFKIYSKHTPINLVRDLPQGFSALEPLVDLPIGINITRFQTLLALHRSYLTPGDSSSGWTAGAAAYYVGYLQPRTFLLKYNENGTITDAVDCALDPLSETKCTLKSFTVEKGIYQTSNFRVQPTESIVRFPNITNLCPFGEVFNATRFASVYAWNRKRISNCVADYSVLYNSASFSTFKCYGVSPTKLNDLCFTNVYADSFVIRGDEVRQIAPGQTGKIADYNYKLPDDFTGCVIAWNSNNLDSKVGGNYNYLYRLFRKSNLKPFERDISTEIYQAGSTPCNGVEGFNCYFPLQSYGFQPTNGVGYQPYRVVVLSFELLHAPATVCGPKKSTNLVKNKCVNFNFNGLTGTGVLTESNKKFLPFQQFGRDIADTTDAVRDPQTLEILDITPCSFGGVSVITPGTNTSNQVAVLYQGVNCTEVPVAIHADQLTPTWRVYSTGSNVFQTRAGCLIGAEHVNNSYECDIPIGAGICASYQTQTNSPRRARSVASQSIIAYTMSLGAENSVAYSNNSIAIPTNFTISVTTEILPVSMTKTSVDCTMYICGDSTECSNLLLQYGSFCTQLNRALTGIAVEQDKNTQEVFAQVKQIYKTPPIKDFGGFNFSQILPDPSKPSKRSFIEDLLFNKVTLADAGFTKQYGDCLGDIAARDLICAQKFNGLTVLPPLLTDEMIAQYCSALLAGTITSGWTFGAGAALQIPFAMQMAYRFNGIGVTQNVLYENQKLIANQFNSAIGKIQDSLSSTASALGKLQDVVNQNAQALNTLVKQLSSNFGAISSVLNDILSRLDKVEAEVQIDRLITGRLQSLQTYVTQQLIRAAEIRASANLAATKMSECVLGQSKRVDFCGKGYHLMSFPQCAPHGVVFLHVTYVPAQEKNFTTAPAICHDGKAHFPREGVFVSNGTHWFVTQRNFYEPQIITTDNTFVSGNCDVVIGIVNNTVYDPLQPELDSGGGSGGGQIYEGKLTAEGLRFGIVASRFNHALVDRLVEGAIDAIVRHGGREEDITLVRVPGSWEIPVAAGELARKEDIDAVIAIGVLIRGATPHFDYIASEVSKGLADLSLELRKPITFGVITADTLEQAIERAGTKHGNKGWEAALSAIEMANLFKSLR

SEQ ID NO: 8633 - protein, 1307 aa, Artificial Sequence
  SARS-CoV-2/Australia/NSW56/2020__EPI_ISL_417408 spike protein (1-1147)(T874C_S1055C) LumSynth construct
MFVFLVLLPLVSSQCVNLTTRTQLPPAYTNSFTRGVYYPDKVFRSSVLHSTQDLFLPFFSNVTWFHAIHVSGTNGTKRFDNPVLPFNDGVYFASTEKSNIIRGWIFGTTLDSKTQSLLIVNNATNVVIKVCEFQFCNDPFLGVYYHKNNKSWMESEFRVYSSANNCTFEYVSQPFLMDLEGKQGNFKNLREFVFKNIDGYFKIYSKHTPINLVRDLPQGFSALEPLVDLPIGINITRFQTLLALHRSYLTPGDSSSGWTAGAAAYYVGYLQPRTFLLKYNENGTITDAVDCALDPLSETKCTLKSFTVEKGIYQTSNFRVQPTESIVRFPNITNLCPFGEVFNATRFASVYAWNRKRISNCVADYSVLYNSASFSTFKCYGVSPTKLNDLCFTNVYADSFVIRGDEVRQIAPGQTGKIADYNYKLPDDFTGCVIAWNSNNLDSKVGGNYNYLYRLFRKSNLKPFERDISTEIYQAGSTPCNGVEGFNCYFPLQSYGFQPTNGVGYQPYRVVVLSFELLHAPATVCGPKKSTNLVKNKCVNFNFNGLTGTGVLTESNKKFLPFQQFGRDIADTTDAVRDPQTLEILDITPCSFGGVSVITPGTNTSNQVAVLYQDVNCTEVPVAIHADQLTPTWRVYSTGSNVFQTRAGCLIGAEHVNNSYECDIPIGAGICASYQTQTNSPRRARSVASQSIIAYTMSLGAENSVAYSNNSIAIPTNFTISVTTEILPVSMTKTSVDCTMYICGDSTECSNLLLQYGSFCTQLNRALTGIAVEQDKNTQEVFAQVKQIYKTPPIKDFGGFNFSQILPDSSKPSKRSFIEDLLFNKVTLADAGFIKQYGDCLGDIAARDLICAQKFNGLTVLPPLLTDEMIAQYCSALLAGTITSGWTFGAGAALQIPFAMQMAYRFNGIGVTQNVLYENQKLIANQFNSAIGKIQDSLSSTASALGKLQDVVNQNAQALNTLVKQLSSNFGAISSVLNDILSRLDKVEAEVQIDRLITGRLQSLQTYVTQQLIRAAEIRASANLAATKMSECVLGQSKRVDFCGKGYHLMSFPQCAPHGVVFLHVTYVPAQEKNFTTAPAICHDGKAHFPREGVFVSNGTHWFVTQRNFYEPQIITTDNTFVSGNCDVVIGIVNNTVYDPLQPELDSGGGSGGGQIYEGKLTAEGLRFGIVASRFNHALVDRLVEGAIDAIVRHGGREEDITLVRVPGSWEIPVAAGELARKEDIDAVIAIGVLIRGATPHFDYIASEVSKGLADLSLELRKPITFGVITADTLEQAIERAGTKHGNKGWEAALSAIEMANLFKSLR

SEQ ID NO: 8634 - protein, 1307 aa, Artificial Sequence
  SARS-CoV-2/Iceland/280/2020__EPI_ISL_417608 spike protein (1-1147)(T874C_S1055C) LumSynth construct
MFVFLVLLPLVSSQCVNLTTRTQLPPAYTNSFTRGVYYPDKVFRSSVLHSTQDLFLPFFSNVTWFHAIHVSGTNGTKRFDNPVLPFNDGVYFASTEKSNIIRGWIFGTTLDSKTQSLLIVNNATNVVIKVCEFQFCNDPFLGVYYHKNNKSWMESEFRVYSSANNCTFEYVSQPFLMDLEGKQGNFKNLREFVFKNIDGYFKIYSKHTPINLVRDLPQGFSALEPLVDLPIGINITRFQTLLALHRSYLTPGDSSSGWTAGAAAYYVGYLQPRTFLLKYNENGTITDAVDCALDPLSETKCTLKSFTVEKGIYQTSNFRVQPTESIVRFPNITNLCPFGEVFNATRFASVYAWNRKRISNCVADYSVLYNSASFSTFKCYGVSPTKLNDLCFTNVYADSFVIRGDEVRQIAPGQTGKIADYNYKLPDDFTGCVIAWNSNNLDSKVGGNYNYLYRLFRKSNLKPFERDISTEIYQAGSTPCNGVEGFNCYFPLQSYGFQPTNGVGYQPYRVVVLSFELLHAPATVCGPKKSTNLVKNKCVNFNFNGLTGTGVLTESNKKFLPFQQFGRDIADTTDAVRDPQTLEILDITPCSFGGVSVITPGTNTSNQVAVLYQGVNCTEVPVAIHADQLTPTWRVYSTGSNVFQTRAGCLIGAEHVNNSYECDIPIGAGICASYHTQTNSPRRARSVASQSIIAYTMSLGAENSVAYSNNSIAIPTNFTISVTTEILPVSMTKTSVDCTMYICGDSTECSNLLLQYGSFCTQLNRALTGIAVEQDKNTQEVFAQVKQIYKTPPIKDFGGFNFSQILPDPSKPSKRSFIEDLLFNKVTLADAGFIKQYGDCLGDIAARDLICAQKFNGLTVLPPLLTDEMIAQYCSALLAGTITSGWTFGAGAALQIPFAMQMAYRFNGIGVTQNVLYENQKLIANQFNSAIGKIQDSLSSTASALGKLQDVVNQNAQALNTLVKQLSSNFGAISSVLNDILSRLDKVEAEVQIDRLITGRLQSLQTYVTQQLIRAAEIRASANLAATKMSECVLGQSKRVDFCGKGYHLMSFPQCAPHGVVFLHVTYVPAQEKNFTTAPAICHDGKAHFPREGVFVSNGTHWFVTQRNFYEPQIITTDNTFVSGNCDVVIGIVNNTVYDPLQPELDSGGGSGGGQIYEGKLTAEGLRFGIVASRFNHALVDRLVEGAIDAIVRHGGREEDITLVRVPGSWEIPVAAGELARKEDIDAVIAIGVLIRGATPHFDYIASEVSKGLADLSLELRKPITFGVITADTLEQAIERAGTKHGNKGWEAALSAIEMANLFKSLR

SEQ ID NO: 8635 - protein, 1307 aa, Artificial Sequence; identical to SEQ ID NO: 8590
  SARS-CoV-2/Iceland/247/2020__EPI_ISL_417575 spike protein (1-1147)(T874C_S1055C) LumSynth construct

SEQ ID NO: 8636 - protein, 1307 aa, Artificial Sequence
  SARS-CoV-2/Iceland/238/2020__EPI_ISL_417566 spike protein (1-1147)(T874C_S1055C) LumSynth construct
MFVFLVLLPLVSSQCVNLTTRTQLPPAYTNSFTRGVYYPDKVFRSSVLHSTQDLFLPFFSNVTWFHAIHVSGTNGTKRFDNPVLPFNDGVYFASTEKSNIIRGWIFGTTLDSKTQSLLIVNNATNVVIKVCEFQFCNDPFLGVYYHKNNKSWMESEFRVYSSANNCTFEYVSQPFLMDLEGKQGNFKNLREFVFKNIDGYFKIYSKHTPINLVRDLPQGFSALEPLVDLPIGINITRFQTLLALHRSYLTPGDSSSGWTAGAAAYYVGYLQPRTFLLKYNENGTITDAVDCALDPLSETKCTLKSFTVEKGIYQTSNFRVQPTESIVRFPNITNLCPFGEVFNATRFASVYAWNRKRISNCVADYSVLYNSASFSTFKCYGVSPTKLNDLCFTNVYADSFVIRGDEVRQIAPGQTGKIADYNYKLPDDFTGCVIAWNSNNLDSKVGGNYNYLYRLFRKSNLKPFERDISTEIYQAGSTPCNGVEGFNCYFPLQSYGFQPTNGVGYQPYRVVVLSFELLHAPATVCGPKKSTNLVKNKCVNFNFNGLTGTGVLTESNKKFLPFQQFGRDIADTTDAVRDPQTLEILDITPCSFGGVSVITPGTNTSNQVAVLYQGVNCTEVPVAIHADQLTPTWRVYSTGSNVFQTRAGCLIGAEHVNNSYECDIPIGAGICASYQTQTNSPRRARSVASQSIIAYTMSLGAENSVAYSNNSIAIPTNFTISVTTEILPVSMTKTSVDCTMYICGDSTECSNLLLQYGSFCTQLNRALTGIAVEQDKNTQEVFAQVKQIYKTPPIKDFGGFNFSQILPDPSKPSKRSFIEDLLFNKVTLADVGFIKQYGDCLGDIAARDLICAQKFNGLTVLPPLLTDEMIAQYCSALLAGTITSGWTFGAGAALQIPFAMQMAYRFNGIGVTQNVLYENQKLIANQFNSAIGKIQDSLSSTASALGKLQDVVNQNAQALNTLVKQLSSNFGAISSVLNDILSRLDKVEAEVQIDRLITGRLQSLQTYVTQQLIRAAEIRASANLAATKMSECVLGQSKRVDFCGKGYHLMSFPQCAPHGVVFLHVTYVPAQEKNFTTAPAICHDGKAHFPREGVFVSNGTHWFVTQRNFYEPQIITTDNTFVSGNCDVVIGIVNNTVYDPLQPELDSGGGSGGGQIYEGKLTAEGLRFGIVASRFNHALVDRLVEGAIDAIVRHGGREEDITLVRVPGSWEIPVAAGELARKEDIDAVIAIGVLIRGATPHFDYIASEVSKGLADLSLELRKPITFGVITADTLEQAIERAGTKHGNKGWEAALSAIEMANLFKSLR

SEQ ID NO: 8637 - protein, 1307 aa, Artificial Sequence
  SARS-CoV-2/Greece/16/2020__EPI_ISL_418265 spike protein (1-1147)(T874C_S1055C) LumSynth construct
MFVFLVLLPLVSSQCVNLTTRTQLPPAYTNSFTRGVYYPDKVFRSSVLHSTQDLFLPFFSNVTWFHAIHVSGTNGTKRFDNPVLPFNDGVYFASTEKSNIIRGWIFGTTLDSKTQSLLIVNNATNVVIKVCEFQFCNDPFLGVYYHKNNKSWMESEFRVYSSANNCTFEYVSQPFLMDLEGKQGNFKNLREFVFKNVDGYFKIYSKHTPINLVRDLPQGFSALEPLVDLPIGINITRFQTLLALHRSYLTPGDSSSGWTAGAAAYYVGYLQPRTFLLKYNENGTITDAVDCALDPLSETKCTLKSFTVEKGIYQTSNFRVQPTESIVRFPNITNLCPFGEVFNATRFASVYAWNRKRISNCVADYSVLYNSASFSTFKCYGVSPTKLNDLCFTNVYADSFVIRGDEVRQIAPGQTGKIADYNYKLPDDFTGCVIAWNSNNLDSKVGGNYNYLYRLFRKSNLKPFERDISTEIYQAGSTPCNGVEGFNCYFPLQSYGFQPTNGVGYQPYRVVVLSFELLHAPATVCGPKKSTNLVKNKCVNFNFNGLTGTGVLTESNKKFLPFQQFGRDIADTTDAVRDPQTLEILDITPCSFGGVSVITPGTNTSNQVAVLYQDVNCTEVPVAIHADQLTPTWRVYSTGSNVFQTRAGCLIGAEHVNNSYECDIPIGAGICASYQTQTNSPRRARSVASQSIIAYTMSLGAENSVAYSNNSIAIPTNFTISVTTEILPVSMTKTSVDCTMYICGDSTECSNLLLQYGSFCTQLNRALTGIAVEQDKNTQEVFAQVKQIYKTPPIKDFGGFNFSQILPDPSKPSKRSFIEDLLFNKVTLADAGFIKQYGDCLGDIAARDLICAQKFNGLTVLPPLLTDEMIAQYCSALLAGTITSGWTFGAGAALQIPFAMQMAYRFNGIGVTQNVLYENQKLIANQFNSAIGKIQDSLSSTASALGKLQDVVNQNAQALNTLVKQLSSNFGAISSVLNDILSRLDKVEAEVQIDRLITGRLQSLQTYVTQQLIRAAEIRASANLAATKMSECVLGQSKRVDFCGKGYHLMSFPQCAPHGVVFLHVTYVPAQEKNFTTAPAICHDGKAHFPREGVFVSNGTHWFVTQRNFYEPQIITTDNTFVSGNCDVVIGIVNNTVYDPLQPELDSGGGSGGGQIYEGKLTAEGLRFGIVASRFNHALVDRLVEGAIDAIVRHGGREEDITLVRVPGSWEIPVAAGELARKEDIDAVIAIGVLIRGATPHFDYIASEVSKGLADLSLELRKPITFGVITADTLEQAIERAGTKHGNKGWEAALSAIEMANLFKSLR

SEQ ID NO: 8638 - protein, 1307 aa, Artificial Sequence
  SARS-CoV-2/Iceland/319/2020__EPI_ISL_417648 spike protein (1-1147)(T874C_S1055C) LumSynth construct
MFVFLVLLPLVSSQCVNLTTRTQLPPAYTNSFTRGVYYPDKVFRSSVLHSTQDLFLPFFSNVTWFHAIHVSGTNGTKRFDNPVLPFNDGVYFASTEKSNIIRGWIFGTTLDSKTQSLLIVNNATNVVIKVCEFQFCNDPFLGVYYHKNNKSWMESEFRVYSSANNCTFEYVSQPFLIDLEGKQGNFKNLREFVFKNIDGYFKIYSKHTPINLVRDLPQGFSALEPLVDLPIGINITRFQTLLALHRSYLTPGDSSSGWTAGAAAYYVGYLQPRTFLLKYNENGTITDAVDCALDPLSETKCTLKSFTVEKGIYQTSNFRVQPTESIVRFPNITNLCPFGEVFNATRFASVYAWNRKRISNCVADYSVLYNSASFSTFKCYGVSPTKLNDLCFTNVYADSFVIRGDEVRQIAPGQTGKIADYNYKLPDDFTGCVIAWNSNNLDSKVGGNYNYLYRLFRKSNLKPFERDISTEIYQAGSTPCNGVEGFNCYFPLQSYGFQPTNGVGYQPYRVVVLSFELLHAPATVCGPKKSTNLVKNKCVNFNFNGLTGTGVLTESNKKFLPFQQFGRDIADTTDAVRDPQTLEILDITPCSFGGVSVITPGTNTSNQVAVLYQGVNCTEVPVAIHADQLTPTWRVYSTGSNVFQTRAGCLIGAEHVNNSYECDIPIGAGICASYQTQTNSPRRARSVASQSIIAYTMSLGAENSVAYSNNSIAIPTNFTISVTTEILPVSMTKTSVDCTMYICGDSTECSNLLLQYGSFCTQLNRALTGIAVEQDKNTQEVFAQVKQIYKTPPIKDFGGFNFSQILPDPSKPSKRSFIEDLLFNKVTLADAGFIKQYGDCLGDIAARDLICAQKFNGLTVLPPLLTDEMIAQYCSALLAGTITSGWTFGAGAALQIPFAMQMAYRFNGIGVTQNVLYENQKLIANQFNSAIGKIQDSLSSTASALGKLQDVVNQNAQALNTLVKQLSSNFGAISSVLNDILSRLDKVEAEVQIDRLITGRLQSLQTYVTQQLIRAAEIRASANLAATKMSECVLGQSKRVDFCGKGYHLMSFPQCAPHGVVFLHVTYVPAQEKNFTTAPAICHDGKAHFPREGVFVSNGTHWFVTQRNFYEPQIITTDNTFVSGNCDVVIGIVNNTVYDPLQPELDSGGGSGGGQIYEGKLTAEGLRFGIVASRFNHALVDRLVEGAIDAIVRHGGREEDITLVRVPGSWEIPVAAGELARKEDIDAVIAIGVLIRGATPHFDYIASEVSKGLADLSLELRKPITFGVITADTLEQAIERAGTKHGNKGWEAALSAIEMANLFKSLR

SEQ ID NO: 8639 - protein, 1307 aa, Artificial Sequence
  SARS-CoV-2/Congo/94/2020__EPI_ISL_417947 spike protein (1-1147)(T874C_S1055C) LumSynth construct
MFVFLVLLPLVSSQCVNLTTRTQLPPAYTNSFTRGVYYPDKVFRSSVLHSTQDLFLPFFSNVTWFHAIHVSGTNGTKRFDNPVLPFNDGVYFASTEKSNIIRGWIFGTTLDSKTQSLLIVNNATNVVIKVCEFQFCNDPFLGVYYHKNNKSWMESEFRVYSSANNCTFEYVSQPFLMDLEGKQGNFKNLREFVFKNIDGYFKIYSKHTPINLVRDLPQGFSALEPLVDLPIGINITRFQTLLALHRSYLTPGDSSSGWTAGAAAYYVGYLQPRTFLLKYNENGTITDAVDCALDPLSETKCTLKSFTVEKGIYQTSNFRVQPTESIVRFPNITNLCPFGEVFNATRFASVYAWNRKRISNCVADYSVLYNSASFSTFKCYGVSPTKLNDLCFTNVYADSFVIRGDEVRQIAPGQTGKIADYNYKLPDDFTGCVIAWNSNNLDSKVGGNYNYLYRLFRKSNLKPFERDISTEIYQAGSTPCNGVEGFNCYFPLQSYGFQPTNGVGYQPYRVVVLSFELLHAPATVCGPKKSTNLVKNKCVNFNFNGLTGTGVLTESNKKFLPFQQFGRDIADTTDAVRDPQTLEILDITPCSFGGVSVITPGTNTSNQVAVLYQGVNCTEVPVAIHADQLTPTWRVYSTGSNVFQTRAGCLIGAEHVNNSYECDIPIGAGICASYQTQTNSPRRARSVASQSIIAYTMSLGAENSVAYSNNSIAIPTNFTISVTTEILPVSMTKTSVDCTMYICGDSTECSNLLLQYGSFCTQLNRALTGIAVEQDKNTQEVFAQVKQIYKTPPIKDFGGFNFSQILPDPSKPSKRSFIEDILFNKVTLADAGFIKQYGDCLGDIAARDLICAQKFNGLTVLPPLLTDEMIAQYCSALLAGTITSGWTFGAGAALQIPFAMQMAYRFNGIGVTQNVLYENQKLIANQFNSAIGKIQDSLSSTASALGKLQDVVNQNAQALNTLVKQLSSNFGAISSVLNDILSRLDKVEAEVQIDRLITGRLQSLQTYVTQQLIRAAEIRASANLAATKMSECVLGQSKRVDFCGKGYHLMSFPQCAPHGVVFLHVTYVPAQEKNFTTAPAICHDGKAHFPREGVFVSNGTHWFVTQRNFYEPQIITTDNTFVSGNCDVVIGIVNNTVYDPLQPELDSGGGSGGGQIYEGKLTAEGLRFGIVASRFNHALVDRLVEGAIDAIVRHGGREEDITLVRVPGSWEIPVAAGELARKEDIDAVIAIGVLIRGATPHFDYIASEVSKGLADLSLELRKPITFGVITADTLEQAIERAGTKHGNKGWEAALSAIEMANLFKSLR

SEQ ID NO: 8640 - protein, 1307 aa, Artificial Sequence
  SARS-CoV-2/Congo/158/2020__EPI_ISL_417950 spike protein (1-1147)(T874C_S1055C) LumSynth construct
MFVFLVLLPLVSSQCVNLTTRTQLPPAYTNSFTRGVYYPDKVFRSSVLHSTQDLFLPFFSNVTWFHAIHVSGTNGTKRFDNPVLPFNDGVYFASTEKSNIIRGWIFGTTLDSKTQSLLIVNNATNVVIKVCEFQFCNDPFLGVYYHKNNKSWMESEFRVYSSANNCTFEYVSQPFLMDLEGKQGNFKNLREFVFKNIDGYFKIYSKHTPINLVRDLPQGFSALEPLVDLPIGINITRFQTLLALHRSYLTPGDSSSGWTAGAAAYYVGYLQPRTFLLKYNENGTITDAVDCALDPLSETKCTLKSFTVEKGIYQTSNFRVQPTESIVRFPNITNLCPFGEVFNATRFASVYAWNRKRISNCVADYSVLYNSASFSTFKCYGVSPTKLNDLCFTNVYADSFVIRGDEVRQIAPGQTGKIADYNYKLPDDFTGCVIAWNSNNLDSKVGGNYNYLYRLFRKSNLKPFERDISTEIYQAGSTPCNGVEGFNCYFPLQSYGFQPTNGVGYQPYRVVVLSFELLHAPATVCGPKKSTNLVKNKCVNFNFNGLTGTGVLTESNKKFLPFQQFGRDIADTTDAVRDPQTLEILDITPCSFGGVSVITPGTNTSNQVAVLYQDVNCTEVPVAIHADQLTPTWRVYSTGSNVFQTRAGCLIGAEHVNNSYECDIPIGAGICASYQTQTNSPRRARSVASQSIIAYTMSLGAENSVAYSNNSIAIPTNFTISVTTEILPVSMTKTSVDCTMYICGDSTECSNLLLQYGSFCTQLNRALTGIAVEQDKNTQEVFAQVKQIYKTPPIKDFGGFNFSQILPDPSKPSKRSFIEDLLFNKVTLADAGFIKQYGDCLGDIAARDLICAQKFNGLTVLPPLLTDEMIAQYCSALLAGTITSGWTFGAGAALQIPFAMQMAYRFNGIGVTQNVLYENQKLIANQFNSAIGKIQDSLSSTASALGKLQDVVNQNAQALNTLVKQLSSNFGAISSVLNDILSRLDKVEAEVQIDRLITGRLQSLQTYVTQQLIRAAEIRASANLAATKMSECVLGQSKRVDFCGKGYHLMSFPQCAPHGVVFLHVTYVPAQEKNFTTAPAICHDGKAHFPREGVFVSNGTHWFVTQRNFYEPQIITTDNTFLSGNCDVVIGIVNNTVYDPLQPELDSGGGSGGGQIYEGKLTAEGLRFGIVASRFNHALVDRLVEGAIDAIVRHGGREEDITLVRVPGSWEIPVAAGELARKEDIDAVIAIGVLIRGATPHFDYIASEVSKGLADLSLELRKPITFGVITADTLEQAIERAGTKHGNKGWEAALSAIEMANLFKSLR

SEQ ID NO: 8641 - protein, 1307 aa, Artificial Sequence
  SARS-CoV-2/USA/UT-00034/2020__EPI_ISL_417977 spike protein (1-1147)(T874C_S1055C) LumSynth construct
MFVFLVLLPLVSSQCVNLTTRTQLPPAYTNSFTRGVYYPDKVFRSSVLHSTQDLFLPFFSNVTWFHAIHVSGTNGTKRFDNPVLPFNDGVYFASTEKSNIIRGWIFGTTLDSKTQSLLIVNNATNVVIKVCEFQFCNDPFLGVYYYKNNKSWMESEFRVYSSANNCTFEYVSQPFLMDLEGKQGNFKNLREFVFKNIDGYFKIYSKHTPINLVRDLPQGFSALEPLVDLPIGINITRFQTLLALHRSYLTPGDSSSGWTAGAAAYYVGYLQPRTFLLKYNENGTITDAVDCALDPLSETKCTLKSFTVEKGIYQTSNFRVQPTESIVRFPNITNLCPFGEVFNATRFASVYAWNRKRISNCVADYSVLYNSASFSTFKCYGVSPTKLNDLCFTNVYADSFVIRGDEVRQIAPGQTGKIADYNYKLPDDFTGCVIAWNSNNLDSKVGGNYNYLYRLFRKSNLKPFERDISTEIYQAGSTPCNGVEGFNCYFPLQSYGFQPTNGVGYQPYRVVVLSFELLHAPATVCGPKKSTNLVKNKCVNFNFNGLTGTGVLTESNKKFLPFQQFGRDIADTTDAVRDPQTLEILDITPCSFGGVSVITPGTNTSNQVAVLYQGVNCTEVPVAIHADQLTPTWRVYSTGSNVFQTRAGCLIGAEHVNNSYECDIPIGAGICASYQTQTNSPRRARSVASQSIIAYTMSLGAENSVAYSNNSIAIPTNFTISVTTEILPVSMTKTSVDCTMYICGDSTECSNLLLQYGSFCTQLNRALTGIAVEQDKNTQEVFAQVKQIYKTPPIKDFGGFNFSQILPDPSKPSKRSFIEDLLFNKVTLADAGFIKQYGDCLGDIAARDLICAQKFNGLTVLPPLLTDEMIAQYCSALLAGTITSGWTFGAGAALQIPFAMQMAYRFNGIGVTQNVLYENQKLIANQFNSAIGKIQDSLSSTASALGKLQDVVNQNAQALNTLVKQLSSNFGAISSVLNDILSRLDKVEAEVQIDRLITGRLQSLQTYVTQQLIRAAEIRASANLAATKMSECVLGQSKRVDFCGKGYHLMSFPQCAPHGVVFLHVTYVPAQEKNFTTAPAICHDGKAHFPREGVFVSNGTHWFVTQRNFYEPQIITTDNTFVSGNCDVVIGIVNNTVYDPLQPELDSGGGSGGGQIYEGKLTAEGLRFGIVASRFNHALVDRLVEGAIDAIVRHGGREEDITLVRVPGSWEIPVAAGELARKEDIDAVIAIGVLIRGATPHFDYIASEVSKGLADLSLELRKPITFGVITADTLEQAIERAGTKHGNKGWEAALSAIEMANLFKSLR

SEQ ID NO: 8642 - protein, 1307 aa, Artificial Sequence
  SARS-CoV-2/USA/UT-00033/2020__EPI_ISL_417976 spike protein (1-1147)(T874C_S1055C) LumSynth construct
MFVFLVLLPLVSSQCVNLTTRTQLPPAYTNSFTRGVYYPDKVFRSSVLHSTQDLFLPFFSNVTWFHAIHVSGTNGTKRFDNPVLPFNDGVYFASTEKSNIIRGWIFGTTLDSKTQSLLIVNNATNVVIKVCEFQFCNDPFLGVYYHKNNKSWMESEFRVYSSANNCTFEYVSQPFLMDLEGKQGNFKNLREFVFKNIDGYFKIYSKHTPINLVRDLPQGFSALEPLVDLPIGINITRFQTLLALHRSYLTPGDSSSGLTAGAAAYYVGYLQPRTFLLKYNENGTITDAVDCALDPLSETKCTLKSFTVEKGIYQTSNFRVQPTESIVRFPNITNLCPFGEVFNATRFASVYAWNRKRISNCVADYSVLYNSASFSTFKCYGVSPTKLNDLCFTNVYADSFVIRGDEVRQIAPGQTGKIADYNYKLPDDFTGCVIAWNSNNLDSKVGGNYNYLYRLFRKSNLKPFERDISTEIYQAGSTPCNGVEGFNCYFPLQSYGFQPTNGVGYQPYRVVVLSFELLHAPATVCGPKKSTNLVKNKCVNFNFNGLTGTGVLTESNKKFLPFQQFGRDIADTTDAVRDPQTLEILDITPCSFGGVSVITPGTNTSNQVAVLYQGVNCTEVPVAIHADQLTPTWRVYSTGSNVFQTRAGCLIGAEHVNNSYECDIPIGAGICASYQTQTNSPRRARSVASQSIIAYTMSLGAENSVAYSNNSIAIPTNFTISVTTEILPVSMTKTSVDCTMYICGDSTECSNLLLQYGSFCTQLNRALTGIAVEQDKNTQEVFAQVKQIYKTPPIKDFGGFNFSQILPDPSKPSKRSFIEDLLFNKVTLADAGFIKQYGDCLGDIAARDLICAQKFNGLTVLPPLLTDEMIAQYCSALLAGTITSGWTFGAGAALQIPFAMQMAYRFNGIGVTQNVLYENQKLIANQFNSAIGKIQDSLSSTASALGKLQDVVNQNAQALNTLVKQLSSNFGAISSVLNDILSRLDKVEAEVQIDRLITGRLQSLQTYVTQQLIRAAEIRASANLAATKMSECVLGQSKRVDFCGKGYHLMSFPQCAPHGVVFLHVTYVPAQEKNFTTAPAICHDGKAHFPREGVFVSNGTHWFVTQRNFYEPQIITTDNTFVSGNCDVVIGIVNNTVYDPLQPELDSGGGSGGGQIYEGKLTAEGLRFGIVASRFNHALVDRLVEGAIDAIVRHGGREEDITLVRVPGSWEIPVAAGELARKEDIDAVIAIGVLIRGATPHFDYIASEVSKGLADLSLELRKPITFGVITADTLEQAIERAGTKHGNKGWEAALSAIEMANLFKSLR

SEQ ID NO: 8643 - protein, 1307 aa, Artificial Sequence
  SARS-CoV-2/USA/WI-13/2020__EPI_ISL_417516 spike protein (1-1147)(T874C_S1055C) LumSynth construct
MFVFLVLLPLVSSQCVNLTTRTQLPPAYTNSFTRGVYYPDKVFRSSVLHSTQDLFLPFFSNVTWFHAIHVSGTNGTKRFDNPVLPFNDGVYFASTEKSNIIRGWIFGTTLDSKTQSLLIVNNATNVVIKVCEFQFCNDPFLGVYYHKNNKSWMESEFRVYSSANNCTFEYVSQPFLMDLEGKQGNFKNLREFVFKNIDGYFKIYSKHTPINLVRDLPQGFSALEPLVDLPIGINITRFQTLLALHRSYLTPGDSSSGWTAGAAAYYVGYLQPRTFLLKYNENGTITDAVDCALDPLSETKCTLKSFTVEKGIYQTSNFRVLPTESIVRFPNITNLCPFGEVFNATRFASVYAWNRKRISNCVADYSVLYNSASFSTFKCYGVSPTKLNDLCFTNVYADSFVIRGDEVRQIAPGQTGKIADYNYKLPDDFTGCVIAWNSNNLDSKVGGNYNYLYRLFRKSNLKPFERDISTEIYQAGSTPCNGVEGFNCYFPLQSYGFQPTNGVGYQPYRVVVLSFELLHAPATVCGPKKSTNLVKNKCVNFNFNGLTGTGVLTESNKKFLPFQQFGRDIADTTDAVRDPQTLEILDITPCSFGGVSVITPGTNTSNQVAVLYQGVNCTEVPVAIHADQLTPTWRVYSTGSNVFQTRAGCLIGAEHVNNSYECDIPIGAGICASYQTQTNSPRRARSVASQSIIAYTMSLGAENSVAYSNNSIAIPTNFTISVTTEILPVSMTKTSVDCTMYICGDSTECSNLLLQYGSFCTQLNRALTGIAVEQDKNTQEVFAQVKQIYKTPPIKDFGGFNFSQILPDPSKPSKRSFIEDLLFNKVTLADAGFIKQYGDCLGDIAARDLICAQKFNGLTVLPPLLTDEMIAQYCSALLAGTITSGWTFGAGAALQIPFAMQMAYRFNGIGVTQNVLYENQKLIANQFNSAIGKIQDSLSSTASALGKLQDVVNQNAQALNTLVKQLSSNFGAISSVLNDILSRLDKVEAEVQIDRLITGRLQSLQTYVTQQLIRAAEIRASANLAATKMSECVLGQSKRVDFCGKGYHLMSFPQCAPHGVVFLHVTYVPAQEKNFTTAPAICHDGKAHFPREGVFVSNGTHWFVTQRNFYEPQIITTDNTFVSGNCDVVIGIVNNTVYDPLQPELDSGGGSGGGQIYEGKLTAEGLRFGIVASRFNHALVDRLVEGAIDAIVRHGGREEDITLVRVPGSWEIPVAAGELARKEDIDAVIAIGVLIRGATPHFDYIASEVSKGLADLSLELRKPITFGVITADTLEQAIERAGTKHGNKGWEAALSAIEMANLFKSLR

SEQ ID NO: 8644 - protein, 1306 aa, Artificial Sequence
  SARS-CoV-2/India/1-27/2020__EPI_ISL_413522 spike protein (1-1146)(T873C_S1054C) LumSynth construct
MFVFLVLLPLVSSQCVNLTTRTQLPPAYTNSFTRGVYYPDKVFRSSVLHSTQDLFLPFFSNVTWFHAIHVSGTNGTKRFDNPVLPFNDGVYFASTEKSNIIRGWIFGTTLDSKTQSLLIVNNATNVVIKVCEFQFCNDPFLGVYHKNNKSWMESEFRVYSSANNCTFEYVSQPFLMDLEGKQGNFKNLREFVFKNIDGYFKIYSKHTPINLVRDLPQGFSALEPLVDLPIGINITRFQTLLALHRSYLTPGDSSSGWTAGAAAYYVGYLQPRTFLLKYNENGTITDAVDCALDPLSETKCTLKSFTVEKGIYQTSNFRVQPTESIVRFPNITNLCPFGEVFNATRFASVYAWNRKRISNCVADYSVLYNSASFSTFKCYGVSPTKLNDLCFTNVYADSFVIRGDEVIQIAPGQTGKIADYNYKLPDDFTGCVIAWNSNNLDSKVGGNYNYLYRLFRKSNLKPFERDISTEIYQAGSTPCNGVEGFNCYFPLQSYGFQPTNGVGYQPYRVVVLSFELLHAPATVCGPKKSTNLVKNKCVNFNFNGLTGTGVLTESNKKFLPFQQFGRDIADTTDAVRDPQTLEILDITPCSFGGVSVITPGTNTSNQVAVLYQDVNCTEVPVAIHADQLTPTWRVYSTGSNVFQTRAGCLIGAEHVNNSYECDIPIGAGICASYQTQTNSPRRARSVASQSIIAYTMSLGAENSVAYSNNSIAIPTNFTISVTTEILPVSMTKTSVDCTMYICGDSTECSNLLLQYGSFCTQLNRALTGIAVEQDKNTQEVFAQVKQIYKTPPIKDFGGFNFSQILPDPSKPSKRSFIEDLLFNKVTLADAGFIKQYGDCLGDIAARDLICAQKFNGLTVLPPLLTDEMIAQYCSALLAGTITSGWTFGAGAALQIPFAMQMAYRFNGIGVTQNVLYENQKLIANQFNSAIGKIQDSLSSTASALGKLQDVVNQNAQALNTLVKQLSSNFGAISSVLNDILSRLDKVEAEVQIDRLITGRLQSLQTYVTQQLIRAAEIRASANLAATKMSECVLGQSKRVDFCGKGYHLMSFPQCAPHGVVFLHVTYVPAQEKNFTTAPAICHDGKAHFPREGVFVSNGTHWFVTQRNFYEPQIITTDNTFVSGNCDVVIGIVNNTVYDPLQPELDSGGGSGGGQIYEGKLTAEGLRFGIVASRFNHALVDRLVEGAIDAIVRHGGREEDITLVRVPGSWEIPVAAGELARKEDIDAVIAIGVLIRGATPHFDYIASEVSKGLADLSLELRKPITFGVITADTLEQAIERAGTKHGNKGWEAALSAIEMANLFKSLR

SEQ ID NO: 8645 - protein, 1301 aa, Artificial Sequence
  SARS-CoV-2/pangolin/Guangxi/P4L/2017__EPI_ISL_410538 spike protein (1-1141)(T868C_S1049C) LumSynth construct
MFVFLFVLPLVSSQCVNLTTRTGIPPGYTNSSTRGVYYPDKVFRSSILHLTQDLFLPFFSNVTWFNTINYQGGFKKFDNPVLPFNDGVYFASTEKSNIIRGWIFGTTLDARTQSLLIVNNATNVVIKVCEFQFCTDPFLGVYYHNNNKTWVENEFRVYSSANNCTFEYISQPFLMDLEGKQGNFKNLREFVFKNVDGYFKIYSKHTPIDLVRDLPRGFAALEPLVDLPIGINITRFQTLLALHRSYLTPGNLESGWTTGAAAYYVGYLQQRTFLLSYNQNGTITDAVDCSLDPLSETKCTLKSLTVEKGIYQTSNFRVQPTISIVRFPNITNLCPFGEVFNASKFASVYAWNRKRISNCVADYSVLYNSTSFSTFKCYGVSPTKLNDLCFTNVYADSFVVKGDEVRQIAPGQTGVIADYNYKLPDDFTGCVIAWNSVKQDALTGGNYGYLYRLFRKSKLKPFERDISTEIYQAGSTPCNGQVGLNCYYPLERYGFHPTTGVNYQPFRVVVLSFELLNGPATVCGPKLSTTLVKDKCVNFNFNGLTGTGVLTTSKKQFLPFQQFGRDISDTTDAVRDPQTLEILDITPCSFGGVSVITPGTNTSNQVAVLYQDVNCTEVPMAIHAEQLTPAWRVYSAGANVFQTRAGCLVGAEHVNNSYECDIPVGAGICASYHSMSSLRSVNQRSIIAYTMSLGAENSVAYSNNSIAIPTNFTISVTTEILPVSMTKTSVDCTMYICGDSIECSNLLLQYGSFCTQLNRALTGIAVEQDKNTQEVFAQVKQIYKTPPIKDFGGFNFSQILPDPSKPSKRSFIEDLLFNKVTLADAGFIKQYGDCLGDIAARDLICAQKFNGLTVLPPLLTDEMIAQYCSALLAGTITSGWTFGAGAALQIPFAMQMAYRFNGIGVTQNVLYENQKLIANQFNSAIGKIQDSLSSTASALGKLQDVVNQNAQALNTLVKQLSSNFGAISSVLNDILSRLDKVEAEVQIDRLITGRLQSLQTYVTQQLIRAAEIRASANLAATKMSECVLGQSKRVDFCGKGYHLMSFPQCAPHGVVFLHVTYVPAQEKNFTTAPAICHEGKAHFPREGVFVSNGTHWFITQRNFYEPQIITTDNTFVSGSCDVVIGIVNNTVYDPLQPELDSGGGSGGGQIYEGKLTAEGLRFGIVASRFNHALVDRLVEGAIDAIVRHGGREEDITLVRVPGSWEIPVAAGELARKEDIDAVIAIGVLIRGATPHFDYIASEVSKGLADLSLELRKPITFGVITADTLEQAIERAGTKHGNKGWEAALSAIEMANLFKSLR

SEQ ID NO: 8646 - protein, 1301 aa, Artificial Sequence
  SARS-CoV-2/pangolin/Guangxi/P5L/2017__EPI_ISL_410540 spike protein (1-1141)(T868C_S1049C) LumSynth construct
MFVFLFVLPLVSSQCVNLTTRTGIPPGYTNSSTRGVYYPDKVFRSSILHLTQDLFLPFFSNVTWFNTINYQGGFKKFDNPVLPFNDGVYFASTEKSNIIRGWIFGTTLDARTQSLLIVNNATNVVIKVCEFQFCTDPFLGVYYHNNNKTWVENEFRVYSSANNCTFEYISQPFLMDLEGKQGNFKNLREFVFKNVDGYFKIYSKHTPIDLVRDLPRGFAALEPLVDLPIGINITRFQTLLALHRSYLTPGKLESGWTTGAAAYYVGYLQQRTFLLSYNQNGTITDAVDCSLDPLSETKCTLKSLTVEKGIYQTSNFRVQPTISIVRFPNITNLCPFGEVFNASKFASVYAWNRKRISNCVADYSVLYNSTSFSTFKCYGVSPTKLNDLCFTNVYADSFVVKGDEVRQIAPGQTGVIADYNYKLPDDFTGCVIAWNSVKQDALTGGNYGYLYRLFRKSKLKPFERDISTEIYQAGSTPCNGQVGLNCYYPLERYGFHPTTGVNYQPFRVVVLSFELLNGPATVCGPKLSTTLVKDKCVNFNFNGLTGTGVLTTSKKQFLPFQQFGRDISDTTDAVRDPQTLEILDITPCSFGGVSVITPGTNTSNQVAVLYQDVNCTEVPMAIHAEQLTPAWRVYSAGANVFQTRAGCLVGAEHVNNSYECDIPVGAGICASYHSMSSFRSVNQRSIIAYTMSLGAENSVAYSNNSIAIPTNFTISVTTEILPVSMTKTSVDCTMYICGDSIECSNLLLQYGSFCTQLNRALTGIAVEQDKNTQEVFAQVKQIYKTPPIKDFGGFNFSQILPDPSKPSKRSFIEDLLFNKVTLADAGFIKQYGDCLGDIAARDLICAQKFNGLTVLPPLLTDEMIAQYCSALLAGTITSGWTFGAGAALQIPFAMQMAYRFNGIGVTQNVLYENQKLIANQFNSAIGKIQDSLSSTASALGKLQDVVNQNAQALNTLVKQLSSNFGAISSVLNDILSRLDKVEAEVQIDRLITGRLQSLQTYVTQQLIRAAEIRASANLAATKMSECVLGQSKRVDFCGKGYHLMSFPQCAPHGVVFLHVTYVPAQEKNFTTAPAICHEGKAHFPREGVFVSNGTHWFITQRNFYEPQIITTDNTFVSGSCDVVIGIVNNTVYDPLQPELDSGGGSGGGQIYEGKLTAEGLRFGIVASRFNHALVDRLVEGAIDAIVRHGGREEDITLVRVPGSWEIPVAAGELARKEDIDAVIAIGVLIRGATPHFDYIASEVSKGLADLSLELRKPITFGVITADTLEQAIERAGTKHGNKGWEAALSAIEMANLFKSLR

SEQ ID NO: 8647 - protein, 1301 aa, Artificial Sequence
  SARS-CoV-2/pangolin/Guangxi/P5E/2017__EPI_ISL_410541 spike protein (1-1141)(T868C_S1049C) LumSynth construct
MFVFLFVLPLVSSQCVNLTTRTGIPPGYTNSSTRGVYYPDKVFRSSILHLTQDLFLPFFSNVTWFNTITYQGGSKKFDNPVLPFNDGVYFASTEKSNIIRGWIFGTTLDARTQSLLIVNNATNVVIKVCEFQFCTDPFLGVYYHNNNKTWVENEFRVYSSANNCTFEYISQPFLMDLEGKQGNFKNLREFVFKNVDGYFKIYSKHTPIDLVRDLPRGFAALEPLVDLPIGINITRFQTLLALHRSYLTPGKLESGWTTGAAAYYVGYLQQRTFLLSYNQNGTITDAVDCSLDPLSETKCTLKSLTVEKGIYQTSNFRVQPTISIVRFPNITNLCPFGEVFNASKFASVYAWNRKRISNCVADYSVLYNSTSFSTFKCYGVSPTKLNDLCFTNVYADSFVVKGDEVRQIAPGQTGVIADYNYKLPDDFTGCVIAWNSVKQDALTGDNYGYLYRLFRKSKLKPFERDISTEIYQAGSTPCNGQVGLNCYYPLERYGFHPTTGVNYQPFRVVVLSFELLNGPATVCGPKLSTTLVKDKCVNFNFNGLTGTGVLTTSKKQFLPFQQFGRDISDTTDAVRDPQTLEILDITPCSFGGVSVITPGTNTSNQVAVLYQDVNCTEVPMAIHAEQLTPAWRVYSAGANVFQTRAGCLVGAEHVNNSYECDIPVGAGICASYHSMSSFRSVNQRSIIAYTMSLGAENSVAYSNNSIAIPTNFTISVTTEILPVSMTKTSVDCTMYICGDSIECSNLLLQYGSFCTQLNRALTGIAVEQDKNTQEVFAQVKQIYKTPPIKDFGGFNFSQILPDPSKPSKRSFIEDLLFNKVTLADAGFIKQYGDCLGDIAARDLICAQKFNGLTVLPPLLTDEMIAQYCSALLAGTITSGWTFGAGAALQIPFAMQMAYRFNGIGVTQNVLYENQKLIANQFNSAIGKIQDSLSSTASALGKLQDVVNQNAQALNTLVKQLSSNFGAISSVLNDILSRLDKVEAEVQIDRLITGRLQSLQTYVTQQLIRAAEIRASANLAATKMSECVLGQSKRVDFCGKGYHLMSFPQCAPHGVVFLHVTYVPAQEKNFTTAPAICHEGKAHFPREGVFVSNGTHWFITQRNFYEPQIITTDNTFVSGSCDVVIGIVNNTVYDPLQPELDSGGGSGGGQIYEGKLTAEGLRFGIVASRFNHALVDRLVEGAIDAIVRHGGREEDITLVRVPGSWEIPVAAGELARKEDIDAVIAIGVLIRGATPHFDYIASEVSKGLADLSLELRKPITFGVITADTLEQAIERAGTKHGNKGWEAALSAIEMANLFKSLR

SEQ ID NO: 8648 - protein, 1299 aa, Artificial Sequence
  SARS-CoV-2/pangolin/Guangxi/P1E/2017__EPI_ISL_410539 spike protein (1-1139)(T866C_S1047C) LumSynth construct
MFVFLFVLPLVSSQCVNLTTRTGIQPGYTNSSTRGVYYPDKVFRSSILHLTQDLFLPFFSNVTWFNTINYQGGFKKFDNPVLPFNDGVYFASTEKSNIIRGWIFGTTLDARTQSLLIVNNATNVVIKVCEFQFCTDPFLGVYYHNNNKTWVENEFRVYSSANNCTFEYISQPFLMDLEGKQGNFKNLREFVFKNVDGYFKIYSKHTPIDLVRDLPRGFAALEPLVDLPIGINITRFQTLLALHRSYLTPGKLESGWTTGAAAYYVGYLQQRTFLLSYNQNGTITDAVDCSLDPLSETKCTLKSLTVEKGIYQTSNFRVQPTISIVRFPNITNLCPFGEVFNASKFASVYAWNRKRISNCVADYSVLYNSTSFSTFKCYGVSPTKLNDLCFTNVYADSFVVKGDEVRQIAPGQTGVIADYNYKLPDDFTGCVIAWNSVKQDALTGGNYLYRLFRKSKLKPFERDISTEIYQAGSTPCNGQVGLNCYYPLERYGFHPTTGVNYQPFRVVVLSFELLNGPATVCGPKLSTTLVKDKCVNFNFNGLTGTGVLTTSKKQFLPFQQFGRDISDTTDAVRDPQTLEILDITPCSFGGVSVITPGTNTSNQVAVLYQDVNCTEVPMAIHAEQLTPAWRVYSAGANVFQTRAGCLVGAEHVNNSYECDIPVGAGICASYHSMSSLRSVNQRSIIAYTMSLGAENSVAYSNNSIAIPTNFTISVTTEILPVSMTKTSVDCTMYICGDSIECSNLLLQYGSFCTQLNRALTGIAVEQDKNTQEVFAQVKQIYKTPPIKDFGGFNFSQILPDPSKPSKRSFIEDLLFNKVTLADAGFIKQYGDCLGDIAARDLICAQKFNGLTVLPPLLTDEMIAQYCSALLAGTITSGWTFGAGAALQIPFAMQMAYRFNGIGVTQNVLYENQKLIANQFNSAIGKIQDSLSSTASALGKLQDVVNQNAQALNTLVKQLSSNFGAISSVLNDILSRLDKVEAEVQIDRLITGRLQSLQTYVTQQLIRAAEIRASANLAATKMSECVLGQSKRVDFCGKGYHLMSFPQCAPHGVVFLHVTYVPAQEKNFTTAPAICHEGKAHFPREGVFVSNGTHWFITQRNFYEPQIITTDNTFVSGSCDVVIGIVNNTVYDPLQPELDSGGGSGGGQIYEGKLTAEGLRFGIVASRFNHALVDRLVEGAIDAIVRHGGREEDITLVRVPGSWEIPVAAGELARKEDIDAVIAIGVLIRGATPHFDYIASEVSKGLADLSLELRKPITFGVITADTLEQAIERAGTKHGNKGWEAALSAIEMANLFKSLR

SEQ ID NO: 8649 - protein, 1315 aa, Artificial Sequence
  SARS-CoV-2/Wuhan/WIV05/2019__EPI_ISL_402128 spike protein (1-1147) Ferritin construct
MFVFLVLLPLVSSQCVNLTTRTQLPPAYTNSFTRGVYYPDKVFRSSVLHSTQDLFLPFFSNVTWFHAIHVSGTNGTKRFDNPVLPFNDGVYFASTEKSNIIRGWIFGTTLDSKTQSLLIVNNATNVVIKVCEFQFCNDPFLGVYYHKNNKSWMESEFRVYSSANNCTFEYVSQPFLMDLEGKQGNFKNLREFVFKNIDGYFKIYSKHTPINLVRDLPQGFSALEPLVDLPIGINITRFQTLLALHRSYLTPGDSSSGWTAGAAAYYVGYLQPRTFLLKYNENGTITDAVDCALDPLSETKCTLKSFTVEKGIYQTSNFRVQPTESIVRFPNITNLCPFGEVFNATRFASVYAWNRKRISNCVADYSVLYNSASFSTFKCYGVSPTKLNDLCFTNVYADSFVIRGDEVRQIAPGQTGKIADYNYKLPDDFTGCVIAWNSNNLDSKVGGNYNYLYRLFRKSNLKPFERDISTEIYQAGSTPCNGVEGFNCYFPLQSYGFQPTNGVGYQPYRVVVLSFELLHAPATVCGPKKSTNLVKNKCVNFNFNGLTGTGVLTESNKKFLPFQQFGRDIADTTDAVRDPQTLEILDITPCSFGGVSVITPGTNTSNQVAVLYQDVNCTEVPVAIHADQLTPTWRVYSTGSNVFQTRAGCLIGAEHVNNSYECDIPIGAGICASYQTQTNSPRRARSVASQSIIAYTMSLGAENSVAYSNNSIAIPTNFTISVTTEILPVSMTKTSVDCTMYICGDSTECSNLLLQYGSFCTQLNRALTGIAVEQDKNTQEVFAQVKQIYKTPPIKDFGGFNFSQILPDPSKPSKRSFIEDLLFNKVTLADAGFIKQYGDCLGDIAARDLICAQKFNGLTVLPPLLTDEMIAQYTSALLAGTITSGWTFGAGAALQIPFAMQMAYRFNGIGVTQNVLYENQKLIANQFNSAIGKIQDSLSSTASALGKLQDVVNQNAQALNTLVKQLSSNFGAISSVLNDILSRLDKVEAEVQIDRLITGRLQSLQTYVTQQLIRAAEIRASANLAATKMSECVLGQSKRVDFCGKGYHLMSFPQSAPHGVVFLHVTYVPAQEKNFTTAPAICHDGKAHFPREGVFVSNGTHWFVTQRNFYEPQIITTDNTFVSGNCDVVIGIVNNTVYDPLQPELDSGGGGSDIIKLLNEQVNKEMQSSNLYMSMSSWCYTHSLDGAGLFLFDHAAEEYEHAKKLIIFLNENNVPVQLTSISAPEHKFEGLTQIFQKAYEHEQHISESINNIVDHAIKSKDHATFNFLQWYVAEQHEEEVLFKDILDKIELIGNENHGLYLADQYVKGIAKSRKS

SEQ ID NO: 8650 - protein, 1311 aa, Artificial Sequence
  SARS-CoV-2/bat/Yunnan/RaTG13/2013__EPI_ISL_402131 spike protein (1-1143) Ferritin construct
MFVFLVLLPLVSSQCVNLTTRTQLPPAYTNSSTRGVYYPDKVFRSSVLHLTQDLFLPFFSNVTWFHAIHVSGTNGIKRFDNPVLPFNDGVYFASTEKSNIIRGWIFGTTLDSKTQSLLIVNNATNVVIKVCEFQFCNDPFLGVYYHKNNKSWMESEFRVYSSANNCTFEYVSQPFLMDLEGKQGNFKNLREFVFKNIDGYFKIYSKHTPINLVRDLPPGFSALEPLVDLPIGINITRFQTLLALHRSYLTPGDSSSGWTAGAAAYYVGYLQPRTFLLKYNENGTITDAVDCALDPLSETKCTLKSFTVEKGIYQTSNFRVQPTDSIVRFPNITNLCPFGEVFNATTFASVYAWNRKRISNCVADYSVLYNSTSFSTFKCYGVSPTKLNDLCFTNVYADSFVITGDEVRQIAPGQTGKIADYNYKLPDDFTGCVIAWNSKHIDAKEGGNFNYLYRLFRKANLKPFERDISTEIYQAGSKPCNGQTGLNCYYPLYRYGFYPTDGVGHQPYRVVVLSFELLNAPATVCGPKKSTNLVKNKCVNFNFNGLTGTGVLTESNKKFLPFQQFGRDIADTTDAVRDPQTLEILDITPCSFGGVSVITPGTNASNQVAVLYQDVNCTEVPVAIHADQLTPTWRVYSTGSNVFQTRAGCLIGAEHVNNSYECDIPIGAGICASYQTQTNSRSVASQSIIAYTMSLGAENSVAYSNNSIAIPTNFTISVTTEILPVSMTKTSVDCTMYICGDSTECSNLLLQYGSFCTQLNRALTGIAVEQDKNTQEVFAQVKQIYKTPPIKDFGGFNFSQILPDPSKPSKRSFIEDLLFNKVTLADAGFIKQYGDCLGDIAARDLICAQKFNGLTVLPPLLTDEMIAQYTSALLAGTITSGWTFGAGAALQIPFAMQMAYRFNGIGVTQNVLYENQKLIANQFNSAIGKIQDSLSSTASALGKLQDVVNQNAQALNTLVKQLSSNFGAISSVLNDILSRLDKVEAEVQIDRLITGRLQSLQTYVTQQLIRAAEIRASANLAATKMSECVLGQSKRVDFCGKGYHLMSFPQSAPHGVVFLHVTYVPAQEKNFTTAPAICHDGKAHFPREGVFVSNGTHWFVTQRNFYEPQIITTDNTFVSGSCDVVIGIVNNTVYDPLQPELDSGGGGSDIIKLLNEQVNKEMQSSNLYMSMSSWCYTHSLDGAGLFLFDHAAEEYEHAKKLIIFLNENNVPVQLTSISAPEHKFEGLTQIFQKAYEHEQHISESINNIVDHAIKSKDHATFNFLQWYVAEQHEEEVLFKDILDKIELIGNENHGLYLADQYVKGIAKSRKS

SEQ ID NO: 8651 - protein, 1315 aa, Artificial Sequence
  SARS-CoV-2/Wuhan/HBCDC-HB-01/2019__EPI_ISL_402132 spike protein (1-1147) Ferritin construct
MFVFLVLLPLVSSQCVNLTTRTQLPPAYTNSITRGVYYPDKVFRSSVLHSTQDLFLPFFSNVTWFHAIHVSGTNGTKRFDNPVLPFNDGVYFASTEKSNIIRGWIFGTTLDSKTQSLLIVNNATNVVIKVCEFQFCNDPFLGVYYHKNNKSWMESEFRVYSSANNCTFEYVSQPFLMDLEGKQGNFKNLREFVFKNIDGYFKIYSKHTPINLVRDLPQGFSALEPLVDLPIGINITRFQTLLALHRSYLTPGDSSSGWTAGAAAYYVGYLQPRTFLLKYNENGTITDAVDCALDPLSETKCTLKSFTVEKGIYQTSNFRVQPTESIVRFPNITNLCPFGEVFNATRFASVYAWNRKRISNCVADYSVLYNSASFSTFKCYGVSPTKLNDLCFTNVYADSFVIRGDEVRQIAPGQTGKIADYNYKLPDDFTGCVIAWNSNNLDSKVGGNYNYLYRLFRKSNLKPFERDISTEIYQAGSTPCNGVEGFNCYFPLQSYGFQPTNGVGYQPYRVVVLSFELLHAPATVCGPKKSTNLVKNKCVNFNFNGLTGTGVLTESNKKFLPFQQFGRDIADTTDAVRDPQTLEILDITPCSFGGVSVITPGTNTSNQVAVLYQDVNCTEVPVAIHADQLTPTWRVYSTGSNVFQTRAGCLIGAEHVNNSYECDIPIGAGICASYQTQTNSPRRARSVASQSIIAYTMSLGAENSVAYSNNSIAIPTNFTISVTTEILPVSMTKTSVDCTMYICGDSTECSNLLLQYGSFCTQLNRALTGIAVEQDKNTQEVFAQVKQIYKTPPIKDFGGFNFSQILPDPSKPSKRSFIEDLLFNKVTLADAGFIKQYGDCLGDIAARDLICAQKFNGLTVLPPLLTDEMIAQYTSALLAGTITSGWTFGAGAALQIPFAMQMAYRFNGIGVTQNVLYENQKLIANQFNSAIGKIQDSLSSTASALGKLQDVVNQNAQALNTLVKQLSSNFGAISSVLNDILSRLDKVEAEVQIDRLITGRLQSLQTYVTQQLIRAAEIRASANLAATKMSECVLGQSKRVDFCGKGYHLMSFPQSAPHGVVFLHVTYVPAQEKNFTTAPAICHDGKAHFPREGVFVSNGTHWFVTQRNFYEPQIITTDNTFVSGNCDVVIGIVNNTVYDPLQPELDSGGGGSDIIKLLNEQVNKEMQSSNLYMSMSSWCYTHSLDGAGLFLFDHAAEEYEHAKKLIIFLNENNVPVQLTSISAPEHKFEGLTQIFQKAYEHEQHISESINNIVDHAIKSKDHATFNFLQWYVAEQHEEEVLFKDILDKIELIGNENHGLYLADQYVKGIAKSRKS

SEQ ID NO: 8652 - protein, 1315 aa, Artificial Sequence
  SARS-CoV-2/Guangdong/20SF028/2020__EPI_ISL_403936 spike protein (1-1147) Ferritin construct
MFVFLVLLPLVSSQCVNLTTRTQLPPAYTNSFTRGVYYPDKVFRSSVLYSTQDLFLPFFSNVTWFHAIHVSGTNGTKRFDNPVLPFNDGVYFASTEKSNIIRGWIFGTTLDSKTQSLLIVNNATNVVIKVCEFQFCNDPFLGVYYHKNNKSWMESEFRVYSSANNCTFEYVSQPFLMDLEGKQGNFKNLREFVFKNIDGYFKIYSKHTPINLVRDLPQGFSALEPLVDLPIGINITRFQTLLALHRSYLTPGDSSSGWTAGAAAYYVGYLQPRTFLLKYNENGTITDAVDCALDPLSETKCTLKSFTVEKGIYQTSNFRVQPTESIVRFPNITNLCPFGEVFNATRFASVYAWNRKRISNCVADYSVLYNSASFSTFKCYGVSPTKLNDLCFTNVYADSFVIRGDEVRQIAPGQTGKIADYNYKLPDDFTGCVIAWNSNNLDSKVGGNYNYLYRLFRKSNLKPFERDISTEIYQAGSTPCNGVEGFNCYFPLQSYGFQPTNGVGYQPYRVVVLSFELLHAPATVCGPKKSTNLVKNKCVNFNFNGLTGTGVLTESNKKFLPFQQFGRDIADTTDAVRDPQTLEILDITPCSFGGVSVITPGTNTSNQVAVLYQDVNCTEVPVAIHADQLTPTWRVYSTGSNVFQTRAGCLIGAEHVNNSYECDIPIGAGICASYQTQTNSPRRARSVASQSIIAYTMSLGAENSVAYSNNSIAIPTNFTISVTTEILPVSMTKTSVDCTMYICGDSTECSNLLLQYGSFCTQLNRALTGIAVEQDKNTQEVFAQVKQIYKTPPIKDFGGFNFSQILPDPSKPSKRSFIEDLLFNKVTLADAGFIKQYGDCLGDIAARDLICAQKFNGLTVLPPLLTDEMIAQYTSALLAGTITSGWTFGAGAALQIPFAMQMAYRFNGIGVTQNVLYENQKLIANQFNSAIGKIQDSLSSTASALGKLQDVVNQNAQALNTLVKQLSSNFGAISSVLNDILSRLDKVEAEVQIDRLITGRLQSLQTYVTQQLIRAAEIRASANLAATKMSECVLGQSKRVDFCGKGYHLMSFPQSAPHGVVFLHVTYVPAQEKNFTTAPAICHDGKAHFPREGVFVSNGTHWFVTQRNFYEPQIITTDNTFVSGNCDVVIGIVNNTVYDPLQPELDSGGGGSDIIKLLNEQVNKEMQSSNLYMSMSSWCYTHSLDGAGLFLFDHAAEEYEHAKKLIIFLNENNVPVQLTSISAPEHKFEGLTQIFQKAYEHEQHISESINNIVDHAIKSKDHATFNFLQWYVAEQHEEEVLFKDILDKIELIGNENHGLYLADQYVKGIAKSRKS

SEQ ID NO: 8653 - protein, 1315 aa, Artificial Sequence
  SARS-CoV-2/Shenzhen/SZTH-001/2020__EPI_ISL_406592 spike protein (1-1147) Ferritin construct
MFVFLVLLPLVSSQCVNLTTRTQLPPAYTNSFTRGVYYPDKVFRSSVLHSTQDLFLPFFSNVTWFHAIHVSGTNGTKRFDNPVLPFNDGVYFASTEKSNIIRGWIFGTTLDSKTQSLLIVNNATNVVIKVCEFQFCNDPFLGVYYHKNNKSWMESEFRVYSSANNCTFEYVSQPFLMDLEGKQGNFKNLREFVFKNIDGYFKIYSKHTPINLVRDLPQGFSALEPLVDLPIGINITRFQTLLALHRSYLTPGDSSSGWTAGAAAYYVGYLQPRTFLLKYNENGTITDAVDCALDPLSETKCTLKSFTVEKGIYQTSNFRVQPTESIVRFPNITNLCPFGEVFNATRFASVYAWNRKRISNCVADYSVLYNSASFSTFKCYGVSPTKLNDLCFTNVYADSFVIRGDEVRQIAPGQTGKIADYNYKLPDDFTGCVIAWNSNNLDSKVGGNYNYLYRLFRKSNLKPFERDISTEIYQAGSTPCNGVEGFNCYFPLQSYGFQPTNGVGYQPYRVVVLSFELLHAPATVCGPKKSTNLVKNKCVNFNFNGLTGTGVLTESNKKFLPFQQFGRDIADTTDAVRDPQTLEILDITPCSFGGVSVITPGTNTSNQVAVLYQDVNCTEVPVAIHADQLTPTWRVYSTGSNVFQTRAGCLIGAEHVNNSYECDIPIGAGICASYQTQTNSPRRARSVASQSIIAYTMSLGAENSVAYSNNSIAIPTNFTISVTTEILPVSMTKTSVDCTMYICGDSTECSNLLLQYGSFCTQLNRALTGIAVEQDKNTQEVFAQVKQIYKTPPIKDFGGFNFSQILPDPSKPSKRSFIEDLLFNKVTLADAGFIKQYGDCLGDIAARDLICAQKFNGLTVLPPLLTDEMIAQYTSALLAGTITSGWTFGAGAALQIPFAMQMAYRFNGIGVTQNVLYENQKLIANQFNSAIGKIQDSLSSTASALGKLQDVVNQNAQALNTLVKQLSSNFGAISSVLNDILSRLDKVEAEVQIDRLITGRLQSLQTYVTQQLIRAAEIRASANLAATKMSECVLGQSKRVDFCGKGYHLMSFPQSAPHGVVFLHVTYVPAQEKNFTTAPAICHDGKAHFPREGVFVSNGTHWFVTQRNFYEPQIITTDNTFVSGNCDVLIGIVNNTVYDPLQPELDSGGGGSDIIKLLNEQVNKEMQSSNLYMSMSSWCYTHSLDGAGLFLFDHAAEEYEHAKKLIIFLNENNVPVQLTSISAPEHKFEGLTQIFQKAYEHEQHISESINNIVDHAIKSKDHATFNFLQWYVAEQHEEEVLFKDILDKIELIGNENHGLYLADQYVKGIAKSRKS

SEQ ID NO: 8654 - protein, 1315 aa, Artificial Sequence
  SARS-CoV-2/Shenzhen/SZTH-004/2020__EPI_ISL_406595 spike protein (1-1147) Ferritin construct
MFVFLVLLPLVSSQCVNLTTRTQLPPAYTNSFTRGVYYPDKVFRSSVLHSTQDLFLPFFSNVTWFHAIHVSGTNGTKRFDNPVLPFNDGVYFASTEKSNIIRGWIFGTTLDSKTQSLLIVNNATNVVIKVCEFQFCNDPFLGVYYHKNNKSWMESEFRVYSSANNCTFEYVSQPFLMDLEGKQGNFKNLREFVFKNIDGYFKIYSKHTPINLVRDLPQGFSALEPLVDLPIGINITRFQTLLALHRSYLTPGDSSSGWTAGAAAYYVGYLQPRTFLLKYNENGTITDAVDCALDPLSETKCTLKSFTVEKGIYQTSNFRVQPTESIVRFPNITNLCPFGEVFNATRFASVYAWDRKRISNCVAYYSVLYNSASFSTFKCYGVSPTKLNDLCFTNVYADSFVIRGDEVRQIAPGQTGKIADYNYKLPDDFTGCVIAWNSNNLDSKVGGNYNYLYRLFRKSNLKPFERDISTEIYQAGSTPCNGVEGFNCYFPLQSYGFQPTNGVGYQPYRVVVLSFELLHAPATVCGPKKSTNLVKNKCVNFNFNGLTGTGVLTESNKKFLPFQQFGRDIADTTDAVRDPQTLEILDITPCSFGGVSVITPGTNTSNQVAVLYQDVNCTEVPVAIHADQLTPTWRVYSTGSNVFQTRAGCLIGAEHVNNSYECDIPIGAGICASYQTQTNSPRRARSVASQSIIAYTMSLGAENSVAYSNNSIAIPTNFTISVTTEILPVSMTKTSVDCTMYICGDSTECSNLLLQYGSFCTQLNRALTGIAVEQDKNTQEVFAQVKQIYKTPPIKDFGGFNFSQILPDPSKPSKRSFIEDLLFNKVTLADAGFIKQYGDCLGDIAARDLICAQKFNGLTVLPPLLTDEMIAQYTSALLAGTITSGWTFGAGAALQIPFAMQMAYRFNGIGVTQNVLYENQKLIANQFNSAIGKIQDSLSSTASALGKLQDVVNQNAQALNTLVKQLSSNFGAISSVLNDILSRLDKVEAEVQIDRLITGRLQSLQTYVTQQLIRAAEIRASANLAATKMSECVLGQSKRVDFCGKGYHLMSFPQSAPHGVVFLHVTYVPAQEKNFTTAPAICHDGKAHFPREGVFVSNGTHWFVTQRNFYEPQIITTDNTFVSGNCDVVIGIVNNTVYDPLQPELDSGGGGSDIIKLLNEQVNKEMQSSNLYMSMSSWCYTHSLDGAGLFLFDHAAEEYEHAKKLIIFLNENNVPVQLTSISAPEHKFEGLTQIFQKAYEHEQHISESINNIVDHAIKSKDHATFNFLQWYVAEQHEEEVLFKDILDKIELIGNENHGLYLADQYVKGIAKSRKS

SEQ ID NO: 8655 - protein, 1315 aa, Artificial Sequence
  SARS-CoV-2/France/IDF0372/2020__EPI_ISL_406596 spike protein (1-1147) Ferritin construct
MFVFLVLLPLVSSQCVNLTTRTQLPPAYTNSFTRGVYYPDKVFRSSVLHSTQDLFLPFFSNVTWFHAIHVSGTNGTKRFDNPVLPFNDGVYFASTEKSNIIRGWIFGTTLDSKTQSLLIVNNATNVVIKVCEFQFCNDPFLGVYYHKNNKSWMESEFRVYSSANNCTFEYVSQPFLMDLEGKQGNFKNLREFVFKNIDGYFKIYSKHTPINLVRDLPQGFSALEPLVDLPIGINITRFQTLLALHRSYLTPGDSSSGWTAGAAAYYVGYLQPRTFLLKYNENGTITDAVDCALDPLSETKCTLKSFTVEKGIYQTSNFRVQPTESIVRFPNITNLCPFGEVFNATRFASVYAWNRKRISNCVADYSFLYNSASFSTFKCYGVSPTKLNDLCFTNVYADSFVIRGDEVRQIAPGQTGKIADYNYKLPDDFTGCVIAWNSNNLDSKVGGNYNYLYRLFRKSNLKPFERDISTEIYQAGSTPCNGVEGFNCYFPLQSYGFQPTNGVGYQPYRVVVLSFELLHAPATVCGPKKSTNLVKNKCVNFNFNGLTGTGVLTESNKKFLPFQQFGRDIADTTDAVRDPQTLEILDITPCSFGGVSVITPGTNTSNQVAVLYQDVNCTEVPVAIHADQLTPTWRVYSTGSNVFQTRAGCLIGAEHVNNSYECDIPIGAGICASYQTQTNSPRRARSVASQSIIAYTMSLGAENSVAYSNNSIAIPTNFTISVTTEILPVSMTKTSVDCTMYICGDSTECSNLLLQYGSFCTQLNRALTGIAVEQDKNTQEVFAQVKQIYKTPPIKDFGGFNFSQILPDPSKPSKRSFIEDLLFNKVTLADAGFIKQYGDCLGDIAARDLICAQKFNGLTVLPPLLTDEMIAQYTSALLAGTITSGWTFGAGAALQIPFAMQMAYRFNGIGVTQNVLYENQKLIANQFNSAIGKIQDSLSSTASALGKLQDVVNQNAQALNTLVKQLSSNFGAISSVLNDILSRLDKVEAEVQIDRLITGRLQSLQTYVTQQLIRAAEIRASANLAATKMSECVLGQSKRVDFCGKGYHLMSFPQSAPHGVVFLHVTYVPAQEKNFTTAPAICHDGKAHFPREGVFVSNGTHWFVTQRNFYEPQIITTDNTFVSGNCDVVIGIVNNTVYDPLQPELDSGGGGSDIIKLLNEQVNKEMQSSNLYMSMSSWCYTHSLDGAGLFLFDHAAEEYEHAKKLIIFLNENNVPVQLTSISAPEHKFEGLTQIFQKAYEHEQHISESINNIVDHAIKSKDHATFNFLQWYVAEQHEEEVLFKDILDKIELIGNENHGLYLADQYVKGIAKSRKS

SEQ ID NO: 8656 - protein, 1315 aa, Artificial Sequence
  SARS-CoV-2/Australia/VIC01/2020__EPI_ISL_406844 spike protein (1-1147) Ferritin construct
MFVFLVLLPLVSSQCVNLTTRTQLPPAYTNSFTRGVYYPDKVFRSSVLHSTQDLFLPFFSNVTWFHAIHVSGTNGTKRFDNPVLPFNDGVYFASTEKSNIIRGWIFGTTLDSKTQSLLIVNNATNVVIKVCEFQFCNDPFLGVYYHKNNKSWMESEFRVYSSANNCTFEYVSQPFLMDLEGKQGNFKNLREFVFKNIDGYFKIYSKHTPINLVRDLPQGFSALEPLVDLPIGINITRFQTLLALHRRYLTPGDSSSGWTAGAAAYYVGYLQPRTFLLKYNENGTITDAVDCALDPLSETKCTLKSFTVEKGIYQTSNFRVQPTESIVRFPNITNLCPFGEVFNATRFASVYAWNRKRISNCVADYSVLYNSASFSTFKCYGVSPTKLNDLCFTNVYADSFVIRGDEVRQIAPGQTGKIADYNYKLPDDFTGCVIAWNSNNLDSKVGGNYNYLYRLFRKSNLKPFERDISTEIYQAGSTPCNGVEGFNCYFPLQSYGFQPTNGVGYQPYRVVVLSFELLHAPATVCGPKKSTNLVKNKCVNFNFNGLTGTGVLTESNKKFLPFQQFGRDIADTTDAVRDPQTLEILDITPCSFGGVSVITPGTNTSNQVAVLYQDVNCTEVPVAIHADQLTPTWRVYSTGSNVFQTRAGCLIGAEHVNNSYECDIPIGAGICASYQTQTNSPRRARSVASQSIIAYTMSLGAENSVAYSNNSIAIPTNFTISVTTEILPVSMTKTSVDCTMYICGDSTECSNLLLQYGSFCTQLNRALTGIAVEQDKNTQEVFAQVKQIYKTPPIKDFGGFNFSQILPDPSKPSKRSFIEDLLFNKVTLADAGFIKQYGDCLGDIAARDLICAQKFNGLTVLPPLLTDEMIAQYTSALLAGTITSGWTFGAGAALQIPFAMQMAYRFNGIGVTQNVLYENQKLIANQFNSAIGKIQDSLSSTASALGKLQDVVNQNAQALNTLVKQLSSNFGAISSVLNDILSRLDKVEAEVQIDRLITGRLQSLQTYVTQQLIRAAEIRASANLAATKMSECVLGQSKRVDFCGKGYHLMSFPQSAPHGVVFLHVTYVPAQEKNFTTAPAICHDGKAHFPREGVFVSNGTHWFVTQRNFYEPQIITTDNTFVSGNCDVVIGIVNNTVYDPLQPELDSGGGGSDIIKLLNEQVNKEMQSSNLYMSMSSWCYTHSLDGAGLFLFDHAAEEYEHAKKLIIFLNENNVPVQLTSISAPEHKFEGLTQIFQKAYEHEQHISESINNIVDHAIKSKDHATFNFLQWYVAEQHEEEVLFKDILDKIELIGNENHGLYLADQYVKGIAKSRKS

SEQ ID NO: 8657 - protein, 1315 aa, Artificial Sequence
  SARS-CoV-2/Germany/BavPat1/2020__EPI_ISL_406862 spike protein (1-1147) Ferritin construct
MFVFLVLLPLVSSQCVNLTTRTQLPPAYTNSFTRGVYYPDKVFRSSVLHSTQDLFLPFFSNVTWFHAIHVSGTNGTKRFDNPVLPFNDGVYFASTEKSNIIRGWIFGTTLDSKTQSLLIVNNATNVVIKVCEFQFCNDPFLGVYYHKNNKSWMESEFRVYSSANNCTFEYVSQPFLMDLEGKQGNFKNLREFVFKNIDGYFKIYSKHTPINLVRDLPQGFSALEPLVDLPIGINITRFQTLLALHRSYLTPGDSSSGWTAGAAAYYVGYLQPRTFLLKYNENGTITDAVDCALDPLSETKCTLKSFTVEKGIYQTSNFRVQPTESIVRFPNITNLCPFGEVFNATRFASVYAWNRKRISNCVADYSVLYNSASFSTFKCYGVSPTKLNDLCFTNVYADSFVIRGDEVRQIAPGQTGKIADYNYKLPDDFTGCVIAWNSNNLDSKVGGNYNYLYRLFRKSNLKPFERDISTEIYQAGSTPCNGVEGFNCYFPLQSYGFQPTNGVGYQPYRVVVLSFELLHAPATVCGPKKSTNLVKNKCVNFNFNGLTGTGVLTESNKKFLPFQQFGRDIADTTDAVRDPQTLEILDITPCSFGGVSVITPGTNTSNQVAVLYQGVNCTEVPVAIHADQLTPTWRVYSTGSNVFQTRAGCLIGAEHVNNSYECDIPIGAGICASYQTQTNSPRRARSVASQSIIAYTMSLGAENSVAYSNNSIAIPTNFTISVTTEILPVSMTKTSVDCTMYICGDSTECSNLLLQYGSFCTQLNRALTGIAVEQDKNTQEVFAQVKQIYKTPPIKDFGGFNFSQILPDPSKPSKRSFIEDLLFNKVTLADAGFIKQYGDCLGDIAARDLICAQKFNGLTVLPPLLTDEMIAQYTSALLAGTITSGWTFGAGAALQIPFAMQMAYRFNGIGVTQNVLYENQKLIANQFNSAIGKIQDSLSSTASALGKLQDVVNQNAQALNTLVKQLSSNFGAISSVLNDILSRLDKVEAEVQIDRLITGRLQSLQTYVTQQLIRAAEIRASANLAATKMSECVLGQSKRVDFCGKGYHLMSFPQSAPHGVVFLHVTYVPAQEKNFTTAPAICHDGKAHFPREGVFVSNGTHWFVTQRNFYEPQIITTDNTFVSGNCDVVIGIVNNTVYDPLQPELDSGGGGSDIIKLLNEQVNKEMQSSNLYMSMSSWCYTHSLDGAGLFLFDHAAEEYEHAKKLIIFLNENNVPVQLTSISAPEHKFEGLTQIFQKAYEHEQHISESINNIVDHAIKSKDHATFNFLQWYVAEQHEEEVLFKDILDKIELIGNENHGLYLADQYVKGIAKSRKS

SEQ ID NO: 8658 - protein, 1315 aa, Artificial Sequence
  SARS-CoV-2/Wuhan/HBCDC-HB-02/2020__EPI_ISL_412978 spike protein (1-1147) Ferritin construct
MFVFLVLLPLVSSQCVNLTTRTQLPPAYTNSFTRGVYYPDKVFRSSVLHSTQDLFLPFFSNVTWFHAIHVSGTNGTKRFDNPVLPFNDGVYFASTEKSNIIRGWIFGTTLDSKTQSLLIVNNATNVVIKVCEFQFCNDPFLGVYYHKNNKSWMESEFRVYSSANNCTFEYVSQPFLMDLEGKQGNFKNLREFVFKNIDGYFKIYSKHTPINLVRDLPQGFSALEPLVDLPIGINITRFQTLLALHRSYLTPGDSSSGWTAGAAAYYVGYLQPRTFLLKYNENGTITDAVDCALDPLSETKCTLKSFTVEKGIYQTSNFRVQPTESIVRFPNITNLCPFGEVFNATRFASVYAWNRKRISNCVADYSVLYNSASFSTFKCYGVSPTKLNDLCFTNVYADSFVIRGDEVRQIAPGQTGKIADYNYKLPDDFTGCVIAWNSNNLDSKVGGNYNYLYRLFRKSNLKPFERDISTEIYQAGSTPCNGVEGFNCYFPLQSYGFQPTNGVGYQPYRVVVLSFELLHAPATVCGPKKSTNLVKNKCVNFNFNGLTGTGVLTESNKKFLPFQQFGRDIADTTDAVRDPQTLEILDITPCSFGGVSVITPGTNTSNQVAVLYQDVNCTEVPVAIHADQLTPTWRVYSTGSNVFQTRAGCLIGAEHVNNSYECDIPIGAGICASYQTQTNSPRRARSVASQSIIAYTMSLGAENSVAYSNNSIAIPTNFTISVTTEILPVSMTKTSVDCTMYICGDSTECSNFLLQYGSFCTQLNRALTGIAVEQDKNTQEVFAQVKQIYKTPPIKDFGGFNFSQILPDPSKPSKRSFIEDLLFNKVTLADAGFIKQYGDCLGDIAARDLICAQKFNGLTVLPPLLTDEMIAQYTSALLAGTITSGWTFGAGAALQIPFAMQMAYRFNGIGVTQNVLYENQKLIANQFNSAIGKIQDSLSSTASALGKLQDVVNQNAQALNTLVKQLSSNFGAISSVLNDILSRLDKVEAEVQIDRLITGRLQSLQTYVTQQLIRAAEIRASANLAATKMSECVLGQSKRVDFCGKGYHLMSFPQSAPHGVVFLHVTYVPAQEKNFTTAPAICHDGKAHFPREGVFVSNGTHWFVTQRNFYEPQIITTDNTFVSGNCDVVIGIVNNTVYDPLQPELDSGGGGSDIIKLLNEQVNKEMQSSNLYMSMSSWCYTHSLDGAGLFLFDHAAEEYEHAKKLIIFLNENNVPVQLTSISAPEHKFEGLTQIFQKAYEHEQHISESINNIVDHAIKSKDHATFNFLQWYVAEQHEEEVLFKDILDKIELIGNENHGLYLADQYVKGIAKSRKS

SEQ ID NO: 8659 - protein, 1315 aa, Artificial Sequence
  SARS-CoV-2/Australia/QLD02/2020__EPI_ISL_407896 spike protein (1-1147) Ferritin construct
MFVFLVLLPLVSSQCVNLTTRTQLPPAYTNSFTRGVYYPDKVFRSSVLHSTQDLFLPFFSNVTWFHAIHVSGTNGTKRFDNPVLPFNDGVYFASTEKSNIIRGWIFGTTLDSKTQSLLIVNNATNVVIKVCEFQFCNDPFLGVYYHKNNKSWMESEFRVYSSANNCTFEYVSQPFLMDLEGKQGNFKNLREFVFKNIDGYFKIYSKHTPINLVRDLPQGFSALEPLVDLPIGINITRFQTLLALHRSYLTPGDSSSGWTAGAAAYYVGYLQPRTFLLKYNENGTITDAVDCALDPLSETKCTLKSFTVEKGIYQTSNFRVQPTESIVRFPNITNLCPFGEVFNATRFASVYAWNRKRISNCVADYSVLYNSASFSTFKCYGVSPTKLNDLCFTNVYADSFVIRGDEVRQIAPGQTGKIADYNYKLPDDFTGCVIAWNSNNLDSKVGGNYNYLYRLFRKSNLKPFERDISTEIYQAGSTPCNGVEGFNCYFPLQSYGFQPTNGVGYQPYRVVVLSFELLHAPATVCGPKKSTNLVKNKCVNFNFNGLTGTGVLTESNKKFLPFQQFGRDIADTTDAVRDPQTLEILDITPCSFGGVSVITPGTNTSNQVAVLYQDVNCTEVPVAIHADQLTPTWRVYSTGSNVFQTRAGCLIGAEHVNNSYECDIPIGAGICASYQTQTNSPRRARSVASQSIIAYTMSLGAENSVAYSNNSIAIPTNFTISVTTEILPVSMTKTSVDCTMYICGDSTECSNLLLQYGSFCTQLNRALTGIAVEQDKNTQEVFAQVKQIYKTPPIKDFGGFNFSQILPDPSKPSKRSFIEDLLFNKVTLADAGFIKQYGDCLGDIAARDLICAQKFNGLTVLPPLLTDEMIAQYTSALLAGTITSGWTFGAGAALQIPFAMQMAYRFNGIGVTQNVLYENQKLIANQFNSAIGKIQDSLSSTASALGKLQDVVNQNAQALNTLVKQLSSNFGAISSVLNDILSRLDKVEAEVQIDRLITGRLQSLQTYVTQQLIRAAEIRASANLAATKMSECVLGQSKRVDFCGKGYHLMSFPQSAPHGVVFLHVTYVPAQEKNFTTAPAICHDGKAHFPREGVFVSNGTHWFVTQRNFYEPQIITTDNTFVSGNCDVVIGIVNNTVYDPLQLELDSGGGGSDIIKLLNEQVNKEMQSSNLYMSMSSWCYTHSLDGAGLFLFDHAAEEYEHAKKLIIFLNENNVPVQLTSISAPEHKFEGLTQIFQKAYEHEQHISESINNIVDHAIKSKDHATFNFLQWYVAEQHEEEVLFKDILDKIELIGNENHGLYLADQYVKGIAKSRKS

SEQ ID NO: 8660 - protein, 1315 aa, Artificial Sequence
  SARS-CoV-2/India/1-31/2020__EPI_ISL_413523 spike protein (1-1147) Ferritin construct
MFVFLVLLPLVSSQCVNLTTRTQLPPAYTNSFTRGVYYPDKVFRSSVLHSTQDLFLPFFSNVTWFHAIHVSGTNGTKRFDNPVLPFNDGVYFASTEKSNIIRGWIFGTTLDSKTQSLLIVNNATNVVIKVCEFQFCNDPFLGVYYHKNNKSWMESEFRVYSSANNCTFEYVSQPFLMDLEGKQGNFKNLREFVFKNIDGYFKIYSKHTPINLVRDLPQGFSALEPLVDLPIGINITRFQTLLALHRSYLTPGDSSSGWTAGAAAYYVGYLQPRTFLLKYNENGTITDAVDCALDPLSETKCTLKSFTVEKGIYQTSNFRVQPTESIVRFPNITNLCPFGEVFNATRFASVYAWNRKRISNCVADYSVLYNSASFSTFKCYGVSPTKLNDLCFTNVYADSFVIRGDEVRQIAPGQTGKIADYNYKLPDDFTGCVIAWNSNNLDSKVGGNYNYLYRLFRKSNLKPFERDISTEIYQAGSTPCNGVEGFNCYFPLQSYGFQPTNGVGYQPYRVVVLSFELLHAPATVCGPKKSTNLVKNKCVNFNFNGLTGTGVLTESNKKFLPFQQFGRDIADTTDAVRDPQTLEILDITPCSFGGVSVITPGTNTSNQVAVLYQDVNCTEVPVAIHADQLTPTWRVYSTGSNVFQTRAGCLIGAEHVNNSYECDIPIGAGICASYQTQTNSPRRARSVASQSIIAYTMSLGAENSVAYSNNSIAIPTNFTISVTTEILPVSMTKTSVDCTMYICGDSTECSNLLLQYGSFCTQLNRALTGIAVEQDKNTQEVFAQVKQIYKTPPIKDFGGFNFSQILPDPSKPSKRSFIEDLLFNKVTLADAGFIKQYGDCLGDIAARDLICAQKFNGLTVLPPLLTDEMIAQYTSALLAGTITSGWTFGAGAALQIPFAMQMAYRFNGIGVTQNVLYENQKLIANQFNSVIGKIQDSLSSTASALGKLQDVVNQNAQALNTLVKQLSSNFGAISSVLNDILSRLDKVEAEVQIDRLITGRLQSLQTYVTQQLIRAAEIRASANLAATKMSECVLGQSKRVDFCGKGYHLMSFPQSAPHGVVFLHVTYVPAQEKNFTTAPAICHDGKAHFPREGVFVSNGTHWFVTQRNFYEPQIITTDNTFVSGNCDVVIGIVNNTVYDPLQPELDSGGGGSDIIKLLNEQVNKEMQSSNLYMSMSSWCYTHSLDGAGLFLFDHAAEEYEHAKKLIIFLNENNVPVQLTSISAPEHKFEGLTQIFQKAYEHEQHISESINNIVDHAIKSKDHATFNFLQWYVAEQHEEEVLFKDILDKIELIGNENHGLYLADQYVKGIAKSRKS

SEQ ID NO: 8661 - protein, 1315 aa, Artificial Sequence
  SARS-CoV-2/Guangdong/GD2020087-P0008/2020__EPI_ISL_413863 spike protein (1-1147) Ferritin construct
MFVFLVLLPLVSSQCVNLTTRTQLPPAYTNSFTRGVYYPDKVFRSSVLHSTQDLFLPFFSNVTWFHAIHVSGTNGTKRFDNPVLPFNDGVYFASTEKSNIIRGWIFGTTLDSKTQSLLIVNNATNVVIKVCEFQFCNDPFLGVYYHKNNKSWMESEFRVYSSANNCTFEYVSQPFLMDLEGKQGNFKNLREFVFKNIDGYFKIYSKHTPINLVRDLPQGFSALEPLVDLPIGINITRFQTLLALHRSYLTPGDSSSGWTAGAAAYYVGYLQPRTFLLKYNENGTITDAVDCALDPLSETKCTLKSFTVEKGIYQTSNFRVQPTESIVRFPNITNLCPFGEVFNATRFASVYAWNRKRISNCVADYSVLYNSASFSTFKCYGVSPTKLNDLCFTNVYADSFVIRGDEVREIAPGQTGKIADYNYKLPDDFTGCVIAWNSNNLDSKVGGNYNYLYRLFRKSNLKPFERDISTEIYQAGSTPCNGVEGFNCYFPLQSYGFQPTNGVGYQPYRVVVLSFELLHAPATVCGPKKSTNLVKNKCVNFNFNGLTGTGVLTESNKKFLPFQQFGRDIADTTDAVRDPQTLEILDITPCSFGGVSVITPGTNTSNQVAVLYQDVNCTEVPVAIHADQLTPTWRVYSTGSNVFQTRAGCLIGAEHVNNSYECDIPIGAGICASYQTQTNSPRRARSVASQSIIAYTMSLGAENSVAYSNNSIAIPTNFTISVTTEILPVSMTKTSVDCTMYICGDSTECSNLLLQYGSFCTQLNRALTGIAVEQDKNTQEVFAQVKQIYKTPPIKDFGGFNFSQILPDPSKPSKRSFIEDLLFNKVTLADAGFIKQYGDCLGDIAARDLICAQKFNGLTVLPPLLTDEMIAQYTSALLAGTITSGWTFGAGAALQIPFAMQMAYRFNGIGVTQNVLYENQKLIANQFNSAIGKIQDSLSSTASALGKLQDVVNQNAQALNTLVKQLSSNFGAISSVLNDILSRLDKVEAEVQIDRLITGRLQSLQTYVTQQLIRAAEIRASANLAATKMSECVLGQSKRVDFCGKGYHLMSFPQSAPHGVVFLHVTYVPAQEKNFTTAPAICHDGKAHFPREGVFVSNGTHWFVTQRNFYEPQIITTDNTFVSGNCDVVIGIVNNTVYDPLQPELDSGGGGSDIIKLLNEQVNKEMQSSNLYMSMSSWCYTHSLDGAGLFLFDHAAEEYEHAKKLIIFLNENNVPVQLTSISAPEHKFEGLTQIFQKAYEHEQHISESINNIVDHAIKSKDHATFNFLQWYVAEQHEEEVLFKDILDKIELIGNENHGLYLADQYVKGIAKSRKS

SEQ ID NO: 8662 - protein, 1315 aa, Artificial Sequence
  SARS-CoV-2/Sweden/01/2020__EPI_ISL_411951 spike protein (1-1147) Ferritin construct
MFVFLVLLPLVSSQCVNLTTRTQLPPAYTNSFTRGVYYPDKVFRSSVLHSTQDLFLPFFSNVTWFHAIHVSGTNGTKRFDNPVLPFNDGVYFASTEKSNIIRGWIFGTTLDSKTQSLLIVNNATNVVIKVCEFQFCNDPFLGVYYHKNNKSWMESEFRVYSSANNCTFEYVSQPFLMDLEGKQGNFKNLREFVFKNIDGYFKIYSKHTPINLVRDLPQGFSALEPLVDLPIGINITRFQTLLALHRSYLTPGDSSSGWTAGAAAYYVGYLQPRTFLLKYNENGTITDAVDCALDPLSETKCTLKSFTVEKGIYQTSNFRVQPTESIVRFPNITNLCPFGEVFNATRFASVYAWNRKRISNCVADYSVLYNSASFSTFKCYGVSPTKLNDLCFTNVYADSFVIRGDEVRQIAPGQTGKIADYNYKLPDDFTGCVIAWNSNNLDSKVGGNYNYLYRLFRKSNLKPFERDISTEIYQAGSTPCNGVEGFNCYFPLQSYGFQPTNGVGYQPYRVVVLSFELLHAPATVCGPKKSTNLVKNKCVNFNFNGLTGTGVLTESNKKFLPFQQFGRDIADTTDAVRDPQTLEILDITPCSFGGVSVITPGTNTSNQVAVLYQDVNCTEVPVAIHADQLTPTWRVYSTGSNVFQTRAGCLIGAEHVNNSYECDIPIGAGICASYQTQTNSPRRARSVASQSIIAYTMSLGAENSVAYSNNSIAIPTNFTISVTTEILPVSMTKTSVDCTMYICGDSTECSNLLLQYGSFCTQLNRALTGIAVEQDKNTQEVFAQVKQIYKTPPIKDCGGFNFSQILPDPSKPSKRSFIEDLLFNKVTLADAGFIKQYGDCLGDIAARDLICAQKFNGLTVLPPLLTDEMIAQYTSALLAGTITSGWTFGAGAALQIPFAMQMAYRFNGIGVTQNVLYENQKLIANQFNSAIGKIQDSLSSTASALGKLQDVVNQNAQALNTLVKQLSSNFGAISSVLNDILSRLDKVEAEVQIDRLITGRLQSLQTYVTQQLIRAAEIRASANLAATKMSECVLGQSKRVDFCGKGYHLMSFPQSAPHGVVFLHVTYVPAQEKNFTTAPAICHDGKAHFPREGVFVSNGTHWFVTQRNFYEPQIITTDNTFVSGNCDVVIGIVNNTVYDPLQPELDSGGGGSDIIKLLNEQVNKEMQSSNLYMSMSSWCYTHSLDGAGLFLFDHAAEEYEHAKKLIIFLNENNVPVQLTSISAPEHKFEGLTQIFQKAYEHEQHISESINNIVDHAIKSKDHATFNFLQWYVAEQHEEEVLFKDILDKIELIGNENHGLYLADQYVKGIAKSRKS

SEQ ID NO: 8663 - protein, 1315 aa, Artificial Sequence
  SARS-CoV-2/Tianmen/HBCDC-HB-07/2020__EPI_ISL_412983 spike protein (1-1147) Ferritin construct
MFVFLVLLPLVSSQCVNLTTRTQLPPAYTNSFTRGVYYPDKVFRSSVLHSTQDLFLPFFSNVTWFHAIHVSGTNGTKRFDNPVLPFNDGVYFASTEKSNIIRGWIFGTTLDSKTQSLLIVNNATNVVIKVCEFQFCNDPFLGVYYHKNNKSWMESEFRVYSSANNCTFEYVSQPFLMDLEGKQGNFKNLREFVFKNIDGYFKIYSKHTPINLVRDLPQGFSALEPLVDLPIGINITRFQTLLALHRSYLTPGDSSSGWTAGAAAYYVGYLQPRTFLLKYNENGTITDAVDCALDPLSETKCTLKSFTVEKGIYQTSNFRVQPTESIVRFPNITNLCPFGEVFNATRFASVYAWNRKRISNCVADYSVLYNSASFSTFKCYGVSPTKLNDLCFTNVYADSFVIRGDEVRQIAPGQTGKIADYNYKLPDDFTGCVIAWNSNNLDSKVGGNYNYLYRLFRKSNLKPFERDISTEIYQAGSTPCNGVEGFNCYFPLQSYGFQPTNGVGYQPYRVVVLSFELLHAPATVCGPKKSTNLVKNKCVNFNFNGLTGTGVLTESNKKFLPFQQFGRDIADTTDAVRDPQTLEILDITPCSFGGVSVITPGTNTSNQVAVLYQDLNCTEVPVAIHADQLTPTWRVYSTGSNVFQTRAGCLIGAEHVNNSYECDIPIGAGICASYQTQTNSPRRARSVASQSIIAYTMSLGAENSVAYSNNSIAIPTNFTISVTTEILPVSMTKTSVDCTMYICGDSTECSNLLLQYGSFCTQLNRALTGIAVEQDKNTQEVFAQVKQIYKTPPIKDFGGFNFSQILPDPSKPSKRSFIEDLLFNKVTLADAGFIKQYGDCLGDIAARDLICAQKFNGLTVLPPLLTDEMIAQYTSALLAGTITSGWTFGAGAALQIPFAMQMAYRFNGIGVTQNVLYENQKLIANQFNSAIGKIQDSLSSTASALGKLQDVVNQNAQALNTLVKQLSSNFGAISSVLNDILSRLDKVEAEVQIDRLITGRLQSLQTYVTQQLIRAAEIRASANLAATKMSECVLGQSKRVDFCGKGYHLMSFPQSAPHGVVFLHVTYVPAQEKNFTTAPAICHDGKAHFPREGVFVSNGTHWFVTQRNFYEPQIITTDNTFVSGNCDVVIGIVNNTVYDPLQPELDSGGGGSDIIKLLNEQVNKEMQSSNLYMSMSSWCYTHSLDGAGLFLFDHAAEEYEHAKKLIIFLNENNVPVQLTSISAPEHKFEGLTQIFQKAYEHEQHISESINNIVDHAIKSKDHATFNFLQWYVAEQHEEEVLFKDILDKIELIGNENHGLYLADQYVKGIAKSRKS

SEQ ID NO: 8664 - protein, 1315 aa, Artificial Sequence
  SARS-CoV-2/Hong Kong/case42_VM20002493/2020__EPI_ISL_414527 spike protein (1-1147) Ferritin construct
MFVFLVLLPLVSSQCVNLTTRTQLPPAYTNSFTRGVYYPDKVFRSSVLHSTQDLFLPFFSNVTWFHAIHVSGTNGTKRFDNPVLPFNDGVYFASTEKSNIIRGWIFGTTLDSKTQSLLIVNNATNVVIKVCEFQFCNDPFLGVYYHKNNKSWMESEFRVYSSANNCTFEYVSQPFLMDLEGKQGNFKNLREFVFKNIDGYFKIYSKHTPINLVRDLPQGFSALEPLVDLPIGINITRFQTLLALHRSYLTPGDSSSGWTAGAAAYYVGYLQPRTFLLKYNENGTITDAVDCALDPLSETKCTLKSFTVEKGIYQTSNFRVQPTESIVRFPNITNLCPFGEVFNATRFASVYAWNRKRISNCVADYSVLYNSASFSTFKCYGVSPTKLNDLCFTNVYADSFVIRGDEVRQIAPGQTGKIADYNYKLPDDFTGCVIAWNSNNLDSKVGGNYNYLYRLFRKSNLKPFERDISTEIYQAGSTPCNGVEGFNCYFPLQSYGFQPTNGVGYQPYRVVVLSFELLHAPATVCGPKKSTNLVKNKCVNFNFNGLTGTGVLTESNKKFLPFQQFGRDIADTTDAVRDPQTLEILDITPCSFGGVSVITPGTNTSNQVAVLYQDVNCTEVPVAIHADQLTPTWRVYSTGSNVFQTRAGCLIGAEHVNNSYECDIPIGAGICASYQTQTNSPRRARSVASQSIIAYTMSLGAENSVAYSNNSIAIPTNFAISVTTEILPVSMTKTSVDCTMYICGDSTECSNLLLQYGSFCTQLNRALTGIAVEQDKNTQEVFAQVKQIYKTPPIKDFGGFNFSQILPDPSKPSKRSFIEDLLFNKVTLADAGFIKQYGDCLGDIAARDLICAQKFNGLTVLPPLLTDEMIAQYTSALLAGTITSGWTFGAGAALQIPFAMQMAYRFNGIGVTQNVLYENQKLIANQFNSAIGKIQDSLSSTASALGKLQDVVNQNAQALNTLVKQLSSNFGAISSVLNDILSRLDKVEAEVQIDRLITGRLQSLQTYVTQQLIRAAEIRASANLAATKMSECVLGQSKRVDFCGKGYHLMSFPQSAPHGVVFLHVTYVPAQEKNFTTAPAICHDGKAHFPREGVFVSNGTHWFVTQRNFYEPQIITTDNTFVSGNCDVVIGIVNNTVYDPLQPELDSGGGGSDIIKLLNEQVNKEMQSSNLYMSMSSWCYTHSLDGAGLFLFDHAAEEYEHAKKLIIFLNENNVPVQLTSISAPEHKFEGLTQIFQKAYEHEQHISESINNIVDHAIKSKDHATFNFLQWYVAEQHEEEVLFKDILDKIELIGNENHGLYLADQYVKGIAKSRKS

SEQ ID NO: 8665 - protein, 1315 aa, Artificial Sequence
  SARS-CoV-2/USA/CruiseA-23/2020__EPI_ISL_414482 spike protein (1-1147) Ferritin construct
MFVFLVLLPLVSSQCVNLTTRTQLPPAYTNSFTRGVYYPDKVFRSSVLHSTQDLFLPFFSNVTWFHAIHVSGTNGTKRFDNPVLPFNDGVYFASTEKSNIIRGWIFGTTLDSKTQSLLIVNNATNVVIKVCEFQFCNDPFLGVYYHKNNKSWMESEFRVYSSANNCTFEYVSQPFLMDLEVKQGNFKNLREFVFKNIDGYFKIYSKHTPINLVRDLPQGFSALEPLVDLPIGINITRFQTLLALHRSYLTPGDSSSGWTAGAAAYYVGYLQPRTFLLKYNENGTITDAVDCALDPLSETKCTLKSFTVEKGIYQTSNFRVQPTESIVRFPNITNLCPFGEVFNATRFASVYAWNRKRISNCVADYSVLYNSASFSTFKCYGVSPTKLNDLCFTNVYADSFVIRGDEVRQIAPGQTGKIADYNYKLPDDFTGCVIAWNSNNLDSKVGGNYNYLYRLFRKSNLKPFERDISTEIYQAGSTPCNGVEGFNCYFPLQSYGFQPTNGVGYQPYRVVVLSFELLHAPATVCGPKKSTNLVKNKCVNFNFNGLTGTGVLTESNKKFLPFQQFGRDIADTTDAVRDPQTLEILDITPCSFGGVSVITPGTNTSNQVAVLYQDVNCTEVPVAIHADQLTPTWRVYSTGSNVFQTRAGCLIGAEHVNNSYECDIPIGAGICASYQTQTNSPRRARSVASQSIIAYTMSLGAENSVAYSNNSIAIPTNFTISVTTEILPVSMTKTSVDCTMYICGDSTECSNLLLQYGSFCTQLNRALTGIAVEQDKNTQEVFAQVKQIYKTPPIKDFGGFNFSQILPDPSKPSKRSFIEDLLFNKVTLADAGFIKQYGDCLGDIAARDLICAQKFNGLTVLPPLLTDEMIAQYTSALLAGTITSGWTFGAGAALQIPFAMQMAYRFNGIGVTQNVLYENQKLIANQFNSAIGKIQDSLSSTASALGKLQDVVNQNAQALNTLVKQLSSNFGAISSVLNDILSRLDKVEAEVQIDRLITGRLQSLQTYVTQQLIRAAEIRASANLAATKMSECVLGQSKRVDFCGKGYHLMSFPQSAPHGVVFLHVTYVPAQEKNFTTAPAICHDGKAHFPREGVFVSNGTHWFVTQRNFYEPQIITTDNTFVSGNCDVVIGIVNNTVYDPLQPELDSGGGGSDIIKLLNEQVNKEMQSSNLYMSMSSWCYTHSLDGAGLFLFDHAAEEYEHAKKLIIFLNENNVPVQLTSISAPEHKFEGLTQIFQKAYEHEQHISESINNIVDHAIKSKDHATFNFLQWYVAEQHEEEVLFKDILDKIELIGNENHGLYLADQYVKGIAKSRKS

SEQ ID NO: 8666 - protein, 1315 aa, Artificial Sequence
  SARS-CoV-2/Hong Kong/case85_VM20002868/2020__EPI_ISL_414519 spike protein (1-1147) Ferritin construct
MFVFLVLVPLVSSQCVNLTTRTQLPPAYTNSFTRGVYYPDKVFRSSVLHSTQDLFLPFFSNVTWFHAIHVSGTNGTKRFDNPVLPFNDGVYFASTEKSNIIRGWIFGTTLDSKTQSLLIVNNATNVVIKVCEFQFCNDPFLGVYYHKNNKSWMESEFRVYSSANNCTFEYVSQPFLMDLEGKQGNFKNLREFVFKNIDGYFKIYSKHTPINLVRDLPQGFSALEPLVDLPIGINITRFQTLLALHRSYLTPGDSSSGWTAGAAAYYVGYLQPRTFLLKYNENGTITDAVDCALDPLSETKCTLKSFTVEKGIYQTSNFRVQPTESIVRFPNITNLCPFGEVFNATRFASVYAWNRKRISNCVADYSVLYNSASFSTFKCYGVSPTKLNDLCFTNVYADSFVIRGDEVRQIAPGQTGKIADYNYKLPDDFTGCVIAWNSNNLDSKVGGNYNYLYRLFRKSNLKPFERDISTEIYQAGSTPCNGVEGFNCYFPLQSYGFQPTNGVGYQPYRVVVLSFELLHAPATVCGPKKSTNLVKNKCVNFNFNGLTGTGVLTESNKKFLPFQQFGRDIADTTDAVRDPQTLEILDITPCSFGGVSVITPGTNTSNQVAVLYQDVNCTEVPVAIHADQLTPTWRVYSTGSNVFQTRAGCLIGAEHVNNSYECDIPIGAGICASYQTQTNSPRRARSVASQSIIAYTMSLGAENSVAYSNNSIAIPTNFTISVTTEILPVSMTKTSVDCTMYICGDSTECSNLLLQYGSFCTQLNRALTGIAVEQDKNTQEVFAQVKQIYKTPPIKDFGGFNFSQILPDPSKPSKRSFIEDLLFNKVTLADAGFIKQYGDCLGDIAARDLICAQKFNGLTVLPPLLTDEMIAQYTSALLAGTITSGWTFGAGAALQIPFAMQMAYRFNGIGVTQNVLYENQKLIANQFNSAIGKIQDSLSSTASALGKLQDVVNQNAQALNTLVKQLSSNFGAISSVLNDILSRLDKVEAEVQIDRLITGRLQSLQTYVTQQLIRAAEIRASANLAATKMSECVLGQSKRVDFCGKGYHLMSFPQSAPHGVVFLHVTYVPAQEKNFTTAPAICHDGKAHFPREGVFVSNGTHWFVTQRNFYEPQIITTDNTFVSGNCDVVIGIVNNTVYDPLQPELDSGGGGSDIIKLLNEQVNKEMQSSNLYMSMSSWCYTHSLDGAGLFLFDHAAEEYEHAKKLIIFLNENNVPVQLTSISAPEHKFEGLTQIFQKAYEHEQHISESINNIVDHAIKSKDHATFNFLQWYVAEQHEEEVLFKDILDKIELIGNENHGLYLADQYVKGIAKSRKS

SEQ ID NO: 8667 - protein, 1315 aa, Artificial Sequence; identical to SEQ ID NO: 8657
  SARS-CoV-2/England/200990660/2020__EPI_ISL_414523 spike protein (1-1147) Ferritin construct

SEQ ID NO: 8668 - protein, 1315 aa, Artificial Sequence
  SARS-CoV-2/Australia/NSW09/2020__EPI_ISL_413595 spike protein (1-1147) Ferritin construct
MFVFLVLLPLVSSQCVNLTTRTQLPPAYTNSFTRGVYYPDKVFRSSVLHSTQDLFLPFFSNVTWFHAIHVSGTNGTKRFDNPVLPFNDGVYFASTEKSNIIRGWIFGTTLDSKTQSLLIVNNATNVVIKVCEFQFCNDPFLGVYYHKNNKSWMESEFRVYSSANNCTFEYVSQPFLMDLEGKQGNFKNLREFVFKNIDGYFKIYSKHTPINLVRDLPQGFSALEPLVDLPIGINITRFQTLLALHRSYLTPGDSSSGWTAGAAAYYVGYLQPRTFLLKYNENGTITDAVDCALDPLSETKCTLKSFTVEKGIYQTSNFRVQPTESIVRFPNITNLCPFGEVFNATRFASVYAWNRKRISNCVADYSVLYNSASFSTFKCYGVSPTKLNDLCFTNVYADSFVIRGDEVRQIAPGQTGKIADYNYKLPDDFTGCVIAWNSNNLDSKVGGNYNYLYRLFRKSNLKPFERDISTEIYQAGSTPCNGVEGFNCYFPLQSYGFQPTNGVGYQPYRVVVLSFELLHAPATVCGPKKSTNLVKNKCVNFNFNGLTGTGVLTESNKKFLPFQQFGRDIADTTDAVRDPQTLEILDITPCSFGGVSVITPGTNTSNQVAVLYQDVNCTEVPVAIHADQLTPTWRVYSTGSNVFQTRAGCLIGAEHVNNSYECDIPIGAGICASYQTQTNSPRRARSVASQSIIAYTMSLGAENSVAYSNNSIAIPTNFTISVTTEILPVSMTKTSVDCTMYICGDSTECSNLLLQYGSFCTQLNRALTGIAVEQDKNTQEVFAQVKQIYKTPPIKDFGGFNFSQILPDPSKPSKRSFIEDLLFNKVTLADAGFIKQYGDCLGDIAARDLICAQKFNGLTVLPPLLTDEMIAQYTSALLAGTITSGWTFGAGAALQIPFAMQMAYRFNGIGVTQNVLYENQKLIANQFNSAIGKIQDSLSFTASALGKLQDVVNQNAQALNTLVKQLSSNFGAISSVLNDILSRLDKVEAEVQIDRLITGRLQSLQTYVTQQLIRAAEIRASANLAATKMSECVLGQSKRVDFCGKGYHLMSFPQSAPHGVVFLHVTYVPAQEKNFTTAPAICHDGKAHFPREGVFVSNGTHWFVTQRNFYEPQIITTDNTFVSGNCDVVIGIVNNTVYDPLQPELDSGGGGSDIIKLLNEQVNKEMQSSNLYMSMSSWCYTHSLDGAGLFLFDHAAEEYEHAKKLIIFLNENNVPVQLTSISAPEHKFEGLTQIFQKAYEHEQHISESINNIVDHAIKSKDHATFNFLQWYVAEQHEEEVLFKDILDKIELIGNENHGLYLADQYVKGIAKSRKS

SEQ ID NO: 8669 - protein, 1315 aa, Artificial Sequence; identical to SEQ ID NO: 8649
  SARS-CoV-2/Australia/NSW10/2020__EPI_ISL_413596 spike protein (1-1147) Ferritin construct

SEQ ID NO: 8670 - protein, 1315 aa, Artificial Sequence
  SARS-CoV-2/Switzerland/1000477797/2020__EPI_ISL_413023 spike protein (1-1147) Ferritin construct
MFVFLVLLPLVSSQCVNLTTRTQLPPAYTNSFTRGVYYPDKVFRSSVLHSTQDLFLPFFSNVTWFHAIHVSGTNGTKRFDNPVLPFNDGVYFASTEKSNIIRGWIFGTTLDSKTQSLLIVNNATNVVIKVCEFQFCNDPFLGVYYHKNNKSWMESEFRVYSSANNCTFEYVSQPFLMDLEGKQGNFKNLREFVFKNIDGYFNIYSKHTPINLVRDLPQGFSALEPLVDLPIGINITRFQTLLALHRSYLTPGDSSSGWTAGAAAYYVGYLQPRTFLLKYNENGTITDAVDCALDPLSETKCTLKSFTVEKGIYQTSNFRVQPTESIVRFPNITNLCPFGEVFNATRFASVYAWNRKRISNCVADYSVLYNSASFSTFKCYGVSPTKLNDLCFTNVYADSFVIRGDEVRQIAPGQTGKIADYNYKLPDDFTGCVIAWNSNNLDSKVGGNYNYLYRLFRKSNLKPFERDISTEIYQAGSTPCNGVEGFNCYFPLQSYGFQPTNGVGYQPYRVVVLSFELLHAPATVCGPKKSTNLVKNKCVNFNFNGLTGTGVLTESNKKFLPFQQFGRDIADTTDAVRDPQTLEILDITPCSFGGVSVITPGTNTSNQVAVLYQGVNCTEVPVAIHADQLTPTWRVYSTGSNVFQTRAGCLIGAEHVNNSYECDIPIGAGICASYQTQTNSPRRARSVASQSIIAYTMSLGAENSVAYSNNSIAIPTNFTISVTTEILPVSMTKTSVDCTMYICGDSTECSNLLLQYGSFCTQLNRALTGIAVEQDKNTQEVFAQVKQIYKTPPIKDFGGFNFSQILPDPSKPSKRSFIEDLLFNKVTLADAGFIKQYGDCLGDIAARDLICAQKFNGLTVLPPLLTDEMIAQYTSALLAGTITSGWTFGAGAALQIPFAMQMAYRFNGIGVTQNVLYENQKLIANQFNSAIGKIQDSLSSTASALGKLQDVVNQNAQALNTLVKQLSSNFGAISSVLNDILSRLDKVEAEVQIDRLITGRLQSLQTYVTQQLIRAAEIRASANLAATKMSECVLGQSKRVDFCGKGYHLMSFPQSAPHGVVFLHVTYVPAQEKNFTTAPAICHDGKAHFPREGVFVSNGTHWFVTQRNFYEPQIITTDNTFVSGNCDVVIGIVNNTVYDPLQPELDSGGGGSDIIKLLNEQVNKEMQSSNLYMSMSSWCYTHSLDGAGLFLFDHAAEEYEHAKKLIIFLNENNVPVQLTSISAPEHKFEGLTQIFQKAYEHEQHISESINNIVDHAIKSKDHATFNFLQWYVAEQHEEEVLFKDILDKIELIGNENHGLYLADQYVKGIAKSRKS

SEQ ID NO: 8671 - protein, 1315 aa, Artificial Sequence
  SARS-CoV-2/Belgium/BA-02291/2020__EPI_ISL_415159 spike protein (1-1147) Ferritin construct
MFVFLVLLPLVSSQCVNLTTRTQLPPAYTNSFTRGVYYPDKVFRSSVLHSTQDLFLPFFSNVTWFHAIHVSGTNGTKRFDNPVLPFNDGVYFASTEKSNIIRGWIFGTTLDSKTQSLLIVNNATNVVIKVCEFQFCNDPFLGVYYHKNNKSWMESEFRVYSSANNCTFEYVSQPFLMDLEGKQGNFKNLREFVFKNIDGYFKIYSKHTPINLVRDLPQGFSALEPLVDLPIGINITRFQTLLALHRSYLTPGDSSSGWTAGAAAYYVGYLQPRTFLLKYNENGTITDAVDCALDPLSETKCTLKSFTVEKGIYQTSNFRVQPTESIVRFPNITNLCPFGEVFNATRFASVYAWNRKRISNCVADYSVLYNSASFSTFKCYGVSPTKLNDLCFTNVYADSFVIRGDEVRQIAPGQTGKIADYNYKLPDDFTGCVIAWNSNNLDSKVGGNYNYLYRLFRRSNLKPFERDISTEIYQAGSTPCNGVEGFNCYFPLQSYGFQPTNGVGYQPYRVVVLSFELLPAPATVCGPKKSTNLVKNKCVNFNFNGLTGTGVLTESNKKFLPFQQFGRDIADTTDAVRDPQTLEILDITPCSFGGVSVITPGTNTSNQVAVLYQGVNCTEVPVAIHADQLTPTWRVYSTGSNVFQTRAGCLIGAEHVNNSYECDIPIGAGICASYQTQTNSPRRARSVASQSIIAYTMSLGAENSVAYSNNSIAIPTNFTISVTTEILPVSMTKTSVDCTMYICGDSTECSNLLLQYGSFCTQLNRALTGIAVEQDKNTQEVFAQVKQIYKTPPIKDFGGFNFSQILPDPSKPSKRSFIEDLLFNKVTLADAGFIKQYGDCLGDIAARDLICAQKFNGLTVLPPLLTDEMIAQYTSALLAGTITSGWTFGAGAALQIPFAMQMAYRFNGIGVTQNVLYENQKLIANQFNSAIGKIQDSLSSAAPALGKLQDVVNQNAQALNTLVKQLSSNFGAISSVLNDILSRLDKVEAEVQIDRLITGRLQSLQTYVTQQLIRAAEIRASANLAATKMSECVLGQSKRVDFCGKGYHLMSFPQSAPHGVVFLHVTYVPAQEKNFTTAPAICHDGKAHFPREGVFVSNGTHWFVTQRNFYEPQIITTDNTFVSGNCDVVIGIVNNTVYDPLQPELDSGGGGSDIIKLLNEQVNKEMQSSNLYMSMSSWCYTHSLDGAGLFLFDHAAEEYEHAKKLIIFLNENNVPVQLTSISAPEHKFEGLTQIFQKAYEHEQHISESINNIVDHAIKSKDHATFNFLQWYVAEQHEEEVLFKDILDKIELIGNENHGLYLADQYVKGIAKSRKS

SEQ ID NO: 8672 - protein, 1315 aa, Artificial Sequence
  SARS-CoV-2/USA/WA8-UW5/2020__EPI_ISL_413486 spike protein (1-1147) Ferritin construct
MFVFLVLLPLVSSQCVNLTTRTQLPPAYTNSFTRGVYYPDKVFRSSVLHSTQDLFLPFFSNVTWFHAIHVSGTNGTKRFDNPVLPFNDGVYFASTEKSNIIRGWIFGTTLDSKTQSLLIVNNATNVVIKVCEFQFCNDPFLGVYYHKNNKSWMESEFRVYSSANNCTFEYVSQPFLMDLEGKQGNFKNLREFVFKNIDGYFKIYSKHTPINLVRDLPQGFSALEPLVDLPIGINITRFQTLLALHRSYLTPGDSSSGWTAGAAAYYVGYLQPRTFLLKYNENGTITDAVDCALDPLSETKCTLKSFTVEKGIYQTSNFRVQPTESIVRFPNITNLCPFGEVFNATRFASVYAWNRKRISNCVADYSVLYNSASFSTFKCYGVSPTKLNDLCFTNVYADSFVIRGDEVRQIAPGQTGKIADYNYKLPDDFTGCVIAWNSNNLDSKVGGNYNYLYRLFRKSNLKPFERDISTEIYQAGSTPCNGVEGFNCYFPLQSYGFQPTNGVGYQPYRVVVLSFELLHAPATVCGPKKSTNLVKNKCVNFNFNGLTGTGVLTESNKKFLPFQQFGRDIADTTDAVRDPQTLEILDITPCSFGGVSVITPGTNTSNQVAVLYQDVNCTEVPVAIHADQLTPTWRVYSTGSNVFQTRAGCLIGAEYVNNSYECDIPIGAGICASYQTQTNSPRRARSVASQSIIAYTMSLGAENSVAYSNNSIAIPTNFTISVTTEILPVSMTKTSVDCTMYICGDSTECSNLLLQYGSFCTQLNRALTGIAVEQDKNTQEVFAQVKQIYKTPPIKDFGGFNFSQILPDPSKPSKRSFIEDLLFNKVTLADAGFIKQYGDCLGDIAARDLICAQKFNGLTVLPPLLTDEMIAQYTSALLAGTITSGWTFGAGAALQIPFAMQMAYRFNGIGVTQNVLYENQKLIANQFNSAIGKIQDSLSSTASALGKLQDVVNQNAQALNTLVKQLSSNFGAISSVLNDILSRLDKVEAEVQIDRLITGRLQSLQTYVTQQLIRAAEIRASANLAATKMSECVLGQSKRVDFCGKGYHLMSFPQSAPHGVVFLHVTYVPAQEKNFTTAPAICHDGKAHFPREGVFVSNGTHWFVTQRNFYEPQIITTDNTFVSGNCDVVIGIVNNTVYDPLQPELDSGGGGSDIIKLLNEQVNKEMQSSNLYMSMSSWCYTHSLDGAGLFLFDHAAEEYEHAKKLIIFLNENNVPVQLTSISAPEHKFEGLTQIFQKAYEHEQHISESINNIVDHAIKSKDHATFNFLQWYVAEQHEEEVLFKDILDKIELIGNENHGLYLADQYVKGIAKSRKS

SEQ ID NO: 8673 - protein, 1315 aa, Artificial Sequence
  SARS-CoV-2/England/20102000506/2020__EPI_ISL_415147 spike protein (1-1147) Ferritin construct
MFVFLVLLPLVSSQCVNLTTRTQLPPAYTNSFTRGVYYPDKVFRSSVLHSTQDLFLPFFSNVTWFHAIHVSGTNGTKRFDNPVLPFNDGVYFASTEKSNIIRGWIFGTTLDSKTQSLLIVNNATNVVIKVCEFQFCNDPFLGVYYHKNNKSWMESEFRVYSSANNCTFEYVSQPFLMDLEGKQGNFKNLREFVFKNIDGYFKIYSKHTPINLVRDLPQGFSALEPLVDLPIGINITRFQTLLALHRSYLTPGDSSSGWTAGAAAYYVGYLQPRTFLLKYNENGTITDAVDCALDPLSETKCTLKSFTVEKGIYQTSNFRVQPTESIVRFPNITNLCPFGEVFNATRFASVYAWNRKRISNCVADYSVLYNSASFSTFKCYGVSPTKLNDLCFTNVYADSFVIRGDEVRQIAPGQTGKIADYNYKLPDDFTGCVIAWNSNNLDSKVGGNYNYLYRLFRKSNLKPFERDISTEIYQAGSTPCNGVEGFNCYFPLQSYGFQPTNGVGYQPYRVVVLSFELLHAPATVCGPKKSTNLVKNKCVNFNFNGLTGTGVLTESNKKFLPFQQFGRDIADTTDAVRDPQTLEILDITPCSFGGVSVITPGTNTSNQVAVLYQGVNCTEVPVAIHADQLTPTWRVYSTGSNVFQTRAGCLIGAEHVNNSYECDIPIGAGICASYQTQTNSPRRARSVASQSIIAYTMSLGAENSVAYSNNSIAIPTNFTISVTTEILPVSMTKTSVDCTMYICGDSTECSNLLLQYGSFCTQLNRALTGIAVEQDKNTQEVFAQVKQIYKTPPIKDFGGFNFSQILPDPSKPSKRSFIEDLLFNKVTLADAGFIKQYGYCLGDIAARDLICAQKFNGLTVLPPLLTDEMIAQYTSALLAGTITSGWTFGAGAALQIPFAMQMAYRFNGIGVTQNVLYENQKLIANQFNSAIGKIQDSLSSTASALGKLQDVVNQNAQALNTLVKQLSSNFGAISSVLNDILSRLDKVEAEVQIDRLITGRLQSLQTYVTQQLIRAAEIRASANLAATKMSECVLGQSKRVDFCGKGYHLMSFPQSAPHGVVFLHVTYVPAQEKNFTTAPAICHDGKAHFPREGVFVSNGTHWFVTQRNFYEPQIITTDNTFVSGNCDVVIGIVNNTVYDPLQPELDSGGGGSDIIKLLNEQVNKEMQSSNLYMSMSSWCYTHSLDGAGLFLFDHAAEEYEHAKKLIIFLNENNVPVQLTSISAPEHKFEGLTQIFQKAYEHEQHISESINNIVDHAIKSKDHATFNFLQWYVAEQHEEEVLFKDILDKIELIGNENHGLYLADQYVKGIAKSRKS

SEQ ID NO: 8674 - protein, 1315 aa, Artificial Sequence
  SARS-CoV-2/Belgium/VAG-03013/2020__EPI_ISL_415155 spike protein (1-1147) Ferritin construct
MFVFLVLLPLVSSQCVNLTTRTQLPPAYTNSFTRGVYYPDKVFRSSVLHSTQDLFLPFFSNVTWFHAIHVSGTNGTKRFDNPVLPFNDGVYFASTEKSNIIRGWIFGTTLDSKTQSLLIVNNATNVVIKVCEFQFCNDPFLGVYYHKNNKSWMESEFRVYSSANNCTFEYVSQPFLMDLEGKQGNFKNLREFVFKNIDGYFKIYSKHTPINLVRDLPQGFSALEPLVDLPIGINITRFQTLLALHRSYLTPGDSSSGWTAGAAAYYVGYLQPRTFLLKYNENGTITDAVDCALDPLSETKCTLKSFTVEKGIYQTSNFRVQPTESIVRFPNITNLCPFGEVFNATRFASVYAWNRKRISNCVADYSVLYNSASFSTFKCYGVSPTKLNDLCFTNVYADSFVIRGDEVRQIAPGQTGKIADYNYKLPDDFTGCVIAWNSNNLDSKVGGNYNYLYRLFRKSNLKPFERDISTEIYQAGSTPCNGVEGFNCYFPLQSYGFQPTNGVGYQPYRVVVLSFELLHAPATVCGPKKSTNLVKNKCVNFNFNGLTGTGVLTESNKKFLPFQQFGRDIADTTDAVRDPQTLEILDITPCSFGGVSVITPGTNTSNQVAVLYQGVNCTEVPVAIHADQLTPTWRVYSTGSNVFQTRAGCLIGAEHVNNSYECDIPIGAGICASYQTQTNSPRRARSVASQSIIAYTMSLGAENSVAYSNNSIAIPTNFTISVTTEILPVSMTKTSVDCTMYICGDSTECSNLLLQYGSFCTQLNRALTGIAVEQDKNTQEVFAQVKQIYKTPPIKDFGGFNFSQILPDPSKPSKRSFIEDLLFNKVTLADAGFIKQYGDCLGDIAARDLICAQKFNGLTVLPPLLTDEMIAQYTSALLAGTITSGWTFGAGAALQIPFAMQMAYRFNGIGVTQNVLYENQKLIANQFNSAIGKIQDSLSSTATALGKLQDVVNQNAQALNTLVKQLSSNFGAISSVLNDILSRLDKVEAEVQIDRLITGRLQSLQTYVTQQLIRAAEIRASANLAATKMSECVLGQSKRVDFCGKGYHLMSFPQSAPHGVVFLHVTYVPAQEKNFTTAPAICHDGKAHFPREGVFVSNGTHWFVTQRNFYEPQIITTDNTFVSGNCDVVIGIVNNTVYDPLQPELDSGGGGSDIIKLLNEQVNKEMQSSNLYMSMSSWCYTHSLDGAGLFLFDHAAEEYEHAKKLIIFLNENNVPVQLTSISAPEHKFEGLTQIFQKAYEHEQHISESINNIVDHAIKSKDHATFNFLQWYVAEQHEEEVLFKDILDKIELIGNENHGLYLADQYVKGIAKSRKS

SEQ ID NO: 8675 - protein, 1315 aa, Artificial Sequence
  SARS-CoV-2/Belgium/BC-03016/2020__EPI_ISL_415157 spike protein (1-1147) Ferritin construct
MFVFLVLLPLVSSQCVNLTTRTQLPPAYTNSFTRGVYYPDKVFRSSVLHSTQDLFLPFFSNVTWFHAIHVSGTNGTKRFDNPVLPFNDGVYFASTEKSNIIRGWIFGTTLDSKTQSLLIVNNATNVVIKVCEFQFCNDPFLGVYYHKNNKSWMESEFRVYSSANNCTFEYVSQPFLMDLEGKQGNFKNLREFVFKNIDGYFKIYSKHTPINLVRDLPQGFSALEPLVDLPIGINITRFQTLLALHRSYLTPGDSSSGWTAGAAAYYVGYLQPRTFLLKYNENGTITDAVDCALDPLSETKCTLKSFTVEKGIYQTSNFRVQPTESIVRFPNITNLCPFGEVFNATRFASVYAWNRKRISNCVADYSVLYNSASFSTFKCYGVSPTKLNDLCFTNVYADSFVIRGDEVRQIAPGQTGKIADYNYKLPDDFTGCVIAWNSNNLDSKVGGNYNYLYRLFRKSNLKPFERDISTEIYQAGSTPCNGVEGFNCYFPLQSYGFQPTNGVGYQPYRVVVLSFELLHAPATVCGPKKSTNLVKNKCVNFNFNGLTGTGVLTESNKKFLPFQQFGRDIADTTDAVRDPQTLEILDITPCSFGGVSVITPGTNTSNQVAVLYQGVNCTEVPVAIHADQLTPTWRVYSTGSNVFQTRAGCLIGAEHVNNSYECDIPIGAGICASYQTQTNSPRRARSVASQSIIAYTMSLGAENSVAYSNNSIAIPTNFTISVTTEILPVSMTKTSVDCTMYICGDSTECSNLLLQYGSFCTQLNRALTGIAVEQDKNTQEVFAQVKQIYKTPPIKDFGGFNFSQILPDPSKPSKRSFIEDLLFNKVTLADAGFIKQYGDCLGDIAARDLICAQKFNGLTVLPPLLTDEMIAQYTSALLAGTITSGWTFGAGAALQIPFAMQMAYRFNGIGVTQNVLYENQKLIANQFNSAIGKIQDSLSSTAPALGKLQDVVNQNAQALNTLVKQLSSNFGAISSVLNDILSRLDKVEAEVQIDRLITGRLQSLQTYVTQQLIRAAEIRASANLAATKMSECVLGQSKRVDFCGKGYHLMSFPQSAPHGVVFLHVTYVPAQEKNFTTAPAICHDGKAHFPREGVFVSNGTHWFVTQRNFYEPQIITTDNTFVSGNCDVVIGIVNNTVYDPLQPELDSGGGGSDIIKLLNEQVNKEMQSSNLYMSMSSWCYTHSLDGAGLFLFDHAAEEYEHAKKLIIFLNENNVPVQLTSISAPEHKFEGLTQIFQKAYEHEQHISESINNIVDHAIKSKDHATFNFLQWYVAEQHEEEVLFKDILDKIELIGNENHGLYLADQYVKGIAKSRKS

SEQ ID NO: 8676 - protein, 1315 aa, Artificial Sequence
  SARS-CoV-2/Germany/BavPat3/2020__EPI_ISL_414521 spike protein (1-1147) Ferritin construct
MFVFLVLLPLVSSQCVNLTTRTQLPPAYTNSFTRGVYYPDKVFRSSVLHSTQDLFLPFFSNVTWFHAIHVSGTNGTKRFDNPVLPFNDGVYFASTEKSNIIRGWIFGTTLDSKTQSLLIVNNATNVVIKVCEFQFCNDPFLGVYYHKNNKSWMESEFRVYSSANNCTFEYVSQPFLMDLEGKQGNFKNLREFVFKNIDGYFKIYSKHTPINLVRDLPQGFSALEPLVDLPIGINITRFQTLLALHRSYLTPGDSSSGWTAGAAAYYVGYLQPRTFLLKYNENGTITDAVDCALDPLSETKCTLKSFTVEKGIYQTSNFRVQPTESIVRFPNITNLCPFGEVFNATRFASVYAWNRKRISNCVADYSVLYNSASFSTFKCYGVSPTKLNDLCFTNVYADSFVIRGDEVRQIAPGQTGKIADYNYKLPDDFTGCVIAWNSNNLDSKVGGNYNYLYRLFRKSNLKPFERDISTEIYQAGSTPCNGVEGFNCYFPLQSYGFQPTNGVGYQPYRVVVLSFELLHAPATVCGPKKSTNLVKNKCVNFNFNGLTGTGVLTESNKKFLPFQQFGRDIADTTDAVRDPQTLEILDITPCSFGGVSVITPGTNTSNQVAVLYQDVNCTEVPVAIHADQLTPTWRVYSTGSNVFQTRAGCLIGAEHVNNSYECDIPIGAGICASYQTQTNSPRRARSVASQSIIAYTMSLGAENSVAYSNNSIAIPTNFTISVTTEILPVSMTKTSVDCTMYICGDSTECSNLLLQYGSFCTQLNRALTGIAVEQDKNTQQVFAQVKQIYKTPPIKDFGGFNFSQILPDPSKPSKRSFIEDLLFNKVTLADAGFIKQYGDCLGDIAARDLICAQKFNGLTVLPPLLTDEMIAQYTSALLAGTITSGWTFGAGAALQIPFAMQMAYRFNGIGVTQNVLYENQKLIANQFNSAIGKIQDSLSSTASALGKLQDVVNQNAQALNTLVKQLSSNFGAISSVLNDILSRLDKVEAEVQIDRLITGRLQSLQTYVTQQLIRAAEIRASANLAATKMSECVLGQSKRVDFCGKGYHLMSFPQSAPHGVVFLHVTYVPAQEKNFTTAPAICHDGKAHFPREGVFVSNGTHWFVTQRNFYEPQIITTDNTFVSGNCDVVIGIVNNTVYDPLQPELDSGGGGSDIIKLLNEQVNKEMQSSNLYMSMSSWCYTHSLDGAGLFLFDHAAEEYEHAKKLIIFLNENNVPVQLTSISAPEHKFEGLTQIFQKAYEHEQHISESINNIVDHAIKSKDHATFNFLQWYVAEQHEEEVLFKDILDKIELIGNENHGLYLADQYVKGIAKSRKS

SEQ ID NO: 8677 - protein, 1315 aa, Artificial Sequence
  SARS-CoV-2/France/HF1805/2020__EPI_ISL_414628 spike protein (1-1147) Ferritin construct
MFVFLVLLPLVSSQCVNLTTRTQLPPAYTNSFTRGVYYPDKVFRSSVLHSTQDLFLPFFSNVTWFHAIHVSGTNGTKRFDNPVLPFNDGVYFASTEKSNIIRGWIFGTTLDSKTQSLLIVNNATNVVIKVCEFQFCNDPFLGVYYHKNNKSWMESEFRVYSSANNCTFEYVSQPFLMDLEGKQGNFKNLREFVFKNIDGYFKIYSKHTPINLVRDLPQGFSALEPLVDLPIGINITRFQTLLALHRSYLTPGDSSSGWTAGAAAYYVGYLQPRTFLLKYNENGTITDAVDCALDPLSETKCTLKSFTVEKGIYQTSNFRVQPTESIVRFPNITNLCPFGEVFNATRFASVYAWNRKRISNCVADYSVLYNSASFSTFKCYGVSPTKLNDLCFTNVYADSFVIRGDEVRQIAPGQTGKIADYNYKLPDDFTGCVIAWNSNNLDSKVGGNYNYLYRLFRKSNLKPFERDISTEIYQAGSTPCNGVEGFNCYFPLQSYGFQPTNGVGYQPYRVVVLSFELLHAPATVCGPKKSTNLVKNKCVNFNFNGLTGTGVLTESNKKFLPFQQFGRDIADTTDAVRDPQTLEILDITPCSFGGVSVITPGTNTSNQVAVLYQGVNCTEVPVAIHADQLTPTWRVYSTGSNVFQTRAGCLIGAEHVNNSYECDIPIGAGICASYQTQTNSPRRARSVASQSIIAYTMSLGAENSVAYSNNSIAIPTNFTISVTTEILPVSMTKTSVDCTMYICGDSTECSNLLLQYGSFCTQLNRALTGIAVEQDKNTQEVFAQVKQIYKTPPIKDFGGFNFSQILPDPSKPSKRSFIEDLLFNKVTLADAGFIKQYGDCLGDIAARDLICAQKFNGLTVLPPLLTDEMIAQYTSALLAGTITSGWTFGAGAALQIPFAMQMAYRFNGIGVTQNVLYENQKLIANQFNSAIGKIQDSLSSTASALGKLQDVVNQNAQALNTLVKQLSSNFGAISSVLNDILSRLDKVEAEVQIDRLITGRLQSLQTYVTQQLIRAAEIRASANLAATKMSECVLGQSKRVDFCGKGYHLMSFPQSAPHGVVFLHVTYVPAQEKNFTTAPAICHDGKAHFPREGVFVSNGTHWFVTQRNFYEPQIITTDNTFVSGNCDVVIGVVNNTVYDPLQPELDSGGGGSDIIKLLNEQVNKEMQSSNLYMSMSSWCYTHSLDGAGLFLFDHAAEEYEHAKKLIIFLNENNVPVQLTSISAPEHKFEGLTQIFQKAYEHEQHISESINNIVDHAIKSKDHATFNFLQWYVAEQHEEEVLFKDILDKIELIGNENHGLYLADQYVKGIAKSRKS

SEQ ID NO: 8678 - protein, 1315 aa, Artificial Sequence
  SARS-CoV-2/Netherlands/ZuidHolland_9/2020__EPI_ISL_414445 spike protein (1-1147) Ferritin construct
MFVFLVLLPLVSSQCVNLTTRTQLPPAYTNSFTRGVYYPDKVFRSSVLHSTQDLFLPFFSNVTWFHAIHVSGTNGTKRFDNPVLPFNDGVYFASTEKSNIIRGWIFGTTLDSKTQSLLIVNNATNVVIKVCEFQFCNDPFLGVYYHKNNKSWMESEFRVYSSANNCTFEYVSQPFLMDLEGKQGNFKNLREFVFKNIDGYFKIYSKHTPINLVRDLPQGFSALEPLVDLPIGINITRFQTLLALHRSYLTPGDSSSGWTAGAAAYYVGYLQPRTFLLKYNENGTITDAVDCALDPLSETKCTLKSFTVEKGIYQTSNFRVQPTESIVRFPNITNLCPFGEVFNATRFASVYAWNRKRISNCVADYSVLYNSASFSTFKCYGVSPTKLNDLCFTNVYADSFVIRGDEVRQIAPGQTGKIADYNYKLPDDFTGCVIAWNSNNLDSKVGGNYNYLYRLFRKSNLKPFERDISTEIYQAGSTPCNGVEGFNCYFPLQSYGFQPTNGVGYQPYRVVVLSFELLHAPATVCGPKKSTNLVKNKCVNFNFNGLTGTGVLTESNKKFLPFQQFGRDIADTTDAVRDPQTLEILDITPCSFGGVSVITPGTNTSNQVAVLYQGVNCTEVPVAIHADQLTPTWRVYSTGSNVFQTRAGCLIGAEHVNNSYECDIPIGAGICASYQTQTNSPRRARSVASQSIIAYTMSLGAENSVAYSNNSIAIPTNFTISVTTEILPVSMTKTSVDCTMYICGDSTECSNLLLQYGSFCTQLNRALTGIAVEQDKNTQEVFAQVKQIYKTPPIKDFGGFNFSQILPDPSKPSKRSFIEDLLFNKVTLADAGFIKQYGDCLGDIAARDLICVQKFNGLTVLPPLLTDEMIAQYTSALLAGTITSGWTFGAGAALQIPFAMQMAYRFNGIGVTQNVLYENQKLIANQFNSAIGKIQDSLSSTASALGKLQDVVNQNAQALNTLVKQLSSNFGAISSVLNDILSRLDKVEAEVQIDRLITGRLQSLQTYVTQQLIRAAEIRASANLAATKMSECVLGQSKRVDFCGKGYHLMSFPQSAPHGVVFLHVTYVPAQEKNFTTAPAICHDGKAHFPREGVFVSNGTHWFVTQRNFYEPQIITTDNTFVSGNCDVVIGIVNNTVYDPLQPELDSGGGGSDIIKLLNEQVNKEMQSSNLYMSMSSWCYTHSLDGAGLFLFDHAAEEYEHAKKLIIFLNENNVPVQLTSISAPEHKFEGLTQIFQKAYEHEQHISESINNIVDHAIKSKDHATFNFLQWYVAEQHEEEVLFKDILDKIELIGNENHGLYLADQYVKGIAKSRKS

SEQ ID NO: 8679 - protein, 1315 aa, Artificial Sequence
  SARS-CoV-2/Finland/FIN03032020A/2020__EPI_ISL_413602 spike protein (1-1147) Ferritin construct
MFVFLVLLPLVSSQCVNLTTRTQLPPAYTNSFTRGVYYPDKVFRSSVLHSTQDLFLPFFSNVTWFHAIHVSGTNGTKRFDNPVLPFNDGVYFASTEKSNIIRGWIFGTTLDSKTQSLLIVNNATNVVIKVCEFQFCNDPFLGVYYHKNNKSWMESEFRVYSSANNCTFEYVSQPFLMDLEGKQGNFKNLREFVFKNIDGYFKIYSKHTPINLVRDLPQGFSALEPLVDLPIGINITRFQTLLALHRSYLTPGDSSSGWTAGAAAYYVGYLQPRTFLLKYNENGTITDAVDCALDPLSETKCTLKSFTVEKGIYQTSNFRVQPTESIVRFPNITNLCPFGEVFNATRFASVYAWNRKRISNCVADYSVLYNSASFSTFKCYGVSPTKLNDLCFTNVYADSFVIRGDEVRQIAPGQTGKIADYNYKLPDDFTGCVISWNSNNLDSKVGGNYNYLYRLFRKSNLKPFERDISTEIYQAGSTPCNGVEGFNCYFPLQSYGFQPTNGVGYQPYRVVVLSFELLHAPATVCGPKKSTNLVKNKCVNFNFNGLTGTGVLTESNKKFLPFQQFGRDIADTTDAVRDPQTLEILDITPCSFGGVSVITPGTNTSNQVAVLYQGVNCTEVPVAIHADQLTPTWRVYSTGSNVFQTRAGCLIGAEHVNNSYECDIPIGAGICASYQTQTNSPRRARSVASQSIIAYTMSLGAENSVAYSNNSIAIPTNFTISVTTEILPVSMTKTSVDCTMYICGDSTECSNLLLQYGSFCTQLNRALTGIAVEQDKNTQEVFAQVKQIYKTPPIKDFGGFNFSQILPDPSKPSKRSFIEDLLFNKVTLADAGFIKQYGDCLGDIAARDLICAQKFNGLTVLPPLLTDEMIAQYTSALLAGTITSGWTFGAGAALQIPFAMQMAYRFNGIGVTQNVLYENQKLIANQFNSAIGKIQDSLSSTASALGKLQDVVNQNAQALNTLVKQLSSNFGAISSVLNDILSRLDKVEAEVQIDRLITGRLQSLQTYVTQQLIRAAEIRASANLAATKMSECVLGQSKRVDFCGKGYHLMSFPQSAPHGVVFLHVTYVPAQEKNFTTAPAICHDGKAHFPREGVFVSNGTHWFVTQRNFYEPQIITTDNTFVSGNCDVVIGIVNNTVYDPLQPELDSGGGGSDIIKLLNEQVNKEMQSSNLYMSMSSWCYTHSLDGAGLFLFDHAAEEYEHAKKLIIFLNENNVPVQLTSISAPEHKFEGLTQIFQKAYEHEQHISESINNIVDHAIKSKDHATFNFLQWYVAEQHEEEVLFKDILDKIELIGNENHGLYLADQYVKGIAKSRKS

SEQ ID NO: 8680 - protein, 1315 aa, Artificial Sequence
  SARS-CoV-2/France/GE1977/2020__EPI_ISL_414632 spike protein (1-1147) Ferritin construct
MFVFLVLLPLVSSQCVNLTTRTQLPPAYTNSFTRGVYYPDKVFRSSVLHSTQDLFLPFFSNVTWFHAIHVSGTNGTKRFDNPVLPFNDGVYFASTEKSNIIRGWIFGTTLDSKTQSLLIVNNATNVVIKVCEFQFCNDPFLGVYYHKNNKSWMESEFRVYSSANNCTFEYVSQPFLMDLEGKQGNFKNLREFVFKNIDGYFKIYSKHTPINLVRDLPQGFSALEPLVDLPIGINITRFQTLLALHRSYLTPGDSSSGWTAGAAAYYVGYLQPRTFLLKYNENGTITDAVDCALDPLSETKCTLKSFTVEKGIYQTSNFRVQPTESIVRFPNITNLCPFGEVFNATRFASVYAWNRKRISNCVADYSVLYNSASFSTFKCYGVSPTKLNDLCFTNVYADSFVIRGDEVRQIAPGQTGKIADYNYKLPDDFTGCVIAWNSNNLDSKVGGNYNYLYRLFRKSNLKPFERDISTEIYQAGSTPCNGVEGFNCYFPLQSYGFQPTNGVGYQPYRVVVLSFELLHAPATVCGPKKSTNLVKNKCVNFNFNGLTGTGVLTESNKKFLPFQQFGRDIADTTDAVRDPQTLEILDITPCSFGGVSVITPGTNTSNQVAVLYQGVNCTEVPVAIHADQLTPTWRVYSTGSNVFQTRAGCLIGAEHVNNSYECDIPIGAGICASYQTQTNSPRRARSVASQSIIAYTMSLGAENSVAYSNNSIAIPTNFTISVTTEILPVSMTKTSVDCTMYICGDSTECSNLLLQYGSFCTQLNRALTGIAVEQDKNTQEVFAQVKQIYKTPPIKDFGGFNFSQILPDPSKPSKRSFIEDLLFNKVTLADAGFIKQYGDCLGDIAARDLICAQKFNGLTVLPPLLTDEMIAQYTSALLAGTITSGWTFGAGAALQIPFAMQMAYRFNGIGVTQNVLYENQKLIANQFNSAIGKIQDSLFSTASALGKLQDVVNQNAQALNTLVKQLSSNFGAISSVLNDILSRLDKVEAEVQIDRLITGRLQSLQTYVTQQLIRAAEIRASANLAATKMSECVLGQSKRVDFCGKGYHLMSFPQSAPHGVVFLHVTYVPAQEKNFTTAPAICHDGKAHFPREGVFVSNGTHWFVTQRNFYEPQIITTDNTFVSGNCDVVIGIVNNTVYDPLQPELDSGGGGSDIIKLLNEQVNKEMQSSNLYMSMSSWCYTHSLDGAGLFLFDHAAEEYEHAKKLIIFLNENNVPVQLTSISAPEHKFEGLTQIFQKAYEHEQHISESINNIVDHAIKSKDHATFNFLQWYVAEQHEEEVLFKDILDKIELIGNENHGLYLADQYVKGIAKSRKS

SEQ ID NO: 8681 - protein, 1315 aa, Artificial Sequence
  SARS-CoV-2/Finland/FIN-313/2020__EPI_ISL_414641 spike protein (1-1147) Ferritin construct
MFVFLVLLPLVSSQCVNLTTRTQLPPAYTNSFTRGVYYPDKVFRSSVLHSTQDLFLPFFSNVTWFHAIHVSGTNGTKRFDNPVLPFNDGVYFASTEKSNIIRGWIFGTTLDSKTQSLLIVNNATNVVIKVCEFQFCNDPFLGVYYHKNNKSWMESEFRVYSSANNCTFEYVSQPFLMDLEGKQGNFKNLREFVFKNIDGYFKIYSKHTPINLVRDLPQGFSALEPLVDLPIGINITRFKTLLALHRSYLTPGDSSSGWTAGAAAYYVGYLQPRTFLLKYNENGTITDAVDCALDPLSETKCTLKSFTVEKGIYQTSNFRVQPTESIVRFPNITNLCPFGEVFNATRFASVYAWNRKRISNCVADYSVLYNSASFSTFKCYGVSPTKLNDLCFTNVYADSFVIRGDEVRQIAPGQTGKIADYNYKLPDDFTGCVIAWNSNNLDSKVGGNYNYLYRLFRKSNLKPFERDISTEIYQAGSTPCNGVEGFNCYFPLQSYGFQPTNGVGYQPYRVVVLSFELLHAPATVCGPKKSTNLVKNKCVNFNFNGLTGTGVLTESNKKFLPFQQFGRDIADTTDAVRDPQTLEILDITPCSFGGVSVITPGTNTSNQVAVLYQGVNCTEVPVAIHADQLTPTWRVYSTGSNVFQTRAGCLIGAEHVNNSYECDIPIGAGICASYQTQTNSPRRARSVASQSIIAYTMSLGAENSVAYSNNSIAIPTNFTISVTTEILPVSMTKTSVDCTMYICGDSTECSNLLLQYGSFCTQLNRALTGIAVEQDKNTQEVFAQVKQIYKTPPIKDFGGFNFSQILPDPSKPSKRSFIEDLLFNKVTLADAGFIKQYGDCLGDIAARDLICAQKFNGLTVLPPLLTDEMIAQYTSALLAGTITSGWTFGAGAALQIPFAMQMAYRFNGIGVTQNVLYENQKLIANQFNSAIGKIQDSLSSTASALGKLQDVVNQNAQALNTLVKQLSSNFGAISSVLNDILSRLDKVEAEVQIDRLITGRLQSLQTYVTQQLIRAAEIRASANLAATKMSECVLGQSKRVDFCGKGYHLMSFPQSAPHGVVFLHVTYVPAQEKNFTTAPAICHDGKAHFPREGVFVSNGTHWFVTQRNFYEPQIITTDNTFVSGNCDVVIGIVNNTVYDPLQPELDSGGGGSDIIKLLNEQVNKEMQSSNLYMSMSSWCYTHSLDGAGLFLFDHAAEEYEHAKKLIIFLNENNVPVQLTSISAPEHKFEGLTQIFQKAYEHEQHISESINNIVDHAIKSKDHATFNFLQWYVAEQHEEEVLFKDILDKIELIGNENHGLYLADQYVKGIAKSRKS

SEQ ID NO: 8682 - protein, 1315 aa, Artificial Sequence
  SARS-CoV-2/Netherlands/ZuidHolland_2/2020__EPI_ISL_414556 spike protein (1-1147) Ferritin construct
MFVFLVLLPLVSSQCVNLTTRTQLPPAYTNSFTRGVYYPDKVFRSSVLHSTQDLFLPFFSNVTWFHAIHVSGTNGTKRFDNPVLPFNDGVYFASTEKSNIIRGWIFGTTLDSKTQSLLIVNNATNVVIKVCEFQFCNDPFLGVYYHKNNKSWMESEFRVYSSANNCTFEYVSQPFLMDLEGKQGNFKNLREFVFKNIDGYFKIYSKHTPINLVRDLPQGFSALEPLVDLPIGINITRFQTLLALHRSYLTPGDSSSGWTAGAAAYYVGYLQPRTFLLKYNENGTITDAVDCALDPLSETKCTLKSFTVEKGIYQTSNFRVQPTESIVRFPNITNLCPFGEVFNATRFASVYAWNRKRISNCVADYSVLYNSASFSTFKCYGVSPTKLNDLCFTNVYADSFVIRGDEVRQIAPGQTGKIADYNYKLPDDFTGCVIAWNSNNLDSKVGGNYNYLYRLFRKSNLKPFERDISTEIYQAGSTPCNGVEGFNCYFPLQSYGFQPTNGVGYQPYRVVVLSFELLHAPATVCGPKKSTNLVKNKCVNFNFNGLTGTGVLTESNKKFLPFQQFGRDIADTTDAVRDPQTLEILDITPCSFGGVSVITPGTNTSNQVAVLYQGVNCTEVPVAIHADQLTPTWRVYSTGSNVFQTRAGCLIGAEHVNNSYECDIPIGAGICASYQTQTNSPRRARSVASQSIIAYTMSLGAENSVAYSNNSIAIPTNFTISVTTEILPVSMTKTSVDCTMYICGDSTECSNLLLQYGSFCTQLNRALTGIALEQDKNTQEVFAQVKQIYKTPPIKDFGGFNFSQILPDPSKPSKRSFIEDLLFNKVTLADAGFIKQYGDCLGDIAARDLICAQKFNGLTVLPPLLTDEMIAQYTSALLAGTITSGWTFGAGAALQIPFAMQMAYRFNGIGVTQNVLYENQKLIANQFNSAIGKIQDSLSSTASALGKLQDVVNQNAQALNTLVKQLSSNFGAISSVLNDILSRLDKVEAEVQIDRLITGRLQSLQTYVTQQLIRAAEIRASANLAATKMSECVLGQSKRVDFCGKGYHLMSFPQSAPHGVVFLHVTYVPAQEKNFTTAPAICHDGKAHFPREGVFVSNGTHWFVTQRNFYEPQIITTDNTFVSGNCDVVIGIVNNTVYDPLQPELDSGGGGSDIIKLLNEQVNKEMQSSNLYMSMSSWCYTHSLDGAGLFLFDHAAEEYEHAKKLIIFLNENNVPVQLTSISAPEHKFEGLTQIFQKAYEHEQHISESINNIVDHAIKSKDHATFNFLQWYVAEQHEEEVLFKDILDKIELIGNENHGLYLADQYVKGIAKSRKS

SEQ ID NO: 8683 - protein, 1315 aa, Artificial Sequence
  SARS-CoV-2/USA/WA-UW31/2020__EPI_ISL_414618 spike protein (1-1147) Ferritin construct
MFVFLVLLPLVSSQCVNLTTRTQLPPAYTNSFTRGVYYPDKVFRSSVLHSTQDLFLPFFSNVTWFHAIHVSGTNGTKRFDNPVLPFNDGVYFASTEKSNIIRGWIFGTTLDSKTQSLLIVNNATNVVIKVCEFQFCNDPFLGVYYHKNNKSWMESEFRVYSSANNCTFEYVSQPFLMDLEGKQGNFKNLREFVFKNIDGYFKIYSKHTPINLVRDLPQGFSALEPLVDLPIGINITRFQTLLALHRSYLTPGDSSSGWTAGAAAYYVGYLQPRTFLLKYNENGTITDAVDCALDPLSETKCTLKSFTVEKGIYQTSNFRVQPTESIVRFPNITNLCPFGEVFNATRFASVYAWNRKRISNCVADYSVLYNSASFSTFKCYGVSPTKLNDLCFTNVYADSFVIRGDEVRQIAPGQTGKIADYNYKLPDDFTGCVIAWNSNNLDSKVGGNYNYLYRLFRKSNLKPFERDISTEIYQAGSTPCNGAEGFNCYFPLQSYGFQPTNGVGYQPYRVVVLSFELLHAPATVCGPKKSTNLVKNKCVNFNFNGLTGTGVLTESNKKFLPFQQFGRDIADTTDAVRDPQTLEILDITPCSFGGVSVITPGTNTSNQVAVLYQDVNCTEVPVAIHADQLTPTWRVYSTGSNVFQTRAGCLIGAEHVNNSYECDIPIGAGICASYQTQTNSPRRARSVASQSIIAYTMSLGAENSVAYSNNSIAIPTNFTISVTTEILPVSMTKTSVDCTMYICGDSTECSNLLLQYGSFCTQLNRALTGIAVEQDKNTQEVFAQVKQIYKTPPIKDFGGFNFSQILPDPSKPSKRSFIEDLLFNKVTLADAGFIKQYGDCLGDIAARDLICAQKFNGLTVLPPLLTDEMIAQYTSALLAGTITSGWTFGAGAALQIPFAMQMAYRFNGIGVTQNVLYENQKLIANQFNSAIGKIQDSLSSTASALGKLQDVVNQNAQALNTLVKQLSSNFGAISSVLNDILSRLDKVEAEVQIDRLITGRLQSLQTYVTQQLIRAAEIRASANLAATKMSECVLGQSKRVDFCGKGYHLMSFPQSAPHGVVFLHVTYVPAQEKNFTTAPAICHDGKAHFPREGVFVSNGTHWFVTQRNFYEPQIITTDNTFVSGNCDVVIGIVNNTVYDPLQPELDSGGGGSDIIKLLNEQVNKEMQSSNLYMSMSSWCYTHSLDGAGLFLFDHAAEEYEHAKKLIIFLNENNVPVQLTSISAPEHKFEGLTQIFQKAYEHEQHISESINNIVDHAIKSKDHATFNFLQWYVAEQHEEEVLFKDILDKIELIGNENHGLYLADQYVKGIAKSRKS

SEQ ID NO: 8684 - protein, 1315 aa, Artificial Sequence
  SARS-CoV-2/South Korea/SNU01/2020__EPI_ISL_411929 spike protein (1-1147) Ferritin construct
MFVFLVLLPLVSSQCVNLTTRTQLPPAYTNSFTRGVYYPDKVFRSSVLHSTQDLFLPFFSNVTWFHAIHVSGTNGTKRFDNPVLPFNDGVYFASTEKSNIIRGWIFGTTLDSKTQSLLIVNNATNVVIKVCEFQFCNDPFLGVYYHKNNKSWMESEFRVYSSANNCTFEYVSQPFLMDLEGKQGNFKNLREFVFKNIDGYFKIYSKHTPINLVRDLPQGFWALEPLVDLPIGINITRFQTLLALHRSYLTPGDSSSGWTAGAAAYYVGYLQPRTFLLKYNENGTITDAVDCALDPLSETKCTLKSFTVEKGIYQTSNFRVQPTESIVRFPNITNLCPFGEVFNATRFASVYAWNRKRISNCVADYSVLYNSASFSTFKCYGVSPTKLNDLCFTNVYADSFVIRGDEVRQIAPGQTGKIADYNYKLPDDFTGCVIAWNSNNLDSKVGGNYNYLYRLFRKSNLKPFERDISTEIYQAGSTPCNGVEGFNCYFPLQSYGFQPTNGVGYQPYRVVVLSFELLHAPATVCGPKKSTNLVKNKCVNFNFNGLTGTGVLTESNKKFLPFQQFGRDIADTTDAVRDPQTLEILDITPCSFGGVSVITPGTNTSNQVAVLYQDVNCTEVPVAIHADQLTPTWRVYSTGSNVFQTRAGCLIGAEHVNNSYECDIPIGAGICASYQTQTNSPRRARSVASQSIIAYTMSLGAENSVAYSNNSIAIPTNFTISVTTEILPVSMTKTSVDCTMYICGDSTECSNLLLQYGSFCTQLNRALTGIAVEQDKNTQEVFAQVKQIYKTPPIKDFGGFNFSQILPDPSKPSKRSFIEDLLFNKVTLADAGFIKQYGDCLGDIAARDLICAQKFNGLTVLPPLLTDEMIAQYTSALLAGTITSGWTFGAGAALQIPFAMQMAYRFNGIGVTQNVLYENQKLIANQFNSAIGKIQDSLSSTASALGKLQDVVNQNAQALNTLVKQLSSNFGAISSVLNDILSRLDKVEAEVQIDRLITGRLQSLQTYVTQQLIRAAEIRASANLAATKMSECVLGQSKRVDFCGKGYHLMSFPQSAPHGVVFLHVTYVPAQEKNFTTAPAICHDGKAHFPREGVFVSNGTHWFVTQRNFYEPQIITTDNTFVSGNCDVVIGIVNNTVYDPLQPELDSGGGGSDIIKLLNEQVNKEMQSSNLYMSMSSWCYTHSLDGAGLFLFDHAAEEYEHAKKLIIFLNENNVPVQLTSISAPEHKFEGLTQIFQKAYEHEQHISESINNIVDHAIKSKDHATFNFLQWYVAEQHEEEVLFKDILDKIELIGNENHGLYLADQYVKGIAKSRKS

SEQ ID NO: 8685 - protein, 1315 aa, Artificial Sequence
  SARS-CoV-2/China/WF0004/2020__EPI_ISL_413694 spike protein (1-1147) Ferritin construct
MFVFLVLLPLVSSQCVNLTTRTQLPPAYTNSFTRGVYYPDKVFRSSVLHSTQDLFLPFFSNVTWFHAIHVSGTNGTKRFDNPVLPFNDGVYFASTEKSNIIRGWIFGTTLDSKTQSLLIVNNATNVVIKVCEFQFCNDPFLGVYYHKNNKSWTESEFRVYSSANNCTFEYVSQPFLMDLEGKQGNFKNLREFVFKNIDGYFKIYSKHTPINLVRDLPQGFSALEPLVDLPIGINITRFQTLLALHRSYLTPGDSSSGWTAGAAAYYVGYLQPRTFLLKYNENGTITDAVDCALDPLSETKCTLKSFTVEKGIYQTSNFRVQPTESIVRFPNITNLCPFGEVFNATRFASVYAWNRKRISNCVADYSVLYNSASFSTFKCYGVSPTKLNDLCFTNVYADSFVIRGDEVRQIAPGQTGKIADYNYKLPDDFTGCVIAWNSNNLDSKVGGNYNYLYRLFRKSNLKPFERDISTEIYQAGSTPCNGVEGFNCYFPLQSYGFQPTNGVGYQPYRVVVLSFELLHAPATVCGPKKSTNLVKNKCVNFNFNGLTGTGVLTESNKKFLPFQQFGRDIADTTDAVRDPQTLEILDITPCSFGGVSVITPGTNTSNQVAVLYQDVNCTEVPVAIHADQLTPTWRVYSTGSNVFQTRAGCLIGAEHVNNSYECDIPIGAGICASYQTQTNSPRRARSVASQSIIAYTMSLGAENSVAYSNNSIAIPTNFTISVTTEILPVSMTKTSVDCTMYICGDSTECSNLLLQYGSFCTQLNRALTGIAVEQDKNTQEVFAQVKQIYKTPPIKDFGGFNFSQILPDPSKPSKRSFIEDLLFNKVTLADAGFIKQYGDCLGDIAARDLICAQKFNGLTVLPPLLTDEMIAQYTSALLAGTITSGWTFGAGAALQIPFAMQMAYRFNGIGVTQNVLYENQKLIANQFNSAIGKIQDSLSSTASALGKLQDVVNQNAQALNTLVKQLSSNFGAISSVLNDILSRLDKVEAEVQIDRLITGRLQSLQTYVTQQLIRAAEIRASANLAATKMSECVLGQSKRFDFCGKGYHLMSFPQSAPHGVVFLHVTYVPAQEKNFTTAPAICHDGKAHFPREGVFVSNGTHWFVTQRNFYEPQIITTDNTFVSGNCDVVIGIVNNTVYDPLQPELDSGGGGSDIIKLLNEQVNKEMQSSNLYMSMSSWCYTHSLDGAGLFLFDHAAEEYEHAKKLIIFLNENNVPVQLTSISAPEHKFEGLTQIFQKAYEHEQHISESINNIVDHAIKSKDHATFNFLQWYVAEQHEEEVLFKDILDKIELIGNENHGLYLADQYVKGIAKSRKS

SEQ ID NO: 8686 - protein, 1315 aa, Artificial Sequence
  SARS-CoV-2/China/WF0028/2020__EPI_ISL_413791 spike protein (1-1147) Ferritin construct
MFVFLVLLPLVSSQCVNLTTRTQLPPAYTNSFTRGVYYPDKVFRSSVLHSTQDLFLPFFSNVTWFHAIHVSGTNGTKRFDNPVLPFNDGVYFASTEKSNIIRGWIFGTTLDSKTQSLLIVNNATNVVIKVCEFQFCNDPFLGVYYHKNNKSWMESEFRVYSSANNCTFEYVSQPFLMDLEGKQGNFKNLREFVFKNIDGYFKIYSKHTPINLVRDLPQGFSALEPLVDLPIGINITRFQTLLALHRSYLTPGDSSSGWTAGAAAYYVGYLQPRTFLLKYNENGTITDAVDCALDPLSETKCTLKSFTVEKGIYQTSNFRVQPTESIVRFPNITNLCPFGEVFNATRFASVYAWNRKRISNCVADYSVLYNSASFSTFKCYGVSPTKLNDLCFTNVYADSFVIRGDEVRQIAPGQTGKIADYNYKLPDDFTGCVIAWNSNNLDSKVGGNYNYLYRLFRKSNLKPFERDISTEIYQAGSTPCNGVEGFNCYFPLQSYGFQPTNGVGYQPYRVVVLSFELLHAPATVCGPKKSTNLVKNKCVNFNFNGLTGTGVLTESNKKFLPFQQFGRDIADTTDAVRDPQTLEILDITPCSFGGVSVITPGTNTSNQVAVLYQDVNCTEVPVAIHADQLTPTWRVYSTGSNVFQTRAGCLIGAEHVNNSYECDIPIGAGICASYQTQTNSPRRARSVASQSIIAYTMSLGAENSVAYSNNSIAIPTNFTISVTTEILPVSMTKTSVDCTMYICGDSTECSNLLLQYGSFCTQLNRALTGIAVEQDKNTQEVFAQVKQIYKTPPIKDFGGFNFSQILPDPSKPSKRSFIEDLLFNKVTLADAGFIKQYGDCLGDIAARDLICAQKFNGLTVLPPLLTDEMIAQYTSALLAGTITSGWTFGAGAALQIPFAMQMAYRFNGIGVTQNVLYENQKLIANQFNSAIGKIQDSLSSTASALGKLQDVVNQNAQALNTLVKQLSSNFGAISSVLNDILSRLDKVEAEVQIDRLITGRLQSLQTYVTQQLIRAAEIRASANLAATKMSECVLGQSKRVDFCGKGYHLMSFPQSAPHGVVFLHVTYVPAQEKNFTTAPAICHDGKAHFPREGVFVSNGTHWFVTQRNFYEPQIITTDNTFVSGNCDVVIGIVNNTVYDPLQPELESGGGGSDIIKLLNEQVNKEMQSSNLYMSMSSWCYTHSLDGAGLFLFDHAAEEYEHAKKLIIFLNENNVPVQLTSISAPEHKFEGLTQIFQKAYEHEQHISESINNIVDHAIKSKDHATFNFLQWYVAEQHEEEVLFKDILDKIELIGNENHGLYLADQYVKGIAKSRKS

SEQ ID NO: 8687 - protein, 1315 aa, Artificial Sequence
  SARS-CoV-2/2019-nCoV/USA-CruiseA-18/2020__MT159716.1 spike protein (1-1147) Ferritin construct
MFVFLVLLPLVSSQCVNLTTRTQLPPAYTNSFTRGVYYPDKVFRSSVLHSTQDLFLPFFSNVTWFHAIHVSGTNGTKRFDNPVLPFNDGVYFASTEKSNIIRGWIFGTTLDSKTQSLLIVNNATNVVIKVCEFQFCNDPFLGVYYHKNNKSWMESELRVYSSANNCTFEYVSQPFLMDLEGKQGNFKNLREFVFKNIDGYFKIYSKHTPINLVRDLPQGFSALEPLVDLPIGINITRFQTLLALHRSYLTPGDSSSGWTAGAAAYYVGYLQPRTFLLKYNENGTITDAVDCALDPLSETKCTLKSFTVEKGIYQTSNFRVQPTESIVRFPNITNLCPFGEVFNATRFASVYAWNRKRISNCVADYSVLYNSASFSTFKCYGVSPTKLNDLCFTNVYADSFVIRGDEVRQIAPGQTGKIADYNYKLPDDFTGCVIAWNSNNLDSKVGGNYNYLYRLFRKSNLKPFERDISTEIYQAGSTPCNGVEGFNCYFPLQSYGFQPTNGVGYQPYRVVVLSFELLHAPATVCGPKKSTNLVKNKCVNFNFNGLTGTGVLTESNKKFLPFQQFGRDIADTTDAVRDPQTLEILDITPCSFGGVSVITPGTNTSNQVAVLYQDVNCTEVPVAIHADQLTPTWRVYSTGSNVFQTRAGCLIGAEHVNNSYECDIPIGAGICASYQTQTNSPRRARSVASQSIIAYTMSLGAENSVAYSNNSIAIPTNFTISVTTEILPVSMTKTSVDCTMYICGDSTECSNLLLQYGSFCTQLNRALTGIAVEQDKNTQEVFAQVKQIYKTPPIKDFGGFNFSQILPDPSKPSKRSFIEDLLFNKVTLADAGFIKQYGDCLGDIAARDLICAQKFNGLTVLPPLLTDEMIAQYTSALLAGTITSGWTFGAGAALQIPFAMQMAYRFNGIGVTQNVLYENQKLIANQFNSAIGKIQDSLSSTASALGKLQDVVNQNAQALNTLVKQLSSNFGAISSVLNDILSRLDKVEAEVQIDRLITGRLQSLQTYVTQQLIRAAEIRASANLAATKMSECVLGQSKRVDFCGKGYHLMSFPQSAPHGVVFLHVTYVPAQEKNFTTAPAICHDGKAHFPREGVFVSNGTHWFVTQRNFYEPQIITTDNTFVSGNCDVVIGIVNNTVYDPLQPELDSGGGGSDIIKLLNEQVNKEMQSSNLYMSMSSWCYTHSLDGAGLFLFDHAAEEYEHAKKLIIFLNENNVPVQLTSISAPEHKFEGLTQIFQKAYEHEQHISESINNIVDHAIKSKDHATFNFLQWYVAEQHEEEVLFKDILDKIELIGNENHGLYLADQYVKGIAKSRKS

SEQ ID NO: 8688 - protein, 1315 aa, Artificial Sequence
  SARS-CoV-2/SARS-CoV-2/Yunnan-01/human/2020/CHN__MT049951.1 spike protein (1-1147) Ferritin construct
MFVFLVLLPLVSSQCVNLTTRTQLPPANTNSFTRGVYYPDKVFRSSVLHSTQDLFLPFFSNVTWFHAIHVSGTNGTKRFDNPVLPFNDGVYFASTEKSNIIRGWIFGTTLDSKTQSLLIVNNATNVVIKVCEFQFCNDPFLGVYYHKNNKSWMESEFRVYSSANNCTFEYVSQPFLMDLEGKQGNFKNLREFVFKNIDGYFKIYSKHTPINLVRDLPQGFSALEPLVDLPIGINITRFQTLLALHRSYLTPGDSSSGWTAGAAAYYVGYLQPRTFLLKYNENGTITDAVDCALDPLSETKCTLKSFTVEKGIYQTSNFRVQPTESIVRFPNITNLCPFGEVFNATRFASVYAWNRKRISNCVADYSVLYNSASFSTFKCYGVSPTKLNDLCFTNVYADSFVIRGDEVRQIAPGQTGKIADYNYKLPDDFTGCVIAWNSNNLDSKVGGNYNYLYRLFRKSNLKPFERDISTEIYQAGSTPCNGVEGFNCYFPLQSYGFQPTNGVGYQPYRVVVLSFELLHAPATVCGPKKSTNLVKNKCVNFNFNGLTGTGVLTESNKKFLPFQQFGRDIADTTDAVRDPQTLEILDITPCSFGGVSVITPGTNTSNQVAVLYQDVNCTEVPVAIHADQLTPTWRVYSTGSNVFQTRAGCLIGAEHVNNSYECDIPIGAGICASYQTQTNSPRRARSVASQSIIAYTMSLGAENSVAYSNNSIAIPTNFTISVTTEILPVSMTKTSVDCTMYICGDSTECSNLLLQYGSFCTQLNRALTGIAVEQDKNTQEVFAQVKQIYKTPPIKDFGGFNFSQILPDPSKPSKRSFIEDLLFNKVTLADAGFIKQYGDCLGDIAARDLICAQKFNGLTVLPPLLTDEMIAQYTSALLAGTITSGWTFGAGAALQIPFAMQMAYRFNGIGVTQNVLYENQKLIANQFNSAIGKIQDSLSSTASALGKLQDVVNQNAQALNTLVKQLSSNFGAISSVLNDILSRLDKVEAEVQIDRLITGRLQSLQTYVTQQLIRAAEIRASANLAATKMSECVLGQSKRVDFCGKGYHLMSFPQSAPHGVVFLHVTYVPAQEKNFTTAPAICHDGKAHFPREGVFVSNGTHWFVTQRNFYEPQIITTDNTFVSGNCDVVIGIVNNTVYDPLQPELDSGGGGSDIIKLLNEQVNKEMQSSNLYMSMSSWCYTHSLDGAGLFLFDHAAEEYEHAKKLIIFLNENNVPVQLTSISAPEHKFEGLTQIFQKAYEHEQHISESINNIVDHAIKSKDHATFNFLQWYVAEQHEEEVLFKDILDKIELIGNENHGLYLADQYVKGIAKSRKS

SEQ ID NO: 8689 - protein, 1315 aa, Artificial Sequence
  SARS-CoV-2/USA/WA-UW292/2020__EPI_ISL_418077 spike protein (1-1147) Ferritin construct
MFVFLVLLPLVSSQCVNLTTRTQLPPAYTNSFTRGVYYPDKVFRSSVLHSTQDLFLPFFSNVTWFHAIHVSGTNGTKRFDNPVLPFNDGVYFASTEKSNIIRGWIFGTTLDSKTQSLLIVNNATNVVIKVCEFQFCNDPFLGVYYHKNNKSWMESEFRVYSSANNCTFEYVSQPFLMDLEGKQGNFKNLREFVFKNIDGYFKIYSKHTPINLVRDLPQGFSALEPLVDLPIGINITRFQTLLALHRSYLTPGDSSSGWTAGAAAYYVGYLQPRTFLLKYNENGTITDAVDCALDPLSETKCTLKSFTVEKGIYQTSNFRVQPTESIVRFPNITNLCPFGEVFNATRFASVYAWNRKRISNCVADYSVLYNSASFSTFKCYGVSPTKLNDLCFTNVYADSFVIRGDEVRQIAPGQTGKIADYNYKLPDDFTGCVIAWNSNNLDSKVGGNYNYLYRLFRKSNLKPFERDISTEIYQASSTPCNGVEGFNCYFPLQSYGFQPTNGVGYQPYRVVVLSFELLHAPATVCGPKKSTNLVKNKCVNFNFNGLTGTGVLTESNKKFLPFQQFGRDIADTTDAVRDPQTLEILDITPCSFGGVSVITPGTNTSNQVAVLYQDVNCTEVPVAIHADQLTPTWRVYSTGSNVFQTRAGCLIGAEHVNNSYECDIPIGAGICASYQTQTNSPRRARSVASQSIIAYTMSLGAENSVAYSNNSIAIPTNFTISVTTEILPVSMTKTSVDCTMYICGDSTECSNLLLQYGSFCTQLNRALTGIAVEQDKNTQEVFAQVKQIYKTPPIKDFGGFNFSQILPDPSKPSKRSFIEDLLFNKVTLADAGFIKQYGDCLGDIAARDLICAQKFNGLTVLPPLLTDEMIAQYTSALLAGTITSGWTFGAGAALQIPFAMQMAYRFNGIGVTQNVLYENQKLIANQFNSAIGKIQDSLSSTASALGKLQDVVNQNAQALNTLVKQLSSNFGAISSVLNDILSRLDKVEAEVQIDRLITGRLQSLQTYVTQQLIRAAEIRASANLAATKMSECVLGQSKRVDFCGKGYHLMSFPQSAPHGVVFLHVTYVPAQEKNFTTAPAICHDGKAHFPREGVFVSNGTHWFVTQRNFYEPQIITTDNTFVSGNCDVVIGIVNNTVYDPLQPELDSGGGGSDIIKLLNEQVNKEMQSSNLYMSMSSWCYTHSLDGAGLFLFDHAAEEYEHAKKLIIFLNENNVPVQLTSISAPEHKFEGLTQIFQKAYEHEQHISESINNIVDHAIKSKDHATFNFLQWYVAEQHEEEVLFKDILDKIELIGNENHGLYLADQYVKGIAKSRKS

SEQ ID NO: 8690 - protein, 1315 aa, Artificial Sequence
  SARS-CoV-2/Iceland/192/2020__EPI_ISL_417819 spike protein (1-1147) Ferritin construct
MFVFFVLLPLVSSQCVNLTTRTQLPPAYTNSFTRGVYYPDKVFRSSVLHSTQDLFLPFFSNVTWFHAIHVSGTNGTKRFDNPVLPFNDGVYFASTEKSNIIRGWIFGTTLDSKTQSLLIVNNATNVVIKVCEFQFCNDPFLGVYYHKNNKSWMESEFRVYSSANNCTFEYVSQPFLMDLEGKQGNFKNLREFVFKNIDGYFKIYSKHTPINLVRDLPQGFSALEPLVDLPIGINITRFQTLLALHRSYLTPGDSSSGWTAGAAAYYVGYLQPRTFLLKYNENGTITDAVDCALDPLSETKCTLKSFTVEKGIYQTSNFRVQPTESIVRFPNITNLCPFGEVFNATRFASVYAWNRKRISNCVADYSVLYNSASFSTFKCYGVSPTKLNDLCFTNVYADSFVIRGDEVRQIAPGQTGKIADYNYKLPDDFTGCVIAWNSNNLDSKVGGNYNYLYRLFRKSNLKPFERDISTEIYQAGSTPCNGVEGFNCYFPLQSYGFQPTNGVGYQPYRVVVLSFELLHAPATVCGPKKSTNLVKNKCVNFNFNGLTGTGVLTESNKKFLPFQQFGRDIADTTDAVRDPQTLEILDITPCSFGGVSVITPGTNTSNQVAVLYQGVNCTEVPVAIHADQLTPTWRVYSTGSNVFQTRAGCLIGAEHVNNSYECDIPIGAGICASYQTQTNSPRRARSVASQSIIAYTMSLGAENSVAYSNNSIAIPTNFTISVTTEILPVSMTKTSVDCTMYICGDSTECSNLLLQYGSFCTQLNRALTGIAVEQDKNTQEVFAQVKQIYKTPPIKDFGGFNFSQILPDPSKPSKRSFIEDLLFNKVTLADAGFIKQYGDCLGDIAARDLICAQKFNGLTVLPPLLTDEMIAQYTSALLAGTITSGWTFGAGAALQIPFAMQMAYRFNGIGVTQNVLYENQKLIANQFNSAIGKIQDSLSSTASALGKLQDVVNQNAQALNTLVKQLSSNFGAISSVLNDILSRLDKVEAEVQIDRLITGRLQSLQTYVTQQLIRAAEIRASANLAATKMSECVLGQSKRVDFCGKGYHLMSFPQSAPHGVVFLHVTYVPAQEKNFTTAPAICHDGKAHFPREGVFVSNGTHWFVTQRNFYEPQIITTDNTFVSGNCDVVIGIVNNTVYDPLQPELDSGGGGSDIIKLLNEQVNKEMQSSNLYMSMSSWCYTHSLDGAGLFLFDHAAEEYEHAKKLIIFLNENNVPVQLTSISAPEHKFEGLTQIFQKAYEHEQHISESINNIVDHAIKSKDHATFNFLQWYVAEQHEEEVLFKDILDKIELIGNENHGLYLADQYVKGIAKSRKS

SEQ ID NO: 8691 - protein, 1315 aa, Artificial Sequence
  SARS-CoV-2/Belgium/ULG-6939/2020__EPI_ISL_417020 spike protein (1-1147) Ferritin construct
MFVFLVLLPLVSSQCVNLTTRTQLPPAYTNSFTRGVYYPDKVFRSSVLHSTQDLFLPFFSNVTWFHAIHVSGTNGTKRFDNPVLPFNDGVYFASTEKSNIIRGWIFGTTLDSKTQSLLIVNNATNVVIKVCEFQFCNDPFLGVYYHKNNKSWMESEFRVYSSANNCTFEYVSQPFLMDLEGKQGNFKNLREFVFKNIDGYFKIYSKHTPINLVRDLPQGFSALEPLVDLPIGINITRFQTLLALHRSYLTPGDSSSGWTAGAAAYYVGYLQPRTFLLKYNENGTITDAVDCALDPLSETKCTLKSFTVEKGIYQTSNFRVQPTESIVRFPNITNLCPFGEVFNATRFASVYAWNRKRISNCVADYSVLYNSASFSTFKCYGVSPTKLNDLCFTNVYADSFVIRGDEVRQIAPGQTGKIADYNYKLPDDFTGCVIAWNSNNLDSKVGGNYNYLYRLFRKSNLKPFERDISTEIYQAGSTPCNGVEGFNCYFPLQSYGFQPTNGVGYQPYRVVVLSFELLHAPATVCGPKKSTNLVKNKCVNFNFNGLTGTGVLTESNKKFLPFQQFGRDIADTTDAVRDPQTLEILDITPCSFGGVSVITPGTNTSNQVAVLYQGVNCTEVPVAIHADQLTPTWRVYSTGSNVFQTRAGCLIGAEHVNNSYECDIPIGAGICASYQTQTNSPRRARSVASQSIIAYTMSLGAENSVVYSNNSIAIPTNFTISVTTEILPVSMTKTSVDCTMYICGDSTECSNLLLQYGSFCTQLNRALTGIAVEQDKNTQEVFAQVKQIYKTPPIKDFGGFNFSQILPDPSKPSKRSFIEDLLFNKVTLADAGFIKQYGDCLGDIAARDLICAQKFNGLTVLPPLLTDEMIAQYTSALLAGTITSGWTFGAGAALQIPFAMQMAYRFNGIGVTQNVLYENQKLIANQFNSAIGKIQDSLSSTASALGKLQDVVNQNAQALNTLVKQLSSNFGAISSVLNDILSRLDKVEAEVQIDRLITGRLQSLQTYVTQQLIRAAEIRASANLAATKMSECVLGQSKRVDFCGKGYHLMSFPQSAPHGVVFLHVTYVPAQEKNFTTAPAICHDGKAHFPREGVFVSNGTHWFVTQRNFYEPQIITTDNTFVSGNCDVVIGIVNNTVYDPLQPELDSGGGGSDIIKLLNEQVNKEMQSSNLYMSMSSWCYTHSLDGAGLFLFDHAAEEYEHAKKLIIFLNENNVPVQLTSISAPEHKFEGLTQIFQKAYEHEQHISESINNIVDHAIKSKDHATFNFLQWYVAEQHEEEVLFKDILDKIELIGNENHGLYLADQYVKGIAKSRKS

SEQ ID NO: 8692 - protein, 1315 aa, Artificial Sequence
  SARS-CoV-2/France/HF2496/2020__EPI_ISL_418231 spike protein (1-1147) Ferritin construct
MFVFLVLLPLVSSQCVNLTTRTQLPPAYTNSFTRGVYYPDKVFRSSVLHSTQDLFLPFFSNVTWFHAIHVSGTNGTKRFDNPVLPFNDGVYFASTEKSNIIRGWIFGTTLDSKTQSLLIVNNATNVVIKVCEFQFCNDPFLGVYYHKNNKSWMESEFRVYSSANNCTFEYVSQPFLMDLEGKQGNFKNLREFVFKNIDGYFKIYSKHTPINLVRDLPQGFSALEPLVDLPIGINITRFQTLLALHRSYLTPGDSSSGWTAGAAAYYVGYLQPRTFLLKYNENGTITDAVDCALDPLSETKCTLKSFTVEKGIYQTSNFRVQPTESIVRFPNITNLCPFGEVFNATRFASVYAWNRKRISNCVADYSVLYNSASFSTFKCYGVSPTKLNDLCFTNVYADSFVIRGDEVRQIAPGQTGKIADYNYKLPDDFTGCVIAWNSNNLDSKVGGNYNYLYRLFRKSNLKPFERDISTEIYQAGSTPCNGVEGFNCYFPLQSYGFQPTNGVGYQPYRVVVLSFELLHAPATVCGPKKSTNLVKNKCVNFNFNGLTGTGVLTESNKKFLPFQQFGRDIADTTDAVRDPQTLEILDITPCSFGGVSVITPGTNTSNQVAVLYQGVNCTEVPVAIHADQLTPTWRVYSTGSNVFQTRAGCLIGAEHVNNSYECDIPIGAGICASYQTQTNSPRRARSVASQSIIAYTMSLGAENSVAYSNNSIAIPTNFTISVTTEILPVSMTKTSVDCTMYICGDSTECSNLLLQYGSFCTQLNRALTGIAVEQDKNTQEVFAQVKQIYKTPPIKDFGGFNFSQILPDPSKPSKRSFIEDLLFNKVTLADAGFIKQYGDCLGDIVARDLICAQKFNGLTVLPPLLTDEMIAQYTSALLAGTITSGWTFGAGAALQIPFAMQMAYRFNGIGVTQNVLYENQKLIANQFNSAIGKIQDSLSSTASALGKLQDVVNQNAQALNTLVKQLSSNFGAISSVLNDILSRLDKVEAEVQIDRLITGRLQSLQTYVTQQLIRAAEIRASANLAATKMSECVLGQSKRVDFCGKGYHLMSFPQSAPHGVVFLHVTYVPAQEKNFTTAPAICHDGKAHFPREGVFVSNGTHWFVTQRNFYEPQIITTDNTFVSGNCDVVIGIVNNTVYDPLQPELDSGGGGSDIIKLLNEQVNKEMQSSNLYMSMSSWCYTHSLDGAGLFLFDHAAEEYEHAKKLIIFLNENNVPVQLTSISAPEHKFEGLTQIFQKAYEHEQHISESINNIVDHAIKSKDHATFNFLQWYVAEQHEEEVLFKDILDKIELIGNENHGLYLADQYVKGIAKSRKS

SEQ ID NO: 8693 - protein, 1315 aa, Artificial Sequence
  SARS-CoV-2/USA/WA-UW291/2020__EPI_ISL_418076 spike protein (1-1147) Ferritin construct
MFVFLVLLPLVSSQCVNLTTRTQLPPAYTNSFTRGVYYPDKVFRSSVLHSTQDLFLPFFSNVTWFHAIHVSGTNGTKRFDNPVLPFNDGVYFASTEKSNIIRGWIFGTTLDSKTQSLLIVNNATNVVIKVCEFQFCNDPFLGVYYHKNNKSWMESEFRVYSSANNCTFEYVSQPFLMDLEGKQGNFKNLREFVFKNIDGYFKIYSKHTPINLVRDLPQGFSALEPLVDLPIGINITRFQTLLALHRSYLTPGDSSSGWTAGAAAYYVGYLQPRTFLLKYNENGTITDAVDCALDPLSETKCTLKSFTVEKGIYQTSNFRVQPTESIVRFPNITNLCPFGEVFNATRFASVYAWNRKRISNCVADYSVLYNSASFSTFKCYGVSPTKLNDLCFTNVYADSFVIRGDEVRQIAPGQTGKIADYNYKLPDDFTGCVIAWNSNNLDSKVGGNYNYLYRLFRKSNLKPFERDISTEIYQAGSTPCNGVEGFNCYFPLQSYGFQPTNGVGYQPYRVVVLSFELLHAPATVCGPKKSTNLVKNKCVNFNFNGLTGTGVLTESNKKFLPFQQFGRDIADTTDAVRDPQTLEILDITPCSFGGVSVITPGTNTSNQVAVLYQGVNCTEVPVAIHADQLTPTWRVYSTGSNVFQTRAGCLIGAEHVNNSYECDIPIGAGICASYQTQTNSPRRARSVASQSIIAYTMSLGAENSVAYSNNSIAIPTNFTISVTTEILPVSMTKTSVDCTMYICGDSTECSNLLLQYGSFCTQLNRALTGIAVEQDKNTQEVFAQVKQIYKTPPIKDFGGFNFSQILPDPSKPSKRSFIEDLLFNKVTLADAGFIKQYGDCLGDIAARDLICAQKFNGLTVLPPLLTDEMIAQYTSALLAGTITSGWTFGAGAALQIPFAMQMAYRFNGIGVTQNVLYENQKLIANQFNSAIGKIQYSLSSTASALGKLQDVVNQNAQALNTLVKQLSSNFGAISSVLNDILSRLDKVEAEVQIDRLITGRLQSLQTYVTQQLIRAAEIRASANLAATKMSECVLGQSKRVDFCGKGYHLMSFPQSAPHGVVFLHVTYVPAQEKNFTTAPAICHDGKAHFPREGVFVSNGTHWFVTQRNFYEPQIITTDNTFVSGNCDVVIGIVNNTVYDPLQPELDSGGGGSDIIKLLNEQVNKEMQSSNLYMSMSSWCYTHSLDGAGLFLFDHAAEEYEHAKKLIIFLNENNVPVQLTSISAPEHKFEGLTQIFQKAYEHEQHISESINNIVDHAIKSKDHATFNFLQWYVAEQHEEEVLFKDILDKIELIGNENHGLYLADQYVKGIAKSRKS

SEQ ID NO: 8694 - protein, 1315 aa, Artificial Sequence; identical to SEQ ID NO: 8657
  SARS-CoV-2/Portugal/PT0034/2020__EPI_ISL_418019 spike protein (1-1147) Ferritin construct

SEQ ID NO: 8695 - protein, 1315 aa, Artificial Sequence; identical to SEQ ID NO: 8649
  SARS-CoV-2/Iceland/202/2020__EPI_ISL_417750 spike protein (1-1147) Ferritin construct

SEQ ID NO: 8696 - protein, 1315 aa, Artificial Sequence
  SARS-CoV-2/USA/WA-UW261/2020__EPI_ISL_418046 spike protein (1-1147) Ferritin construct
MFVFLVLLPLVSSQCVNLTTRTQLPPAYTNSFTRGVYYPDKVFRSSVLHSTQDLFLPFFSNVTWFHAIHVSGTNGTKRFDNPVLPFNDGVYFASTEKSNIIRGWIFGTTLDSKTQSLLIVNNATNVVIKVCEFQFCNDPFLGVYYHKNNKSWMESEFRVYSSANNCTFEYVSQPFLMDLEGKQGNFKNLREFVFKNIDGYFKIYSKHTPINLVRDLPQGFSALEPLVDLPIGINITRFQTLLALHRSYLTPGDSSSGWTAGAAAYYVGYLQPRTFLLKYNENGTITDAVDCALDPLSETKCTLKSFTVEKGIYQTSNFRVQPTESIVRFPNITNLCPFGEVFNATRFTSVYAWNRKRISNCVADYSVLYNSASFSTFKCYGVSPTKLNDLCFTNVYADSFVIRGDEVRQIAPGQTGKIADYNYKLPDDFTGCVIAWNSNNLDSKVGGNYNYLYRLFRKSNLKPFERDISTEIYQAGSTPCNGVEGFNCYFPLQSYGFQPTNGVGYQPYRVVVLSFELLHAPATVCGPKKSTNLVKNKCVNFNFNGLTGTGVLTESNKKFLPFQQFGRDIADTTDAVRDPQTLEILDITPCSFGGVSVITPGTNTSNQVAVLYQDVNCTEVPVAIHADQLTPTWRVYSTGSNVFQTRAGCLIGAEHVNNSYECDIPIGAGICASYQTQTNSPRRARSVASQSIIAYTMSLGAENSVAYSNNSIAIPTNFTISVTTEILPVSMTKTSVDCTMYICGDSTECSNLLLQYGSFCTQLNRALTGIAVEQDKNTQEVFAQVKQIYKTPPIKDFGGFNFSQILPDPSKPSKRSFIEDLLFNKVTLADAGFIKQYGDCLGDIAARDLICAQKFNGLTVLPPLLTDEMIAQYTSALLAGTITSGWTFGAGAALQIPFAMQMAYRFNGIGVTQNVLYENQKLIANQFNSAIGKIQDSLSSTASALGKLQDVVNQNAQALNTLVKQLSSNFGAISSVLNDILSRLDKVEAEVQIDRLITGRLQSLQTYVTQQLIRAAEIRASANLAATKMSECVLGQSKRVDFCGKGYHLMSFPQSAPHGVVFLHVTYVPAQEKNFTTAPAICHDGKAHFPREGVFVSNGTHWFVTQRNFYEPQIITTDNTFVSGNCDVVIGIVNNTVYDPLQPELDSGGGGSDIIKLLNEQVNKEMQSSNLYMSMSSWCYTHSLDGAGLFLFDHAAEEYEHAKKLIIFLNENNVPVQLTSISAPEHKFEGLTQIFQKAYEHEQHISESINNIVDHAIKSKDHATFNFLQWYVAEQHEEEVLFKDILDKIELIGNENHGLYLADQYVKGIAKSRKS

SEQ ID NO: 8697 - protein, 1315 aa, Artificial Sequence
  SARS-CoV-2/Portugal/PT0035/2020__EPI_ISL_418020 spike protein (1-1147) Ferritin construct
MFVFLVLLPLVSSQCVNLTTRTQLPPAYTNSFTRGVYYPDKVFRSSVLHSTQDLFLPFFSNVTWFHAIHVSGTNGTKRFDNPVLPFNDGVYFASTEKSNIIRGWIFGTTLDSKTQSLLIVNNATNVVIKVCEFQFCNDPFLGVYYHKNNKSWMESEFRVYSSANNCTFEYVSQPFLMDLEGKQGNFKNLREFVFKNIDGYFKIYSKHTPINLVRDLPQGFSALEPLVDLPIGINITRFQTLLALHRSYLTPGDSSSGWTAGAAAYYVGYLQPRTFLLKYNENGTITDAVDCALDPLSETKCTLKSFTVEKGIYQTSNFRVQPTESIVRFPNITNLCPFGEVFNATRFASVYAWNRKRISNCVADYSVLYNSASFSTFKCYGVSPTKLNDLCFTNVYADSFVIRGDEVRQIAPGQTGKIADYNYKLPDDFTGCVIAWNSNNLDSKVGGNYNYLYRLFRKSNLKPFERDISTEIYQAGSTPCNGVEGFNCYFPLQSYGFQPTNGVGYQPYRVVVLSFELLHAPATVCGPKKSTNLVKNKCVNFNFNGLTGTGVLTESNKKFLPFQQFGRDIADTTDAVRDPQTLEILDITPCSFGGVSVITPGTNTSNQVAVLYQDVNCTEVPVAIHADQLTPTWRVYSTGSNVFQTRAGCLIGAEHVNNSYECDIPIGAGICASYQTQTNSPRRARSVASQSIIAYTMSLGAENSVAYSNNSIAIPTNFTISVTTEILPVSMTKTSVDCTMYICGDSTECSNLLLQYGSFCTQLNRALTGIAVEQDKNTQEVFAQVKQIYKTPPIKDFGGFNFSQILPDPSKPSKRSFIEDLLFNKVTLADAGFIKQYGDCLGDISARDLICAQKFNGLTVLPPLLTDEMIAQYTSALLAGTITSGWTFGAGAALQIPFAMQMAYRFNGIGVTQNVLYENQKLIANQFNSAIGKIQDSLSSTASALGKLQDVVNQNAQALNTLVKQLSSNFGAISSVLNDILSRLDKVEAEVQIDRLITGRLQSLQTYVTQQLIRAAEIRASANLAATKMSECVLGQSKRVDFCGKGYHLMSFPQSAPHGVVFLHVTYVPAQEKNFTTAPAICHDGKAHFPREGVFVSNGTHWFVTQRNFYEPQIITTDNTFVSGNCDVVIGIVNNTVYDPLQPELDSGGGGSDIIKLLNEQVNKEMQSSNLYMSMSSWCYTHSLDGAGLFLFDHAAEEYEHAKKLIIFLNENNVPVQLTSISAPEHKFEGLTQIFQKAYEHEQHISESINNIVDHAIKSKDHATFNFLQWYVAEQHEEEVLFKDILDKIELIGNENHGLYLADQYVKGIAKSRKS

SEQ ID NO: 8698 - protein, 1315 aa, Artificial Sequence
  SARS-CoV-2/USA/NY-NYUMC7/2020__EPI_ISL_418192 spike protein (1-1147) Ferritin construct
MFVFLVLLPLVSSQCVNLTTRTQLPPAYTNSFTRGVYYPDKVFRSSVLHSTQDLFLPFFSNVTWFHAIHVSGTNGTKRFDNPVLPFNDGVYFASTEKSNIIRGWIFGTTLDSKTQSLLIVNNATNVVIKVCEFQFCNDPFLGVYHHKNNKSWMESEFRVYSSANNCTFEYVSQPFLMDLEGKQGNFKNLREFVFKNIDGYFKIYSKHTPINLVRDLPQGFSALEPLVDLPIGINITRFQTLLALHRSYLTPGDSSSGWTAGAAAYYVGYLQPRTFLLKYNENGTITDAVDCALDPLSETKCTLKSFTVEKGIYQTSNFRVQPTESIVRFPNITNLCPFGEVFNATRFASVYAWNRKRISNCVADYSVLYNSASFSTFKCYGVSPTKLNDLCFTNVYADSFVIRGDEVRQIAPGQTGKIADYNYKLPDDFTGCVIAWNSNNLDSKVGGNYNYLYRLFRKSNLKPFERDISTEIYQAGSTPCNGVEGFNCYFPLQSYGFQPTNGVGYQPYRVVVLSFELLHAPATVCGPKKSTNLVKNKCVNFNFNGLTGTGVLTESNKKFLPFQQFGRDIADTTDAVRDPQTLEILDITPCSFGGVSVITPGTNTSNQVAVLYQGVNCTEVPVAIHADQLTPTWRVYSTGSNVFQTRAGCLIGAEHVNNSYECDIPIGAGICASYQTQTNSPRRARSVASQSIIAYTMSLGAENSVAYSNNSIAIPTNFTISVTTEILPVSMTKTSVDCTMYICGDSTECSNLLLQYGSFCTQLNRALTGIAVEQDKNTQEVFAQVKQIYKTPPIKDFGGFNFSQILPDPSKPSKRSFIEDLLFNKVTLADAGFIKQYGDCLGDIAARDLICAQKFNGLTVLPPLLTDEMIAQYTSALLAGTITSGWTFGAGAALQIPFAMQMAYRFNGIGVTQNVLYENQKLIANQFNSAIGKIQDSLSSTASALGKLQDVVNQNAQALNTLVKQLSSNFGAISSVLNDILSRLDKVEAEVQIDRLITGRLQSLQTYVTQQLIRAAEIRASANLAATKMSECVLGQSKRVDFCGKGYHLMSFPQSAPHGVVFLHVTYVPAQEKNFTTAPAICHDGKAHFPREGVFVSNGTHWFVTQRNFYEPQIITTDNTFVSGNCDVVIGIVNNTVYDPLQPELDSGGGGSDIIKLLNEQVNKEMQSSNLYMSMSSWCYTHSLDGAGLFLFDHAAEEYEHAKKLIIFLNENNVPVQLTSISAPEHKFEGLTQIFQKAYEHEQHISESINNIVDHAIKSKDHATFNFLQWYVAEQHEEEVLFKDILDKIELIGNENHGLYLADQYVKGIAKSRKS

SEQ ID NO: 8699 - protein, 1315 aa, Artificial Sequence
  SARS-CoV-2/Iceland/189/2020__EPI_ISL_417709 spike protein (1-1147) Ferritin construct
MFVFLVLLPLVSSQCVNLTTRTQLPPAYTNSFTRGVYYPDKVFRSSVLHSTQDLFLPFFSNVTWFHAIHVSGTNGTKRFDNPVLPFNDGVYFASTEKSNIIRGWIFGTTLDSKTQSLLIVNNATNVVIKVCEFQFCNDPFLGVYYHKNNKSWMESEFRVYSSANNCTFEYVSQPFLMDLEGKQGNFKNLREFVFKNIDGYFKIYSKHTPINLVRDLPQGFSALEPLVDLPIGINITRFQTLLALHRSYLTPGDSSSGWTAGAAAYYVGYLQPRTFLLKYNENGTITDAVDCALDPLSETKCTLKSFTVEKGIYQTSNFRVQPTESIVRFPNITNLCPFGEVFNATRFASVYAWNRKRISNCVADYSVLYNSASFSTFKCYGVSPTKLNDLCFTNVYADSFVIRGDEVRQIAPGQTGKIADYNYKLPDDFTGCVIAWNSNNLDSKVGGNYNYLYRLFRKSNLKPFERDISTEIYQAGSTPCNGVEGFNCYFPLQSYGFQPTNGVGYQPYRVVVLSFELLHAPATVCGPKKSTNLVKNKCVNFNFNGLTGTGVLTESNKKFLPFQQFGRDIADTTDAVRDPQTLEILDITPCSFGGVSVITPGTNTSNQVAVLYQGVNCTEVPVAIHADQLTPTWRVYSTGSNVFQTRAGCLIGAEHVNNSYECDIPIGAGICASYQTQTNSPRRARSVASQSIIAYTMSLGAENSVAYSNNSIAIPTNFTISVTTEILPVSMTKTSVDCTMYICGDSTECSNLLLQYGSFCTQLNRALTGIAVEQDKNTQEVFAQVKQIYKTPPIKDFGGFNFSQILPDPSKPSKRSFIEDLLFNKVTLADAGFTKQYGDCLGDIAARDLICAQKFNGLTVLPPLLTDEMIAQYTSALLAGTITSGWTFGAGAALQIPFAMQMAYRFNGIGVTQNVLYENQKLIANQFNSAIGKIQDSLSSTASALGKLQDVVNQNAQALNTLVKQLSSNFGAISSVLNDILSRLDKVEAEVQIDRLITGRLQSLQTYVTQQLIRAAEIRASANLAATKMSECVLGQSKRVDFCGKGYHLMSFPQSAPHGVVFLHVTYVPAQEKNFTTAPAICHDGKAHFPREGVFVSNGTHWFVTQRNFYEPQIITTDNTFVSGNCDVVIGIVNNTVYDPLQPELDSGGGGSDIIKLLNEQVNKEMQSSNLYMSMSSWCYTHSLDGAGLFLFDHAAEEYEHAKKLIIFLNENNVPVQLTSISAPEHKFEGLTQIFQKAYEHEQHISESINNIVDHAIKSKDHATFNFLQWYVAEQHEEEVLFKDILDKIELIGNENHGLYLADQYVKGIAKSRKS

SEQ ID NO: 8700 - protein, 1315 aa, Artificial Sequence
  SARS-CoV-2/Australia/NSW56/2020__EPI_ISL_417408 spike protein (1-1147) Ferritin construct
MFVFLVLLPLVSSQCVNLTTRTQLPPAYTNSFTRGVYYPDKVFRSSVLHSTQDLFLPFFSNVTWFHAIHVSGTNGTKRFDNPVLPFNDGVYFASTEKSNIIRGWIFGTTLDSKTQSLLIVNNATNVVIKVCEFQFCNDPFLGVYYHKNNKSWMESEFRVYSSANNCTFEYVSQPFLMDLEGKQGNFKNLREFVFKNIDGYFKIYSKHTPINLVRDLPQGFSALEPLVDLPIGINITRFQTLLALHRSYLTPGDSSSGWTAGAAAYYVGYLQPRTFLLKYNENGTITDAVDCALDPLSETKCTLKSFTVEKGIYQTSNFRVQPTESIVRFPNITNLCPFGEVFNATRFASVYAWNRKRISNCVADYSVLYNSASFSTFKCYGVSPTKLNDLCFTNVYADSFVIRGDEVRQIAPGQTGKIADYNYKLPDDFTGCVIAWNSNNLDSKVGGNYNYLYRLFRKSNLKPFERDISTEIYQAGSTPCNGVEGFNCYFPLQSYGFQPTNGVGYQPYRVVVLSFELLHAPATVCGPKKSTNLVKNKCVNFNFNGLTGTGVLTESNKKFLPFQQFGRDIADTTDAVRDPQTLEILDITPCSFGGVSVITPGTNTSNQVAVLYQDVNCTEVPVAIHADQLTPTWRVYSTGSNVFQTRAGCLIGAEHVNNSYECDIPIGAGICASYQTQTNSPRRARSVASQSIIAYTMSLGAENSVAYSNNSIAIPTNFTISVTTEILPVSMTKTSVDCTMYICGDSTECSNLLLQYGSFCTQLNRALTGIAVEQDKNTQEVFAQVKQIYKTPPIKDFGGFNFSQILPDSSKPSKRSFIEDLLFNKVTLADAGFIKQYGDCLGDIAARDLICAQKFNGLTVLPPLLTDEMIAQYTSALLAGTITSGWTFGAGAALQIPFAMQMAYRFNGIGVTQNVLYENQKLIANQFNSAIGKIQDSLSSTASALGKLQDVVNQNAQALNTLVKQLSSNFGAISSVLNDILSRLDKVEAEVQIDRLITGRLQSLQTYVTQQLIRAAEIRASANLAATKMSECVLGQSKRVDFCGKGYHLMSFPQSAPHGVVFLHVTYVPAQEKNFTTAPAICHDGKAHFPREGVFVSNGTHWFVTQRNFYEPQIITTDNTFVSGNCDVVIGIVNNTVYDPLQPELDSGGGGSDIIKLLNEQVNKEMQSSNLYMSMSSWCYTHSLDGAGLFLFDHAAEEYEHAKKLIIFLNENNVPVQLTSISAPEHKFEGLTQIFQKAYEHEQHISESINNIVDHAIKSKDHATFNFLQWYVAEQHEEEVLFKDILDKIELIGNENHGLYLADQYVKGIAKSRKS

SEQ ID NO: 8701 - protein, 1315 aa, Artificial Sequence
  SARS-CoV-2/Iceland/280/2020__EPI_ISL_417608 spike protein (1-1147) Ferritin construct
MFVFLVLLPLVSSQCVNLTTRTQLPPAYTNSFTRGVYYPDKVFRSSVLHSTQDLFLPFFSNVTWFHAIHVSGTNGTKRFDNPVLPFNDGVYFASTEKSNIIRGWIFGTTLDSKTQSLLIVNNATNVVIKVCEFQFCNDPFLGVYYHKNNKSWMESEFRVYSSANNCTFEYVSQPFLMDLEGKQGNFKNLREFVFKNIDGYFKIYSKHTPINLVRDLPQGFSALEPLVDLPIGINITRFQTLLALHRSYLTPGDSSSGWTAGAAAYYVGYLQPRTFLLKYNENGTITDAVDCALDPLSETKCTLKSFTVEKGIYQTSNFRVQPTESIVRFPNITNLCPFGEVFNATRFASVYAWNRKRISNCVADYSVLYNSASFSTFKCYGVSPTKLNDLCFTNVYADSFVIRGDEVRQIAPGQTGKIADYNYKLPDDFTGCVIAWNSNNLDSKVGGNYNYLYRLFRKSNLKPFERDISTEIYQAGSTPCNGVEGFNCYFPLQSYGFQPTNGVGYQPYRVVVLSFELLHAPATVCGPKKSTNLVKNKCVNFNFNGLTGTGVLTESNKKFLPFQQFGRDIADTTDAVRDPQTLEILDITPCSFGGVSVITPGTNTSNQVAVLYQGVNCTEVPVAIHADQLTPTWRVYSTGSNVFQTRAGCLIGAEHVNNSYECDIPIGAGICASYHTQTNSPRRARSVASQSIIAYTMSLGAENSVAYSNNSIAIPTNFTISVTTEILPVSMTKTSVDCTMYICGDSTECSNLLLQYGSFCTQLNRALTGIAVEQDKNTQEVFAQVKQIYKTPPIKDFGGFNFSQILPDPSKPSKRSFIEDLLFNKVTLADAGFIKQYGDCLGDIAARDLICAQKFNGLTVLPPLLTDEMIAQYTSALLAGTITSGWTFGAGAALQIPFAMQMAYRFNGIGVTQNVLYENQKLIANQFNSAIGKIQDSLSSTASALGKLQDVVNQNAQALNTLVKQLSSNFGAISSVLNDILSRLDKVEAEVQIDRLITGRLQSLQTYVTQQLIRAAEIRASANLAATKMSECVLGQSKRVDFCGKGYHLMSFPQSAPHGVVFLHVTYVPAQEKNFTTAPAICHDGKAHFPREGVFVSNGTHWFVTQRNFYEPQIITTDNTFVSGNCDVVIGIVNNTVYDPLQPELDSGGGGSDIIKLLNEQVNKEMQSSNLYMSMSSWCYTHSLDGAGLFLFDHAAEEYEHAKKLIIFLNENNVPVQLTSISAPEHKFEGLTQIFQKAYEHEQHISESINNIVDHAIKSKDHATFNFLQWYVAEQHEEEVLFKDILDKIELIGNENHGLYLADQYVKGIAKSRKS

SEQ ID NO: 8702 - protein, 1315 aa, Artificial Sequence; identical to SEQ ID NO: 8657
  SARS-CoV-2/Iceland/247/2020__EPI_ISL_417575 spike protein (1-1147) Ferritin construct

SEQ ID NO: 8703 - protein, 1315 aa, Artificial Sequence
  SARS-CoV-2/Iceland/238/2020__EPI_ISL_417566 spike protein (1-1147) Ferritin construct
MFVFLVLLPLVSSQCVNLTTRTQLPPAYTNSFTRGVYYPDKVFRSSVLHSTQDLFLPFFSNVTWFHAIHVSGTNGTKRFDNPVLPFNDGVYFASTEKSNIIRGWIFGTTLDSKTQSLLIVNNATNVVIKVCEFQFCNDPFLGVYYHKNNKSWMESEFRVYSSANNCTFEYVSQPFLMDLEGKQGNFKNLREFVFKNIDGYFKIYSKHTPINLVRDLPQGFSALEPLVDLPIGINITRFQTLLALHRSYLTPGDSSSGWTAGAAAYYVGYLQPRTFLLKYNENGTITDAVDCALDPLSETKCTLKSFTVEKGIYQTSNFRVQPTESIVRFPNITNLCPFGEVFNATRFASVYAWNRKRISNCVADYSVLYNSASFSTFKCYGVSPTKLNDLCFTNVYADSFVIRGDEVRQIAPGQTGKIADYNYKLPDDFTGCVIAWNSNNLDSKVGGNYNYLYRLFRKSNLKPFERDISTEIYQAGSTPCNGVEGFNCYFPLQSYGFQPTNGVGYQPYRVVVLSFELLHAPATVCGPKKSTNLVKNKCVNFNFNGLTGTGVLTESNKKFLPFQQFGRDIADTTDAVRDPQTLEILDITPCSFGGVSVITPGTNTSNQVAVLYQGVNCTEVPVAIHADQLTPTWRVYSTGSNVFQTRAGCLIGAEHVNNSYECDIPIGAGICASYQTQTNSPRRARSVASQSIIAYTMSLGAENSVAYSNNSIAIPTNFTISVTTEILPVSMTKTSVDCTMYICGDSTECSNLLLQYGSFCTQLNRALTGIAVEQDKNTQEVFAQVKQIYKTPPIKDFGGFNFSQILPDPSKPSKRSFIEDLLFNKVTLADVGFIKQYGDCLGDIAARDLICAQKFNGLTVLPPLLTDEMIAQYTSALLAGTITSGWTFGAGAALQIPFAMQMAYRFNGIGVTQNVLYENQKLIANQFNSAIGKIQDSLSSTASALGKLQDVVNQNAQALNTLVKQLSSNFGAISSVLNDILSRLDKVEAEVQIDRLITGRLQSLQTYVTQQLIRAAEIRASANLAATKMSECVLGQSKRVDFCGKGYHLMSFPQSAPHGVVFLHVTYVPAQEKNFTTAPAICHDGKAHFPREGVFVSNGTHWFVTQRNFYEPQIITTDNTFVSGNCDVVIGIVNNTVYDPLQPELDSGGGGSDIIKLLNEQVNKEMQSSNLYMSMSSWCYTHSLDGAGLFLFDHAAEEYEHAKKLIIFLNENNVPVQLTSISAPEHKFEGLTQIFQKAYEHEQHISESINNIVDHAIKSKDHATFNFLQWYVAEQHEEEVLFKDILDKIELIGNENHGLYLADQYVKGIAKSRKS

SEQ ID NO: 8704 - protein, 1315 aa, Artificial Sequence
  SARS-CoV-2/Greece/16/2020__EPI_ISL_418265 spike protein (1-1147) Ferritin construct
MFVFLVLLPLVSSQCVNLTTRTQLPPAYTNSFTRGVYYPDKVFRSSVLHSTQDLFLPFFSNVTWFHAIHVSGTNGTKRFDNPVLPFNDGVYFASTEKSNIIRGWIFGTTLDSKTQSLLIVNNATNVVIKVCEFQFCNDPFLGVYYHKNNKSWMESEFRVYSSANNCTFEYVSQPFLMDLEGKQGNFKNLREFVFKNVDGYFKIYSKHTPINLVRDLPQGFSALEPLVDLPIGINITRFQTLLALHRSYLTPGDSSSGWTAGAAAYYVGYLQPRTFLLKYNENGTITDAVDCALDPLSETKCTLKSFTVEKGIYQTSNFRVQPTESIVRFPNITNLCPFGEVFNATRFASVYAWNRKRISNCVADYSVLYNSASFSTFKCYGVSPTKLNDLCFTNVYADSFVIRGDEVRQIAPGQTGKIADYNYKLPDDFTGCVIAWNSNNLDSKVGGNYNYLYRLFRKSNLKPFERDISTEIYQAGSTPCNGVEGFNCYFPLQSYGFQPTNGVGYQPYRVVVLSFELLHAPATVCGPKKSTNLVKNKCVNFNFNGLTGTGVLTESNKKFLPFQQFGRDIADTTDAVRDPQTLEILDITPCSFGGVSVITPGTNTSNQVAVLYQDVNCTEVPVAIHADQLTPTWRVYSTGSNVFQTRAGCLIGAEHVNNSYECDIPIGAGICASYQTQTNSPRRARSVASQSIIAYTMSLGAENSVAYSNNSIAIPTNFTISVTTEILPVSMTKTSVDCTMYICGDSTECSNLLLQYGSFCTQLNRALTGIAVEQDKNTQEVFAQVKQIYKTPPIKDFGGFNFSQILPDPSKPSKRSFIEDLLFNKVTLADAGFIKQYGDCLGDIAARDLICAQKFNGLTVLPPLLTDEMIAQYTSALLAGTITSGWTFGAGAALQIPFAMQMAYRFNGIGVTQNVLYENQKLIANQFNSAIGKIQDSLSSTASALGKLQDVVNQNAQALNTLVKQLSSNFGAISSVLNDILSRLDKVEAEVQIDRLITGRLQSLQTYVTQQLIRAAEIRASANLAATKMSECVLGQSKRVDFCGKGYHLMSFPQSAPHGVVFLHVTYVPAQEKNFTTAPAICHDGKAHFPREGVFVSNGTHWFVTQRNFYEPQIITTDNTFVSGNCDVVIGIVNNTVYDPLQPELDSGGGGSDIIKLLNEQVNKEMQSSNLYMSMSSWCYTHSLDGAGLFLFDHAAEEYEHAKKLIIFLNENNVPVQLTSISAPEHKFEGLTQIFQKAYEHEQHISESINNIVDHAIKSKDHATFNFLQWYVAEQHEEEVLFKDILDKIELIGNENHGLYLADQYVKGIAKSRKS

SEQ ID NO: 8705 - protein, 1315 aa, Artificial Sequence
  SARS-CoV-2/Iceland/319/2020__EPI_ISL_417648 spike protein (1-1147) Ferritin construct
MFVFLVLLPLVSSQCVNLTTRTQLPPAYTNSFTRGVYYPDKVFRSSVLHSTQDLFLPFFSNVTWFHAIHVSGTNGTKRFDNPVLPFNDGVYFASTEKSNIIRGWIFGTTLDSKTQSLLIVNNATNVVIKVCEFQFCNDPFLGVYYHKNNKSWMESEFRVYSSANNCTFEYVSQPFLIDLEGKQGNFKNLREFVFKNIDGYFKIYSKHTPINLVRDLPQGFSALEPLVDLPIGINITRFQTLLALHRSYLTPGDSSSGWTAGAAAYYVGYLQPRTFLLKYNENGTITDAVDCALDPLSETKCTLKSFTVEKGIYQTSNFRVQPTESIVRFPNITNLCPFGEVFNATRFASVYAWNRKRISNCVADYSVLYNSASFSTFKCYGVSPTKLNDLCFTNVYADSFVIRGDEVRQIAPGQTGKIADYNYKLPDDFTGCVIAWNSNNLDSKVGGNYNYLYRLFRKSNLKPFERDISTEIYQAGSTPCNGVEGFNCYFPLQSYGFQPTNGVGYQPYRVVVLSFELLHAPATVCGPKKSTNLVKNKCVNFNFNGLTGTGVLTESNKKFLPFQQFGRDIADTTDAVRDPQTLEILDITPCSFGGVSVITPGTNTSNQVAVLYQGVNCTEVPVAIHADQLTPTWRVYSTGSNVFQTRAGCLIGAEHVNNSYECDIPIGAGICASYQTQTNSPRRARSVASQSIIAYTMSLGAENSVAYSNNSIAIPTNFTISVTTEILPVSMTKTSVDCTMYICGDSTECSNLLLQYGSFCTQLNRALTGIAVEQDKNTQEVFAQVKQIYKTPPIKDFGGFNFSQILPDPSKPSKRSFIEDLLFNKVTLADAGFIKQYGDCLGDIAARDLICAQKFNGLTVLPPLLTDEMIAQYTSALLAGTITSGWTFGAGAALQIPFAMQMAYRFNGIGVTQNVLYENQKLIANQFNSAIGKIQDSLSSTASALGKLQDVVNQNAQALNTLVKQLSSNFGAISSVLNDILSRLDKVEAEVQIDRLITGRLQSLQTYVTQQLIRAAEIRASANLAATKMSECVLGQSKRVDFCGKGYHLMSFPQSAPHGVVFLHVTYVPAQEKNFTTAPAICHDGKAHFPREGVFVSNGTHWFVTQRNFYEPQIITTDNTFVSGNCDVVIGIVNNTVYDPLQPELDSGGGGSDIIKLLNEQVNKEMQSSNLYMSMSSWCYTHSLDGAGLFLFDHAAEEYEHAKKLIIFLNENNVPVQLTSISAPEHKFEGLTQIFQKAYEHEQHISESINNIVDHAIKSKDHATFNFLQWYVAEQHEEEVLFKDILDKIELIGNENHGLYLADQYVKGIAKSRKS

SEQ ID NO: 8706 - protein, 1315 aa, Artificial Sequence
  SARS-CoV-2/Congo/94/2020__EPI_ISL_417947 spike protein (1-1147) Ferritin construct
MFVFLVLLPLVSSQCVNLTTRTQLPPAYTNSFTRGVYYPDKVFRSSVLHSTQDLFLPFFSNVTWFHAIHVSGTNGTKRFDNPVLPFNDGVYFASTEKSNIIRGWIFGTTLDSKTQSLLIVNNATNVVIKVCEFQFCNDPFLGVYYHKNNKSWMESEFRVYSSANNCTFEYVSQPFLMDLEGKQGNFKNLREFVFKNIDGYFKIYSKHTPINLVRDLPQGFSALEPLVDLPIGINITRFQTLLALHRSYLTPGDSSSGWTAGAAAYYVGYLQPRTFLLKYNENGTITDAVDCALDPLSETKCTLKSFTVEKGIYQTSNFRVQPTESIVRFPNITNLCPFGEVFNATRFASVYAWNRKRISNCVADYSVLYNSASFSTFKCYGVSPTKLNDLCFTNVYADSFVIRGDEVRQIAPGQTGKIADYNYKLPDDFTGCVIAWNSNNLDSKVGGNYNYLYRLFRKSNLKPFERDISTEIYQAGSTPCNGVEGFNCYFPLQSYGFQPTNGVGYQPYRVVVLSFELLHAPATVCGPKKSTNLVKNKCVNFNFNGLTGTGVLTESNKKFLPFQQFGRDIADTTDAVRDPQTLEILDITPCSFGGVSVITPGTNTSNQVAVLYQGVNCTEVPVAIHADQLTPTWRVYSTGSNVFQTRAGCLIGAEHVNNSYECDIPIGAGICASYQTQTNSPRRARSVASQSIIAYTMSLGAENSVAYSNNSIAIPTNFTISVTTEILPVSMTKTSVDCTMYICGDSTECSNLLLQYGSFCTQLNRALTGIAVEQDKNTQEVFAQVKQIYKTPPIKDFGGFNFSQILPDPSKPSKRSFIEDILFNKVTLADAGFIKQYGDCLGDIAARDLICAQKFNGLTVLPPLLTDEMIAQYTSALLAGTITSGWTFGAGAALQIPFAMQMAYRFNGIGVTQNVLYENQKLIANQFNSAIGKIQDSLSSTASALGKLQDVVNQNAQALNTLVKQLSSNFGAISSVLNDILSRLDKVEAEVQIDRLITGRLQSLQTYVTQQLIRAAEIRASANLAATKMSECVLGQSKRVDFCGKGYHLMSFPQSAPHGVVFLHVTYVPAQEKNFTTAPAICHDGKAHFPREGVFVSNGTHWFVTQRNFYEPQIITTDNTFVSGNCDVVIGIVNNTVYDPLQPELDSGGGGSDIIKLLNEQVNKEMQSSNLYMSMSSWCYTHSLDGAGLFLFDHAAEEYEHAKKLIIFLNENNVPVQLTSISAPEHKFEGLTQIFQKAYEHEQHISESINNIVDHAIKSKDHATFNFLQWYVAEQHEEEVLFKDILDKIELIGNENHGLYLADQYVKGIAKSRKS

SEQ ID NO: 8707 - protein, 1315 aa, Artificial Sequence
  SARS-CoV-2/Congo/158/2020__EPI_ISL_417950 spike protein (1-1147) Ferritin construct
MFVFLVLLPLVSSQCVNLTTRTQLPPAYTNSFTRGVYYPDKVFRSSVLHSTQDLFLPFFSNVTWFHAIHVSGTNGTKRFDNPVLPFNDGVYFASTEKSNIIRGWIFGTTLDSKTQSLLIVNNATNVVIKVCEFQFCNDPFLGVYYHKNNKSWMESEFRVYSSANNCTFEYVSQPFLMDLEGKQGNFKNLREFVFKNIDGYFKIYSKHTPINLVRDLPQGFSALEPLVDLPIGINITRFQTLLALHRSYLTPGDSSSGWTAGAAAYYVGYLQPRTFLLKYNENGTITDAVDCALDPLSETKCTLKSFTVEKGIYQTSNFRVQPTESIVRFPNITNLCPFGEVFNATRFASVYAWNRKRISNCVADYSVLYNSASFSTFKCYGVSPTKLNDLCFTNVYADSFVIRGDEVRQIAPGQTGKIADYNYKLPDDFTGCVIAWNSNNLDSKVGGNYNYLYRLFRKSNLKPFERDISTEIYQAGSTPCNGVEGFNCYFPLQSYGFQPTNGVGYQPYRVVVLSFELLHAPATVCGPKKSTNLVKNKCVNFNFNGLTGTGVLTESNKKFLPFQQFGRDIADTTDAVRDPQTLEILDITPCSFGGVSVITPGTNTSNQVAVLYQDVNCTEVPVAIHADQLTPTWRVYSTGSNVFQTRAGCLIGAEHVNNSYECDIPIGAGICASYQTQTNSPRRARSVASQSIIAYTMSLGAENSVAYSNNSIAIPTNFTISVTTEILPVSMTKTSVDCTMYICGDSTECSNLLLQYGSFCTQLNRALTGIAVEQDKNTQEVFAQVKQIYKTPPIKDFGGFNFSQILPDPSKPSKRSFIEDLLFNKVTLADAGFIKQYGDCLGDIAARDLICAQKFNGLTVLPPLLTDEMIAQYTSALLAGTITSGWTFGAGAALQIPFAMQMAYRFNGIGVTQNVLYENQKLIANQFNSAIGKIQDSLSSTASALGKLQDVVNQNAQALNTLVKQLSSNFGAISSVLNDILSRLDKVEAEVQIDRLITGRLQSLQTYVTQQLIRAAEIRASANLAATKMSECVLGQSKRVDFCGKGYHLMSFPQSAPHGVVFLHVTYVPAQEKNFTTAPAICHDGKAHFPREGVFVSNGTHWFVTQRNFYEPQIITTDNTFLSGNCDVVIGIVNNTVYDPLQPELDSGGGGSDIIKLLNEQVNKEMQSSNLYMSMSSWCYTHSLDGAGLFLFDHAAEEYEHAKKLIIFLNENNVPVQLTSISAPEHKFEGLTQIFQKAYEHEQHISESINNIVDHAIKSKDHATFNFLQWYVAEQHEEEVLFKDILDKIELIGNENHGLYLADQYVKGIAKSRKS

SEQ ID NO: 8708 - protein, 1315 aa, Artificial Sequence
  SARS-CoV-2/USA/UT-00034/2020__EPI_ISL_417977 spike protein (1-1147) Ferritin construct
MFVFLVLLPLVSSQCVNLTTRTQLPPAYTNSFTRGVYYPDKVFRSSVLHSTQDLFLPFFSNVTWFHAIHVSGTNGTKRFDNPVLPFNDGVYFASTEKSNIIRGWIFGTTLDSKTQSLLIVNNATNVVIKVCEFQFCNDPFLGVYYYKNNKSWMESEFRVYSSANNCTFEYVSQPFLMDLEGKQGNFKNLREFVFKNIDGYFKIYSKHTPINLVRDLPQGFSALEPLVDLPIGINITRFQTLLALHRSYLTPGDSSSGWTAGAAAYYVGYLQPRTFLLKYNENGTITDAVDCALDPLSETKCTLKSFTVEKGIYQTSNFRVQPTESIVRFPNITNLCPFGEVFNATRFASVYAWNRKRISNCVADYSVLYNSASFSTFKCYGVSPTKLNDLCFTNVYADSFVIRGDEVRQIAPGQTGKIADYNYKLPDDFTGCVIAWNSNNLDSKVGGNYNYLYRLFRKSNLKPFERDISTEIYQAGSTPCNGVEGFNCYFPLQSYGFQPTNGVGYQPYRVVVLSFELLHAPATVCGPKKSTNLVKNKCVNFNFNGLTGTGVLTESNKKFLPFQQFGRDIADTTDAVRDPQTLEILDITPCSFGGVSVITPGTNTSNQVAVLYQGVNCTEVPVAIHADQLTPTWRVYSTGSNVFQTRAGCLIGAEHVNNSYECDIPIGAGICASYQTQTNSPRRARSVASQSIIAYTMSLGAENSVAYSNNSIAIPTNFTISVTTEILPVSMTKTSVDCTMYICGDSTECSNLLLQYGSFCTQLNRALTGIAVEQDKNTQEVFAQVKQIYKTPPIKDFGGFNFSQILPDPSKPSKRSFIEDLLFNKVTLADAGFIKQYGDCLGDIAARDLICAQKFNGLTVLPPLLTDEMIAQYTSALLAGTITSGWTFGAGAALQIPFAMQMAYRFNGIGVTQNVLYENQKLIANQFNSAIGKIQDSLSSTASALGKLQDVVNQNAQALNTLVKQLSSNFGAISSVLNDILSRLDKVEAEVQIDRLITGRLQSLQTYVTQQLIRAAEIRASANLAATKMSECVLGQSKRVDFCGKGYHLMSFPQSAPHGVVFLHVTYVPAQEKNFTTAPAICHDGKAHFPREGVFVSNGTHWFVTQRNFYEPQIITTDNTFVSGNCDVVIGIVNNTVYDPLQPELDSGGGGSDIIKLLNEQVNKEMQSSNLYMSMSSWCYTHSLDGAGLFLFDHAAEEYEHAKKLIIFLNENNVPVQLTSISAPEHKFEGLTQIFQKAYEHEQHISESINNIVDHAIKSKDHATFNFLQWYVAEQHEEEVLFKDILDKIELIGNENHGLYLADQYVKGIAKSRKS

SEQ ID NO: 8709 - protein, 1315 aa, Artificial Sequence
  SARS-CoV-2/USA/UT-00033/2020__EPI_ISL_417976 spike protein (1-1147) Ferritin construct
MFVFLVLLPLVSSQCVNLTTRTQLPPAYTNSFTRGVYYPDKVFRSSVLHSTQDLFLPFFSNVTWFHAIHVSGTNGTKRFDNPVLPFNDGVYFASTEKSNIIRGWIFGTTLDSKTQSLLIVNNATNVVIKVCEFQFCNDPFLGVYYHKNNKSWMESEFRVYSSANNCTFEYVSQPFLMDLEGKQGNFKNLREFVFKNIDGYFKIYSKHTPINLVRDLPQGFSALEPLVDLPIGINITRFQTLLALHRSYLTPGDSSSGLTAGAAAYYVGYLQPRTFLLKYNENGTITDAVDCALDPLSETKCTLKSFTVEKGIYQTSNFRVQPTESIVRFPNITNLCPFGEVFNATRFASVYAWNRKRISNCVADYSVLYNSASFSTFKCYGVSPTKLNDLCFTNVYADSFVIRGDEVRQIAPGQTGKIADYNYKLPDDFTGCVIAWNSNNLDSKVGGNYNYLYRLFRKSNLKPFERDISTEIYQAGSTPCNGVEGFNCYFPLQSYGFQPTNGVGYQPYRVVVLSFELLHAPATVCGPKKSTNLVKNKCVNFNFNGLTGTGVLTESNKKFLPFQQFGRDIADTTDAVRDPQTLEILDITPCSFGGVSVITPGTNTSNQVAVLYQGVNCTEVPVAIHADQLTPTWRVYSTGSNVFQTRAGCLIGAEHVNNSYECDIPIGAGICASYQTQTNSPRRARSVASQSIIAYTMSLGAENSVAYSNNSIAIPTNFTISVTTEILPVSMTKTSVDCTMYICGDSTECSNLLLQYGSFCTQLNRALTGIAVEQDKNTQEVFAQVKQIYKTPPIKDFGGFNFSQILPDPSKPSKRSFIEDLLFNKVTLADAGFIKQYGDCLGDIAARDLICAQKFNGLTVLPPLLTDEMIAQYTSALLAGTITSGWTFGAGAALQIPFAMQMAYRFNGIGVTQNVLYENQKLIANQFNSAIGKIQDSLSSTASALGKLQDVVNQNAQALNTLVKQLSSNFGAISSVLNDILSRLDKVEAEVQIDRLITGRLQSLQTYVTQQLIRAAEIRASANLAATKMSECVLGQSKRVDFCGKGYHLMSFPQSAPHGVVFLHVTYVPAQEKNFTTAPAICHDGKAHFPREGVFVSNGTHWFVTQRNFYEPQIITTDNTFVSGNCDVVIGIVNNTVYDPLQPELDSGGGGSDIIKLLNEQVNKEMQSSNLYMSMSSWCYTHSLDGAGLFLFDHAAEEYEHAKKLIIFLNENNVPVQLTSISAPEHKFEGLTQIFQKAYEHEQHISESINNIVDHAIKSKDHATFNFLQWYVAEQHEEEVLFKDILDKIELIGNENHGLYLADQYVKGIAKSRKS

SEQ ID NO: 8710 - protein, 1315 aa, Artificial Sequence
  SARS-CoV-2/USA/WI-13/2020__EPI_ISL_417516 spike protein (1-1147) Ferritin construct
MFVFLVLLPLVSSQCVNLTTRTQLPPAYTNSFTRGVYYPDKVFRSSVLHSTQDLFLPFFSNVTWFHAIHVSGTNGTKRFDNPVLPFNDGVYFASTEKSNIIRGWIFGTTLDSKTQSLLIVNNATNVVIKVCEFQFCNDPFLGVYYHKNNKSWMESEFRVYSSANNCTFEYVSQPFLMDLEGKQGNFKNLREFVFKNIDGYFKIYSKHTPINLVRDLPQGFSALEPLVDLPIGINITRFQTLLALHRSYLTPGDSSSGWTAGAAAYYVGYLQPRTFLLKYNENGTITDAVDCALDPLSETKCTLKSFTVEKGIYQTSNFRVLPTESIVRFPNITNLCPFGEVFNATRFASVYAWNRKRISNCVADYSVLYNSASFSTFKCYGVSPTKLNDLCFTNVYADSFVIRGDEVRQIAPGQTGKIADYNYKLPDDFTGCVIAWNSNNLDSKVGGNYNYLYRLFRKSNLKPFERDISTEIYQAGSTPCNGVEGFNCYFPLQSYGFQPTNGVGYQPYRVVVLSFELLHAPATVCGPKKSTNLVKNKCVNFNFNGLTGTGVLTESNKKFLPFQQFGRDIADTTDAVRDPQTLEILDITPCSFGGVSVITPGTNTSNQVAVLYQGVNCTEVPVAIHADQLTPTWRVYSTGSNVFQTRAGCLIGAEHVNNSYECDIPIGAGICASYQTQTNSPRRARSVASQSIIAYTMSLGAENSVAYSNNSIAIPTNFTISVTTEILPVSMTKTSVDCTMYICGDSTECSNLLLQYGSFCTQLNRALTGIAVEQDKNTQEVFAQVKQIYKTPPIKDFGGFNFSQILPDPSKPSKRSFIEDLLFNKVTLADAGFIKQYGDCLGDIAARDLICAQKFNGLTVLPPLLTDEMIAQYTSALLAGTITSGWTFGAGAALQIPFAMQMAYRFNGIGVTQNVLYENQKLIANQFNSAIGKIQDSLSSTASALGKLQDVVNQNAQALNTLVKQLSSNFGAISSVLNDILSRLDKVEAEVQIDRLITGRLQSLQTYVTQQLIRAAEIRASANLAATKMSECVLGQSKRVDFCGKGYHLMSFPQSAPHGVVFLHVTYVPAQEKNFTTAPAICHDGKAHFPREGVFVSNGTHWFVTQRNFYEPQIITTDNTFVSGNCDVVIGIVNNTVYDPLQPELDSGGGGSDIIKLLNEQVNKEMQSSNLYMSMSSWCYTHSLDGAGLFLFDHAAEEYEHAKKLIIFLNENNVPVQLTSISAPEHKFEGLTQIFQKAYEHEQHISESINNIVDHAIKSKDHATFNFLQWYVAEQHEEEVLFKDILDKIELIGNENHGLYLADQYVKGIAKSRKS

SEQ ID NO: 8711 - protein, 1314 aa, Artificial Sequence
  SARS-CoV-2/India/1-27/2020__EPI_ISL_413522 spike protein (1-1146) Ferritin construct
MFVFLVLLPLVSSQCVNLTTRTQLPPAYTNSFTRGVYYPDKVFRSSVLHSTQDLFLPFFSNVTWFHAIHVSGTNGTKRFDNPVLPFNDGVYFASTEKSNIIRGWIFGTTLDSKTQSLLIVNNATNVVIKVCEFQFCNDPFLGVYHKNNKSWMESEFRVYSSANNCTFEYVSQPFLMDLEGKQGNFKNLREFVFKNIDGYFKIYSKHTPINLVRDLPQGFSALEPLVDLPIGINITRFQTLLALHRSYLTPGDSSSGWTAGAAAYYVGYLQPRTFLLKYNENGTITDAVDCALDPLSETKCTLKSFTVEKGIYQTSNFRVQPTESIVRFPNITNLCPFGEVFNATRFASVYAWNRKRISNCVADYSVLYNSASFSTFKCYGVSPTKLNDLCFTNVYADSFVIRGDEVIQIAPGQTGKIADYNYKLPDDFTGCVIAWNSNNLDSKVGGNYNYLYRLFRKSNLKPFERDISTEIYQAGSTPCNGVEGFNCYFPLQSYGFQPTNGVGYQPYRVVVLSFELLHAPATVCGPKKSTNLVKNKCVNFNFNGLTGTGVLTESNKKFLPFQQFGRDIADTTDAVRDPQTLEILDITPCSFGGVSVITPGTNTSNQVAVLYQDVNCTEVPVAIHADQLTPTWRVYSTGSNVFQTRAGCLIGAEHVNNSYECDIPIGAGICASYQTQTNSPRRARSVASQSIIAYTMSLGAENSVAYSNNSIAIPTNFTISVTTEILPVSMTKTSVDCTMYICGDSTECSNLLLQYGSFCTQLNRALTGIAVEQDKNTQEVFAQVKQIYKTPPIKDFGGFNFSQILPDPSKPSKRSFIEDLLFNKVTLADAGFIKQYGDCLGDIAARDLICAQKFNGLTVLPPLLTDEMIAQYTSALLAGTITSGWTFGAGAALQIPFAMQMAYRFNGIGVTQNVLYENQKLIANQFNSAIGKIQDSLSSTASALGKLQDVVNQNAQALNTLVKQLSSNFGAISSVLNDILSRLDKVEAEVQIDRLITGRLQSLQTYVTQQLIRAAEIRASANLAATKMSECVLGQSKRVDFCGKGYHLMSFPQSAPHGVVFLHVTYVPAQEKNFTTAPAICHDGKAHFPREGVFVSNGTHWFVTQRNFYEPQIITTDNTFVSGNCDVVIGIVNNTVYDPLQPELDSGGGGSDIIKLLNEQVNKEMQSSNLYMSMSSWCYTHSLDGAGLFLFDHAAEEYEHAKKLIIFLNENNVPVQLTSISAPEHKFEGLTQIFQKAYEHEQHISESINNIVDHAIKSKDHATFNFLQWYVAEQHEEEVLFKDILDKIELIGNENHGLYLADQYVKGIAKSRKS

SEQ ID NO: 8712 - protein, 1309 aa, Artificial Sequence
  SARS-CoV-2/pangolin/Guangxi/P4L/2017__EPI_ISL_410538 spike protein (1-1141) Ferritin construct
MFVFLFVLPLVSSQCVNLTTRTGIPPGYTNSSTRGVYYPDKVFRSSILHLTQDLFLPFFSNVTWFNTINYQGGFKKFDNPVLPFNDGVYFASTEKSNIIRGWIFGTTLDARTQSLLIVNNATNVVIKVCEFQFCTDPFLGVYYHNNNKTWVENEFRVYSSANNCTFEYISQPFLMDLEGKQGNFKNLREFVFKNVDGYFKIYSKHTPIDLVRDLPRGFAALEPLVDLPIGINITRFQTLLALHRSYLTPGNLESGWTTGAAAYYVGYLQQRTFLLSYNQNGTITDAVDCSLDPLSETKCTLKSLTVEKGIYQTSNFRVQPTISIVRFPNITNLCPFGEVFNASKFASVYAWNRKRISNCVADYSVLYNSTSFSTFKCYGVSPTKLNDLCFTNVYADSFVVKGDEVRQIAPGQTGVIADYNYKLPDDFTGCVIAWNSVKQDALTGGNYGYLYRLFRKSKLKPFERDISTEIYQAGSTPCNGQVGLNCYYPLERYGFHPTTGVNYQPFRVVVLSFELLNGPATVCGPKLSTTLVKDKCVNFNFNGLTGTGVLTTSKKQFLPFQQFGRDISDTTDAVRDPQTLEILDITPCSFGGVSVITPGTNTSNQVAVLYQDVNCTEVPMAIHAEQLTPAWRVYSAGANVFQTRAGCLVGAEHVNNSYECDIPVGAGICASYHSMSSLRSVNQRSIIAYTMSLGAENSVAYSNNSIAIPTNFTISVTTEILPVSMTKTSVDCTMYICGDSIECSNLLLQYGSFCTQLNRALTGIAVEQDKNTQEVFAQVKQIYKTPPIKDFGGFNFSQILPDPSKPSKRSFIEDLLFNKVTLADAGFIKQYGDCLGDIAARDLICAQKFNGLTVLPPLLTDEMIAQYTSALLAGTITSGWTFGAGAALQIPFAMQMAYRFNGIGVTQNVLYENQKLIANQFNSAIGKIQDSLSSTASALGKLQDVVNQNAQALNTLVKQLSSNFGAISSVLNDILSRLDKVEAEVQIDRLITGRLQSLQTYVTQQLIRAAEIRASANLAATKMSECVLGQSKRVDFCGKGYHLMSFPQSAPHGVVFLHVTYVPAQEKNFTTAPAICHEGKAHFPREGVFVSNGTHWFITQRNFYEPQIITTDNTFVSGSCDVVIGIVNNTVYDPLQPELDSGGGGSDIIKLLNEQVNKEMQSSNLYMSMSSWCYTHSLDGAGLFLFDHAAEEYEHAKKLIIFLNENNVPVQLTSISAPEHKFEGLTQIFQKAYEHEQHISESINNIVDHAIKSKDHATFNFLQWYVAEQHEEEVLFKDILDKIELIGNENHGLYLADQYVKGIAKSRKS

SEQ ID NO: 8713 - protein, 1309 aa, Artificial Sequence
  SARS-CoV-2/pangolin/Guangxi/P5L/2017__EPI_ISL_410540 spike protein (1-1141) Ferritin construct
MFVFLFVLPLVSSQCVNLTTRTGIPPGYTNSSTRGVYYPDKVFRSSILHLTQDLFLPFFSNVTWFNTINYQGGFKKFDNPVLPFNDGVYFASTEKSNIIRGWIFGTTLDARTQSLLIVNNATNVVIKVCEFQFCTDPFLGVYYHNNNKTWVENEFRVYSSANNCTFEYISQPFLMDLEGKQGNFKNLREFVFKNVDGYFKIYSKHTPIDLVRDLPRGFAALEPLVDLPIGINITRFQTLLALHRSYLTPGKLESGWTTGAAAYYVGYLQQRTFLLSYNQNGTITDAVDCSLDPLSETKCTLKSLTVEKGIYQTSNFRVQPTISIVRFPNITNLCPFGEVFNASKFASVYAWNRKRISNCVADYSVLYNSTSFSTFKCYGVSPTKLNDLCFTNVYADSFVVKGDEVRQIAPGQTGVIADYNYKLPDDFTGCVIAWNSVKQDALTGGNYGYLYRLFRKSKLKPFERDISTEIYQAGSTPCNGQVGLNCYYPLERYGFHPTTGVNYQPFRVVVLSFELLNGPATVCGPKLSTTLVKDKCVNFNFNGLTGTGVLTTSKKQFLPFQQFGRDISDTTDAVRDPQTLEILDITPCSFGGVSVITPGTNTSNQVAVLYQDVNCTEVPMAIHAEQLTPAWRVYSAGANVFQTRAGCLVGAEHVNNSYECDIPVGAGICASYHSMSSFRSVNQRSIIAYTMSLGAENSVAYSNNSIAIPTNFTISVTTEILPVSMTKTSVDCTMYICGDSIECSNLLLQYGSFCTQLNRALTGIAVEQDKNTQEVFAQVKQIYKTPPIKDFGGFNFSQILPDPSKPSKRSFIEDLLFNKVTLADAGFIKQYGDCLGDIAARDLICAQKFNGLTVLPPLLTDEMIAQYTSALLAGTITSGWTFGAGAALQIPFAMQMAYRFNGIGVTQNVLYENQKLIANQFNSAIGKIQDSLSSTASALGKLQDVVNQNAQALNTLVKQLSSNFGAISSVLNDILSRLDKVEAEVQIDRLITGRLQSLQTYVTQQLIRAAEIRASANLAATKMSECVLGQSKRVDFCGKGYHLMSFPQSAPHGVVFLHVTYVPAQEKNFTTAPAICHEGKAHFPREGVFVSNGTHWFITQRNFYEPQIITTDNTFVSGSCDVVIGIVNNTVYDPLQPELDSGGGGSDIIKLLNEQVNKEMQSSNLYMSMSSWCYTHSLDGAGLFLFDHAAEEYEHAKKLIIFLNENNVPVQLTSISAPEHKFEGLTQIFQKAYEHEQHISESINNIVDHAIKSKDHATFNFLQWYVAEQHEEEVLFKDILDKIELIGNENHGLYLADQYVKGIAKSRKS

SEQ ID NO: 8714 - protein, 1309 aa, Artificial Sequence
  SARS-CoV-2/pangolin/Guangxi/P5E/2017__EPI_ISL_410541 spike protein (1-1141) Ferritin construct
MFVFLFVLPLVSSQCVNLTTRTGIPPGYTNSSTRGVYYPDKVFRSSILHLTQDLFLPFFSNVTWFNTITYQGGSKKFDNPVLPFNDGVYFASTEKSNIIRGWIFGTTLDARTQSLLIVNNATNVVIKVCEFQFCTDPFLGVYYHNNNKTWVENEFRVYSSANNCTFEYISQPFLMDLEGKQGNFKNLREFVFKNVDGYFKIYSKHTPIDLVRDLPRGFAALEPLVDLPIGINITRFQTLLALHRSYLTPGKLESGWTTGAAAYYVGYLQQRTFLLSYNQNGTITDAVDCSLDPLSETKCTLKSLTVEKGIYQTSNFRVQPTISIVRFPNITNLCPFGEVFNASKFASVYAWNRKRISNCVADYSVLYNSTSFSTFKCYGVSPTKLNDLCFTNVYADSFVVKGDEVRQIAPGQTGVIADYNYKLPDDFTGCVIAWNSVKQDALTGDNYGYLYRLFRKSKLKPFERDISTEIYQAGSTPCNGQVGLNCYYPLERYGFHPTTGVNYQPFRVVVLSFELLNGPATVCGPKLSTTLVKDKCVNFNFNGLTGTGVLTTSKKQFLPFQQFGRDISDTTDAVRDPQTLEILDITPCSFGGVSVITPGTNTSNQVAVLYQDVNCTEVPMAIHAEQLTPAWRVYSAGANVFQTRAGCLVGAEHVNNSYECDIPVGAGICASYHSMSSFRSVNQRSIIAYTMSLGAENSVAYSNNSIAIPTNFTISVTTEILPVSMTKTSVDCTMYICGDSIECSNLLLQYGSFCTQLNRALTGIAVEQDKNTQEVFAQVKQIYKTPPIKDFGGFNFSQILPDPSKPSKRSFIEDLLFNKVTLADAGFIKQYGDCLGDIAARDLICAQKFNGLTVLPPLLTDEMIAQYTSALLAGTITSGWTFGAGAALQIPFAMQMAYRFNGIGVTQNVLYENQKLIANQFNSAIGKIQDSLSSTASALGKLQDVVNQNAQALNTLVKQLSSNFGAISSVLNDILSRLDKVEAEVQIDRLITGRLQSLQTYVTQQLIRAAEIRASANLAATKMSECVLGQSKRVDFCGKGYHLMSFPQSAPHGVVFLHVTYVPAQEKNFTTAPAICHEGKAHFPREGVFVSNGTHWFITQRNFYEPQIITTDNTFVSGSCDVVIGIVNNTVYDPLQPELDSGGGGSDIIKLLNEQVNKEMQSSNLYMSMSSWCYTHSLDGAGLFLFDHAAEEYEHAKKLIIFLNENNVPVQLTSISAPEHKFEGLTQIFQKAYEHEQHISESINNIVDHAIKSKDHATFNFLQWYVAEQHEEEVLFKDILDKIELIGNENHGLYLADQYVKGIAKSRKS

SEQ ID NO: 8715 - protein, 1307 aa, Artificial Sequence
  SARS-CoV-2/pangolin/Guangxi/P1E/2017__EPI_ISL_410539 spike protein (1-1139) Ferritin construct
MFVFLFVLPLVSSQCVNLTTRTGIQPGYTNSSTRGVYYPDKVFRSSILHLTQDLFLPFFSNVTWFNTINYQGGFKKFDNPVLPFNDGVYFASTEKSNIIRGWIFGTTLDARTQSLLIVNNATNVVIKVCEFQFCTDPFLGVYYHNNNKTWVENEFRVYSSANNCTFEYISQPFLMDLEGKQGNFKNLREFVFKNVDGYFKIYSKHTPIDLVRDLPRGFAALEPLVDLPIGINITRFQTLLALHRSYLTPGKLESGWTTGAAAYYVGYLQQRTFLLSYNQNGTITDAVDCSLDPLSETKCTLKSLTVEKGIYQTSNFRVQPTISIVRFPNITNLCPFGEVFNASKFASVYAWNRKRISNCVADYSVLYNSTSFSTFKCYGVSPTKLNDLCFTNVYADSFVVKGDEVRQIAPGQTGVIADYNYKLPDDFTGCVIAWNSVKQDALTGGNYLYRLFRKSKLKPFERDISTEIYQAGSTPCNGQVGLNCYYPLERYGFHPTTGVNYQPFRVVVLSFELLNGPATVCGPKLSTTLVKDKCVNFNFNGLTGTGVLTTSKKQFLPFQQFGRDISDTTDAVRDPQTLEILDITPCSFGGVSVITPGTNTSNQVAVLYQDVNCTEVPMAIHAEQLTPAWRVYSAGANVFQTRAGCLVGAEHVNNSYECDIPVGAGICASYHSMSSLRSVNQRSIIAYTMSLGAENSVAYSNNSIAIPTNFTISVTTEILPVSMTKTSVDCTMYICGDSIECSNLLLQYGSFCTQLNRALTGIAVEQDKNTQEVFAQVKQIYKTPPIKDFGGFNFSQILPDPSKPSKRSFIEDLLFNKVTLADAGFIKQYGDCLGDIAARDLICAQKFNGLTVLPPLLTDEMIAQYTSALLAGTITSGWTFGAGAALQIPFAMQMAYRFNGIGVTQNVLYENQKLIANQFNSAIGKIQDSLSSTASALGKLQDVVNQNAQALNTLVKQLSSNFGAISSVLNDILSRLDKVEAEVQIDRLITGRLQSLQTYVTQQLIRAAEIRASANLAATKMSECVLGQSKRVDFCGKGYHLMSFPQSAPHGVVFLHVTYVPAQEKNFTTAPAICHEGKAHFPREGVFVSNGTHWFITQRNFYEPQIITTDNTFVSGSCDVVIGIVNNTVYDPLQPELDSGGGGSDIIKLLNEQVNKEMQSSNLYMSMSSWCYTHSLDGAGLFLFDHAAEEYEHAKKLIIFLNENNVPVQLTSISAPEHKFEGLTQIFQKAYEHEQHISESINNIVDHAIKSKDHATFNFLQWYVAEQHEEEVLFKDILDKIELIGNENHGLYLADQYVKGIAKSRKS

SEQ ID NO: 8716 - protein, 1315 aa, Artificial Sequence
  SARS-CoV-2/Wuhan/WIV05/2019__EPI_ISL_402128 spike protein (1-1147)(K986P_V987P) Ferritin construct
MFVFLVLLPLVSSQCVNLTTRTQLPPAYTNSFTRGVYYPDKVFRSSVLHSTQDLFLPFFSNVTWFHAIHVSGTNGTKRFDNPVLPFNDGVYFASTEKSNIIRGWIFGTTLDSKTQSLLIVNNATNVVIKVCEFQFCNDPFLGVYYHKNNKSWMESEFRVYSSANNCTFEYVSQPFLMDLEGKQGNFKNLREFVFKNIDGYFKIYSKHTPINLVRDLPQGFSALEPLVDLPIGINITRFQTLLALHRSYLTPGDSSSGWTAGAAAYYVGYLQPRTFLLKYNENGTITDAVDCALDPLSETKCTLKSFTVEKGIYQTSNFRVQPTESIVRFPNITNLCPFGEVFNATRFASVYAWNRKRISNCVADYSVLYNSASFSTFKCYGVSPTKLNDLCFTNVYADSFVIRGDEVRQIAPGQTGKIADYNYKLPDDFTGCVIAWNSNNLDSKVGGNYNYLYRLFRKSNLKPFERDISTEIYQAGSTPCNGVEGFNCYFPLQSYGFQPTNGVGYQPYRVVVLSFELLHAPATVCGPKKSTNLVKNKCVNFNFNGLTGTGVLTESNKKFLPFQQFGRDIADTTDAVRDPQTLEILDITPCSFGGVSVITPGTNTSNQVAVLYQDVNCTEVPVAIHADQLTPTWRVYSTGSNVFQTRAGCLIGAEHVNNSYECDIPIGAGICASYQTQTNSPRRARSVASQSIIAYTMSLGAENSVAYSNNSIAIPTNFTISVTTEILPVSMTKTSVDCTMYICGDSTECSNLLLQYGSFCTQLNRALTGIAVEQDKNTQEVFAQVKQIYKTPPIKDFGGFNFSQILPDPSKPSKRSFIEDLLFNKVTLADAGFIKQYGDCLGDIAARDLICAQKFNGLTVLPPLLTDEMIAQYTSALLAGTITSGWTFGAGAALQIPFAMQMAYRFNGIGVTQNVLYENQKLIANQFNSAIGKIQDSLSSTASALGKLQDVVNQNAQALNTLVKQLSSNFGAISSVLNDILSRLDPPEAEVQIDRLITGRLQSLQTYVTQQLIRAAEIRASANLAATKMSECVLGQSKRVDFCGKGYHLMSFPQSAPHGVVFLHVTYVPAQEKNFTTAPAICHDGKAHFPREGVFVSNGTHWFVTQRNFYEPQIITTDNTFVSGNCDVVIGIVNNTVYDPLQPELDSGGGGSDIIKLLNEQVNKEMQSSNLYMSMSSWCYTHSLDGAGLFLFDHAAEEYEHAKKLIIFLNENNVPVQLTSISAPEHKFEGLTQIFQKAYEHEQHISESINNIVDHAIKSKDHATFNFLQWYVAEQHEEEVLFKDILDKIELIGNENHGLYLADQYVKGIAKSRKS

SEQ ID NO: 8717 - protein, 1311 aa, Artificial Sequence
  SARS-CoV-2/bat/Yunnan/RaTG13/2013__EPI_ISL_402131 spike protein (1-1143)(K982P_V983P) Ferritin construct
MFVFLVLLPLVSSQCVNLTTRTQLPPAYTNSSTRGVYYPDKVFRSSVLHLTQDLFLPFFSNVTWFHAIHVSGTNGIKRFDNPVLPFNDGVYFASTEKSNIIRGWIFGTTLDSKTQSLLIVNNATNVVIKVCEFQFCNDPFLGVYYHKNNKSWMESEFRVYSSANNCTFEYVSQPFLMDLEGKQGNFKNLREFVFKNIDGYFKIYSKHTPINLVRDLPPGFSALEPLVDLPIGINITRFQTLLALHRSYLTPGDSSSGWTAGAAAYYVGYLQPRTFLLKYNENGTITDAVDCALDPLSETKCTLKSFTVEKGIYQTSNFRVQPTDSIVRFPNITNLCPFGEVFNATTFASVYAWNRKRISNCVADYSVLYNSTSFSTFKCYGVSPTKLNDLCFTNVYADSFVITGDEVRQIAPGQTGKIADYNYKLPDDFTGCVIAWNSKHIDAKEGGNFNYLYRLFRKANLKPFERDISTEIYQAGSKPCNGQTGLNCYYPLYRYGFYPTDGVGHQPYRVVVLSFELLNAPATVCGPKKSTNLVKNKCVNFNFNGLTGTGVLTESNKKFLPFQQFGRDIADTTDAVRDPQTLEILDITPCSFGGVSVITPGTNASNQVAVLYQDVNCTEVPVAIHADQLTPTWRVYSTGSNVFQTRAGCLIGAEHVNNSYECDIPIGAGICASYQTQTNSRSVASQSIIAYTMSLGAENSVAYSNNSIAIPTNFTISVTTEILPVSMTKTSVDCTMYICGDSTECSNLLLQYGSFCTQLNRALTGIAVEQDKNTQEVFAQVKQIYKTPPIKDFGGFNFSQILPDPSKPSKRSFIEDLLFNKVTLADAGFIKQYGDCLGDIAARDLICAQKFNGLTVLPPLLTDEMIAQYTSALLAGTITSGWTFGAGAALQIPFAMQMAYRFNGIGVTQNVLYENQKLIANQFNSAIGKIQDSLSSTASALGKLQDVVNQNAQALNTLVKQLSSNFGAISSVLNDILSRLDPPEAEVQIDRLITGRLQSLQTYVTQQLIRAAEIRASANLAATKMSECVLGQSKRVDFCGKGYHLMSFPQSAPHGVVFLHVTYVPAQEKNFTTAPAICHDGKAHFPREGVFVSNGTHWFVTQRNFYEPQIITTDNTFVSGSCDVVIGIVNNTVYDPLQPELDSGGGGSDIIKLLNEQVNKEMQSSNLYMSMSSWCYTHSLDGAGLFLFDHAAEEYEHAKKLIIFLNENNVPVQLTSISAPEHKFEGLTQIFQKAYEHEQHISESINNIVDHAIKSKDHATFNFLQWYVAEQHEEEVLFKDILDKIELIGNENHGLYLADQYVKGIAKSRKS

SEQ ID NO: 8718 - protein, 1315 aa, Artificial Sequence
  SARS-CoV-2/Wuhan/HBCDC-HB-01/2019__EPI_ISL_402132 spike protein (1-1147)(K986P_V987P) Ferritin construct
MFVFLVLLPLVSSQCVNLTTRTQLPPAYTNSITRGVYYPDKVFRSSVLHSTQDLFLPFFSNVTWFHAIHVSGTNGTKRFDNPVLPFNDGVYFASTEKSNIIRGWIFGTTLDSKTQSLLIVNNATNVVIKVCEFQFCNDPFLGVYYHKNNKSWMESEFRVYSSANNCTFEYVSQPFLMDLEGKQGNFKNLREFVFKNIDGYFKIYSKHTPINLVRDLPQGFSALEPLVDLPIGINITRFQTLLALHRSYLTPGDSSSGWTAGAAAYYVGYLQPRTFLLKYNENGTITDAVDCALDPLSETKCTLKSFTVEKGIYQTSNFRVQPTESIVRFPNITNLCPFGEVFNATRFASVYAWNRKRISNCVADYSVLYNSASFSTFKCYGVSPTKLNDLCFTNVYADSFVIRGDEVRQIAPGQTGKIADYNYKLPDDFTGCVIAWNSNNLDSKVGGNYNYLYRLFRKSNLKPFERDISTEIYQAGSTPCNGVEGFNCYFPLQSYGFQPTNGVGYQPYRVVVLSFELLHAPATVCGPKKSTNLVKNKCVNFNFNGLTGTGVLTESNKKFLPFQQFGRDIADTTDAVRDPQTLEILDITPCSFGGVSVITPGTNTSNQVAVLYQDVNCTEVPVAIHADQLTPTWRVYSTGSNVFQTRAGCLIGAEHVNNSYECDIPIGAGICASYQTQTNSPRRARSVASQSIIAYTMSLGAENSVAYSNNSIAIPTNFTISVTTEILPVSMTKTSVDCTMYICGDSTECSNLLLQYGSFCTQLNRALTGIAVEQDKNTQEVFAQVKQIYKTPPIKDFGGFNFSQILPDPSKPSKRSFIEDLLFNKVTLADAGFIKQYGDCLGDIAARDLICAQKFNGLTVLPPLLTDEMIAQYTSALLAGTITSGWTFGAGAALQIPFAMQMAYRFNGIGVTQNVLYENQKLIANQFNSAIGKIQDSLSSTASALGKLQDVVNQNAQALNTLVKQLSSNFGAISSVLNDILSRLDPPEAEVQIDRLITGRLQSLQTYVTQQLIRAAEIRASANLAATKMSECVLGQSKRVDFCGKGYHLMSFPQSAPHGVVFLHVTYVPAQEKNFTTAPAICHDGKAHFPREGVFVSNGTHWFVTQRNFYEPQIITTDNTFVSGNCDVVIGIVNNTVYDPLQPELDSGGGGSDIIKLLNEQVNKEMQSSNLYMSMSSWCYTHSLDGAGLFLFDHAAEEYEHAKKLIIFLNENNVPVQLTSISAPEHKFEGLTQIFQKAYEHEQHISESINNIVDHAIKSKDHATFNFLQWYVAEQHEEEVLFKDILDKIELIGNENHGLYLADQYVKGIAKSRKS

SEQ ID NO: 8719 - protein, 1315 aa, Artificial Sequence
  SARS-CoV-2/Guangdong/20SF028/2020__EPI_ISL_403936 spike protein (1-1147)(K986P_V987P) Ferritin construct
MFVFLVLLPLVSSQCVNLTTRTQLPPAYTNSFTRGVYYPDKVFRSSVLYSTQDLFLPFFSNVTWFHAIHVSGTNGTKRFDNPVLPFNDGVYFASTEKSNIIRGWIFGTTLDSKTQSLLIVNNATNVVIKVCEFQFCNDPFLGVYYHKNNKSWMESEFRVYSSANNCTFEYVSQPFLMDLEGKQGNFKNLREFVFKNIDGYFKIYSKHTPINLVRDLPQGFSALEPLVDLPIGINITRFQTLLALHRSYLTPGDSSSGWTAGAAAYYVGYLQPRTFLLKYNENGTITDAVDCALDPLSETKCTLKSFTVEKGIYQTSNFRVQPTESIVRFPNITNLCPFGEVFNATRFASVYAWNRKRISNCVADYSVLYNSASFSTFKCYGVSPTKLNDLCFTNVYADSFVIRGDEVRQIAPGQTGKIADYNYKLPDDFTGCVIAWNSNNLDSKVGGNYNYLYRLFRKSNLKPFERDISTEIYQAGSTPCNGVEGFNCYFPLQSYGFQPTNGVGYQPYRVVVLSFELLHAPATVCGPKKSTNLVKNKCVNFNFNGLTGTGVLTESNKKFLPFQQFGRDIADTTDAVRDPQTLEILDITPCSFGGVSVITPGTNTSNQVAVLYQDVNCTEVPVAIHADQLTPTWRVYSTGSNVFQTRAGCLIGAEHVNNSYECDIPIGAGICASYQTQTNSPRRARSVASQSIIAYTMSLGAENSVAYSNNSIAIPTNFTISVTTEILPVSMTKTSVDCTMYICGDSTECSNLLLQYGSFCTQLNRALTGIAVEQDKNTQEVFAQVKQIYKTPPIKDFGGFNFSQILPDPSKPSKRSFIEDLLFNKVTLADAGFIKQYGDCLGDIAARDLICAQKFNGLTVLPPLLTDEMIAQYTSALLAGTITSGWTFGAGAALQIPFAMQMAYRFNGIGVTQNVLYENQKLIANQFNSAIGKIQDSLSSTASALGKLQDVVNQNAQALNTLVKQLSSNFGAISSVLNDILSRLDPPEAEVQIDRLITGRLQSLQTYVTQQLIRAAEIRASANLAATKMSECVLGQSKRVDFCGKGYHLMSFPQSAPHGVVFLHVTYVPAQEKNFTTAPAICHDGKAHFPREGVFVSNGTHWFVTQRNFYEPQIITTDNTFVSGNCDVVIGIVNNTVYDPLQPELDSGGGGSDIIKLLNEQVNKEMQSSNLYMSMSSWCYTHSLDGAGLFLFDHAAEEYEHAKKLIIFLNENNVPVQLTSISAPEHKFEGLTQIFQKAYEHEQHISESINNIVDHAIKSKDHATFNFLQWYVAEQHEEEVLFKDILDKIELIGNENHGLYLADQYVKGIAKSRKS

SEQ ID NO: 8720 - protein, 1315 aa, Artificial Sequence
  SARS-CoV-2/Shenzhen/SZTH-001/2020__EPI_ISL_406592 spike protein (1-1147)(K986P_V987P) Ferritin construct
MFVFLVLLPLVSSQCVNLTTRTQLPPAYTNSFTRGVYYPDKVFRSSVLHSTQDLFLPFFSNVTWFHAIHVSGTNGTKRFDNPVLPFNDGVYFASTEKSNIIRGWIFGTTLDSKTQSLLIVNNATNVVIKVCEFQFCNDPFLGVYYHKNNKSWMESEFRVYSSANNCTFEYVSQPFLMDLEGKQGNFKNLREFVFKNIDGYFKIYSKHTPINLVRDLPQGFSALEPLVDLPIGINITRFQTLLALHRSYLTPGDSSSGWTAGAAAYYVGYLQPRTFLLKYNENGTITDAVDCALDPLSETKCTLKSFTVEKGIYQTSNFRVQPTESIVRFPNITNLCPFGEVFNATRFASVYAWNRKRISNCVADYSVLYNSASFSTFKCYGVSPTKLNDLCFTNVYADSFVIRGDEVRQIAPGQTGKIADYNYKLPDDFTGCVIAWNSNNLDSKVGGNYNYLYRLFRKSNLKPFERDISTEIYQAGSTPCNGVEGFNCYFPLQSYGFQPTNGVGYQPYRVVVLSFELLHAPATVCGPKKSTNLVKNKCVNFNFNGLTGTGVLTESNKKFLPFQQFGRDIADTTDAVRDPQTLEILDITPCSFGGVSVITPGTNTSNQVAVLYQDVNCTEVPVAIHADQLTPTWRVYSTGSNVFQTRAGCLIGAEHVNNSYECDIPIGAGICASYQTQTNSPRRARSVASQSIIAYTMSLGAENSVAYSNNSIAIPTNFTISVTTEILPVSMTKTSVDCTMYICGDSTECSNLLLQYGSFCTQLNRALTGIAVEQDKNTQEVFAQVKQIYKTPPIKDFGGFNFSQILPDPSKPSKRSFIEDLLFNKVTLADAGFIKQYGDCLGDIAARDLICAQKFNGLTVLPPLLTDEMIAQYTSALLAGTITSGWTFGAGAALQIPFAMQMAYRFNGIGVTQNVLYENQKLIANQFNSAIGKIQDSLSSTASALGKLQDVVNQNAQALNTLVKQLSSNFGAISSVLNDILSRLDPPEAEVQIDRLITGRLQSLQTYVTQQLIRAAEIRASANLAATKMSECVLGQSKRVDFCGKGYHLMSFPQSAPHGVVFLHVTYVPAQEKNFTTAPAICHDGKAHFPREGVFVSNGTHWFVTQRNFYEPQIITTDNTFVSGNCDVLIGIVNNTVYDPLQPELDSGGGGSDIIKLLNEQVNKEMQSSNLYMSMSSWCYTHSLDGAGLFLFDHAAEEYEHAKKLIIFLNENNVPVQLTSISAPEHKFEGLTQIFQKAYEHEQHISESINNIVDHAIKSKDHATFNFLQWYVAEQHEEEVLFKDILDKIELIGNENHGLYLADQYVKGIAKSRKS

SEQ ID NO: 8721 - protein, 1315 aa, Artificial Sequence
  SARS-CoV-2/Shenzhen/SZTH-004/2020__EPI_ISL_406595 spike protein (1-1147)(K986P_V987P) Ferritin construct
MFVFLVLLPLVSSQCVNLTTRTQLPPAYTNSFTRGVYYPDKVFRSSVLHSTQDLFLPFFSNVTWFHAIHVSGTNGTKRFDNPVLPFNDGVYFASTEKSNIIRGWIFGTTLDSKTQSLLIVNNATNVVIKVCEFQFCNDPFLGVYYHKNNKSWMESEFRVYSSANNCTFEYVSQPFLMDLEGKQGNFKNLREFVFKNIDGYFKIYSKHTPINLVRDLPQGFSALEPLVDLPIGINITRFQTLLALHRSYLTPGDSSSGWTAGAAAYYVGYLQPRTFLLKYNENGTITDAVDCALDPLSETKCTLKSFTVEKGIYQTSNFRVQPTESIVRFPNITNLCPFGEVFNATRFASVYAWDRKRISNCVAYYSVLYNSASFSTFKCYGVSPTKLNDLCFTNVYADSFVIRGDEVRQIAPGQTGKIADYNYKLPDDFTGCVIAWNSNNLDSKVGGNYNYLYRLFRKSNLKPFERDISTEIYQAGSTPCNGVEGFNCYFPLQSYGFQPTNGVGYQPYRVVVLSFELLHAPATVCGPKKSTNLVKNKCVNFNFNGLTGTGVLTESNKKFLPFQQFGRDIADTTDAVRDPQTLEILDITPCSFGGVSVITPGTNTSNQVAVLYQDVNCTEVPVAIHADQLTPTWRVYSTGSNVFQTRAGCLIGAEHVNNSYECDIPIGAGICASYQTQTNSPRRARSVASQSIIAYTMSLGAENSVAYSNNSIAIPTNFTISVTTEILPVSMTKTSVDCTMYICGDSTECSNLLLQYGSFCTQLNRALTGIAVEQDKNTQEVFAQVKQIYKTPPIKDFGGFNFSQILPDPSKPSKRSFIEDLLFNKVTLADAGFIKQYGDCLGDIAARDLICAQKFNGLTVLPPLLTDEMIAQYTSALLAGTITSGWTFGAGAALQIPFAMQMAYRFNGIGVTQNVLYENQKLIANQFNSAIGKIQDSLSSTASALGKLQDVVNQNAQALNTLVKQLSSNFGAISSVLNDILSRLDPPEAEVQIDRLITGRLQSLQTYVTQQLIRAAEIRASANLAATKMSECVLGQSKRVDFCGKGYHLMSFPQSAPHGVVFLHVTYVPAQEKNFTTAPAICHDGKAHFPREGVFVSNGTHWFVTQRNFYEPQIITTDNTFVSGNCDVVIGIVNNTVYDPLQPELDSGGGGSDIIKLLNEQVNKEMQSSNLYMSMSSWCYTHSLDGAGLFLFDHAAEEYEHAKKLIIFLNENNVPVQLTSISAPEHKFEGLTQIFQKAYEHEQHISESINNIVDHAIKSKDHATFNFLQWYVAEQHEEEVLFKDILDKIELIGNENHGLYLADQYVKGIAKSRKS

SEQ ID NO: 8722 - protein, 1315 aa, Artificial Sequence
  SARS-CoV-2/France/IDF0372/2020__EPI_ISL_406596 spike protein (1-1147)(K986P_V987P) Ferritin construct
MFVFLVLLPLVSSQCVNLTTRTQLPPAYTNSFTRGVYYPDKVFRSSVLHSTQDLFLPFFSNVTWFHAIHVSGTNGTKRFDNPVLPFNDGVYFASTEKSNIIRGWIFGTTLDSKTQSLLIVNNATNVVIKVCEFQFCNDPFLGVYYHKNNKSWMESEFRVYSSANNCTFEYVSQPFLMDLEGKQGNFKNLREFVFKNIDGYFKIYSKHTPINLVRDLPQGFSALEPLVDLPIGINITRFQTLLALHRSYLTPGDSSSGWTAGAAAYYVGYLQPRTFLLKYNENGTITDAVDCALDPLSETKCTLKSFTVEKGIYQTSNFRVQPTESIVRFPNITNLCPFGEVFNATRFASVYAWNRKRISNCVADYSFLYNSASFSTFKCYGVSPTKLNDLCFTNVYADSFVIRGDEVRQIAPGQTGKIADYNYKLPDDFTGCVIAWNSNNLDSKVGGNYNYLYRLFRKSNLKPFERDISTEIYQAGSTPCNGVEGFNCYFPLQSYGFQPTNGVGYQPYRVVVLSFELLHAPATVCGPKKSTNLVKNKCVNFNFNGLTGTGVLTESNKKFLPFQQFGRDIADTTDAVRDPQTLEILDITPCSFGGVSVITPGTNTSNQVAVLYQDVNCTEVPVAIHADQLTPTWRVYSTGSNVFQTRAGCLIGAEHVNNSYECDIPIGAGICASYQTQTNSPRRARSVASQSIIAYTMSLGAENSVAYSNNSIAIPTNFTISVTTEILPVSMTKTSVDCTMYICGDSTECSNLLLQYGSFCTQLNRALTGIAVEQDKNTQEVFAQVKQIYKTPPIKDFGGFNFSQILPDPSKPSKRSFIEDLLFNKVTLADAGFIKQYGDCLGDIAARDLICAQKFNGLTVLPPLLTDEMIAQYTSALLAGTITSGWTFGAGAALQIPFAMQMAYRFNGIGVTQNVLYENQKLIANQFNSAIGKIQDSLSSTASALGKLQDVVNQNAQALNTLVKQLSSNFGAISSVLNDILSRLDPPEAEVQIDRLITGRLQSLQTYVTQQLIRAAEIRASANLAATKMSECVLGQSKRVDFCGKGYHLMSFPQSAPHGVVFLHVTYVPAQEKNFTTAPAICHDGKAHFPREGVFVSNGTHWFVTQRNFYEPQIITTDNTFVSGNCDVVIGIVNNTVYDPLQPELDSGGGGSDIIKLLNEQVNKEMQSSNLYMSMSSWCYTHSLDGAGLFLFDHAAEEYEHAKKLIIFLNENNVPVQLTSISAPEHKFEGLTQIFQKAYEHEQHISESINNIVDHAIKSKDHATFNFLQWYVAEQHEEEVLFKDILDKIELIGNENHGLYLADQYVKGIAKSRKS

SEQ ID NO: 8723 - protein, 1315 aa, Artificial Sequence
  SARS-CoV-2/Australia/VIC01/2020__EPI_ISL_406844 spike protein (1-1147)(K986P_V987P) Ferritin construct
MFVFLVLLPLVSSQCVNLTTRTQLPPAYTNSFTRGVYYPDKVFRSSVLHSTQDLFLPFFSNVTWFHAIHVSGTNGTKRFDNPVLPFNDGVYFASTEKSNIIRGWIFGTTLDSKTQSLLIVNNATNVVIKVCEFQFCNDPFLGVYYHKNNKSWMESEFRVYSSANNCTFEYVSQPFLMDLEGKQGNFKNLREFVFKNIDGYFKIYSKHTPINLVRDLPQGFSALEPLVDLPIGINITRFQTLLALHRRYLTPGDSSSGWTAGAAAYYVGYLQPRTFLLKYNENGTITDAVDCALDPLSETKCTLKSFTVEKGIYQTSNFRVQPTESIVRFPNITNLCPFGEVFNATRFASVYAWNRKRISNCVADYSVLYNSASFSTFKCYGVSPTKLNDLCFTNVYADSFVIRGDEVRQIAPGQTGKIADYNYKLPDDFTGCVIAWNSNNLDSKVGGNYNYLYRLFRKSNLKPFERDISTEIYQAGSTPCNGVEGFNCYFPLQSYGFQPTNGVGYQPYRVVVLSFELLHAPATVCGPKKSTNLVKNKCVNFNFNGLTGTGVLTESNKKFLPFQQFGRDIADTTDAVRDPQTLEILDITPCSFGGVSVITPGTNTSNQVAVLYQDVNCTEVPVAIHADQLTPTWRVYSTGSNVFQTRAGCLIGAEHVNNSYECDIPIGAGICASYQTQTNSPRRARSVASQSIIAYTMSLGAENSVAYSNNSIAIPTNFTISVTTEILPVSMTKTSVDCTMYICGDSTECSNLLLQYGSFCTQLNRALTGIAVEQDKNTQEVFAQVKQIYKTPPIKDFGGFNFSQILPDPSKPSKRSFIEDLLFNKVTLADAGFIKQYGDCLGDIAARDLICAQKFNGLTVLPPLLTDEMIAQYTSALLAGTITSGWTFGAGAALQIPFAMQMAYRFNGIGVTQNVLYENQKLIANQFNSAIGKIQDSLSSTASALGKLQDVVNQNAQALNTLVKQLSSNFGAISSVLNDILSRLDPPEAEVQIDRLITGRLQSLQTYVTQQLIRAAEIRASANLAATKMSECVLGQSKRVDFCGKGYHLMSFPQSAPHGVVFLHVTYVPAQEKNFTTAPAICHDGKAHFPREGVFVSNGTHWFVTQRNFYEPQIITTDNTFVSGNCDVVIGIVNNTVYDPLQPELDSGGGGSDIIKLLNEQVNKEMQSSNLYMSMSSWCYTHSLDGAGLFLFDHAAEEYEHAKKLIIFLNENNVPVQLTSISAPEHKFEGLTQIFQKAYEHEQHISESINNIVDHAIKSKDHATFNFLQWYVAEQHEEEVLFKDILDKIELIGNENHGLYLADQYVKGIAKSRKS

SEQ ID NO: 8724 - protein, 1315 aa, Artificial Sequence
  SARS-CoV-2/Germany/BavPat1/2020__EPI_ISL_406862 spike protein (1-1147)(K986P_V987P) Ferritin construct
MFVFLVLLPLVSSQCVNLTTRTQLPPAYTNSFTRGVYYPDKVFRSSVLHSTQDLFLPFFSNVTWFHAIHVSGTNGTKRFDNPVLPFNDGVYFASTEKSNIIRGWIFGTTLDSKTQSLLIVNNATNVVIKVCEFQFCNDPFLGVYYHKNNKSWMESEFRVYSSANNCTFEYVSQPFLMDLEGKQGNFKNLREFVFKNIDGYFKIYSKHTPINLVRDLPQGFSALEPLVDLPIGINITRFQTLLALHRSYLTPGDSSSGWTAGAAAYYVGYLQPRTFLLKYNENGTITDAVDCALDPLSETKCTLKSFTVEKGIYQTSNFRVQPTESIVRFPNITNLCPFGEVFNATRFASVYAWNRKRISNCVADYSVLYNSASFSTFKCYGVSPTKLNDLCFTNVYADSFVIRGDEVRQIAPGQTGKIADYNYKLPDDFTGCVIAWNSNNLDSKVGGNYNYLYRLFRKSNLKPFERDISTEIYQAGSTPCNGVEGFNCYFPLQSYGFQPTNGVGYQPYRVVVLSFELLHAPATVCGPKKSTNLVKNKCVNFNFNGLTGTGVLTESNKKFLPFQQFGRDIADTTDAVRDPQTLEILDITPCSFGGVSVITPGTNTSNQVAVLYQGVNCTEVPVAIHADQLTPTWRVYSTGSNVFQTRAGCLIGAEHVNNSYECDIPIGAGICASYQTQTNSPRRARSVASQSIIAYTMSLGAENSVAYSNNSIAIPTNFTISVTTEILPVSMTKTSVDCTMYICGDSTECSNLLLQYGSFCTQLNRALTGIAVEQDKNTQEVFAQVKQIYKTPPIKDFGGFNFSQILPDPSKPSKRSFIEDLLFNKVTLADAGFIKQYGDCLGDIAARDLICAQKFNGLTVLPPLLTDEMIAQYTSALLAGTITSGWTFGAGAALQIPFAMQMAYRFNGIGVTQNVLYENQKLIANQFNSAIGKIQDSLSSTASALGKLQDVVNQNAQALNTLVKQLSSNFGAISSVLNDILSRLDPPEAEVQIDRLITGRLQSLQTYVTQQLIRAAEIRASANLAATKMSECVLGQSKRVDFCGKGYHLMSFPQSAPHGVVFLHVTYVPAQEKNFTTAPAICHDGKAHFPREGVFVSNGTHWFVTQRNFYEPQIITTDNTFVSGNCDVVIGIVNNTVYDPLQPELDSGGGGSDIIKLLNEQVNKEMQSSNLYMSMSSWCYTHSLDGAGLFLFDHAAEEYEHAKKLIIFLNENNVPVQLTSISAPEHKFEGLTQIFQKAYEHEQHISESINNIVDHAIKSKDHATFNFLQWYVAEQHEEEVLFKDILDKIELIGNENHGLYLADQYVKGIAKSRKS

SEQ ID NO: 8725 - protein, 1315 aa, Artificial Sequence
  SARS-CoV-2/Wuhan/HBCDC-HB-02/2020__EPI_ISL_412978 spike protein (1-1147)(K986P_V987P) Ferritin construct
MFVFLVLLPLVSSQCVNLTTRTQLPPAYTNSFTRGVYYPDKVFRSSVLHSTQDLFLPFFSNVTWFHAIHVSGTNGTKRFDNPVLPFNDGVYFASTEKSNIIRGWIFGTTLDSKTQSLLIVNNATNVVIKVCEFQFCNDPFLGVYYHKNNKSWMESEFRVYSSANNCTFEYVSQPFLMDLEGKQGNFKNLREFVFKNIDGYFKIYSKHTPINLVRDLPQGFSALEPLVDLPIGINITRFQTLLALHRSYLTPGDSSSGWTAGAAAYYVGYLQPRTFLLKYNENGTITDAVDCALDPLSETKCTLKSFTVEKGIYQTSNFRVQPTESIVRFPNITNLCPFGEVFNATRFASVYAWNRKRISNCVADYSVLYNSASFSTFKCYGVSPTKLNDLCFTNVYADSFVIRGDEVRQIAPGQTGKIADYNYKLPDDFTGCVIAWNSNNLDSKVGGNYNYLYRLFRKSNLKPFERDISTEIYQAGSTPCNGVEGFNCYFPLQSYGFQPTNGVGYQPYRVVVLSFELLHAPATVCGPKKSTNLVKNKCVNFNFNGLTGTGVLTESNKKFLPFQQFGRDIADTTDAVRDPQTLEILDITPCSFGGVSVITPGTNTSNQVAVLYQDVNCTEVPVAIHADQLTPTWRVYSTGSNVFQTRAGCLIGAEHVNNSYECDIPIGAGICASYQTQTNSPRRARSVASQSIIAYTMSLGAENSVAYSNNSIAIPTNFTISVTTEILPVSMTKTSVDCTMYICGDSTECSNFLLQYGSFCTQLNRALTGIAVEQDKNTQEVFAQVKQIYKTPPIKDFGGFNFSQILPDPSKPSKRSFIEDLLFNKVTLADAGFIKQYGDCLGDIAARDLICAQKFNGLTVLPPLLTDEMIAQYTSALLAGTITSGWTFGAGAALQIPFAMQMAYRFNGIGVTQNVLYENQKLIANQFNSAIGKIQDSLSSTASALGKLQDVVNQNAQALNTLVKQLSSNFGAISSVLNDILSRLDPPEAEVQIDRLITGRLQSLQTYVTQQLIRAAEIRASANLAATKMSECVLGQSKRVDFCGKGYHLMSFPQSAPHGVVFLHVTYVPAQEKNFTTAPAICHDGKAHFPREGVFVSNGTHWFVTQRNFYEPQIITTDNTFVSGNCDVVIGIVNNTVYDPLQPELDSGGGGSDIIKLLNEQVNKEMQSSNLYMSMSSWCYTHSLDGAGLFLFDHAAEEYEHAKKLIIFLNENNVPVQLTSISAPEHKFEGLTQIFQKAYEHEQHISESINNIVDHAIKSKDHATFNFLQWYVAEQHEEEVLFKDILDKIELIGNENHGLYLADQYVKGIAKSRKS

SEQ ID NO: 8726 - protein, 1315 aa, Artificial Sequence
  SARS-CoV-2/Australia/QLD02/2020__EPI_ISL_407896 spike protein (1-1147)(K986P_V987P) Ferritin construct
MFVFLVLLPLVSSQCVNLTTRTQLPPAYTNSFTRGVYYPDKVFRSSVLHSTQDLFLPFFSNVTWFHAIHVSGTNGTKRFDNPVLPFNDGVYFASTEKSNIIRGWIFGTTLDSKTQSLLIVNNATNVVIKVCEFQFCNDPFLGVYYHKNNKSWMESEFRVYSSANNCTFEYVSQPFLMDLEGKQGNFKNLREFVFKNIDGYFKIYSKHTPINLVRDLPQGFSALEPLVDLPIGINITRFQTLLALHRSYLTPGDSSSGWTAGAAAYYVGYLQPRTFLLKYNENGTITDAVDCALDPLSETKCTLKSFTVEKGIYQTSNFRVQPTESIVRFPNITNLCPFGEVFNATRFASVYAWNRKRISNCVADYSVLYNSASFSTFKCYGVSPTKLNDLCFTNVYADSFVIRGDEVRQIAPGQTGKIADYNYKLPDDFTGCVIAWNSNNLDSKVGGNYNYLYRLFRKSNLKPFERDISTEIYQAGSTPCNGVEGFNCYFPLQSYGFQPTNGVGYQPYRVVVLSFELLHAPATVCGPKKSTNLVKNKCVNFNFNGLTGTGVLTESNKKFLPFQQFGRDIADTTDAVRDPQTLEILDITPCSFGGVSVITPGTNTSNQVAVLYQDVNCTEVPVAIHADQLTPTWRVYSTGSNVFQTRAGCLIGAEHVNNSYECDIPIGAGICASYQTQTNSPRRARSVASQSIIAYTMSLGAENSVAYSNNSIAIPTNFTISVTTEILPVSMTKTSVDCTMYICGDSTECSNLLLQYGSFCTQLNRALTGIAVEQDKNTQEVFAQVKQIYKTPPIKDFGGFNFSQILPDPSKPSKRSFIEDLLFNKVTLADAGFIKQYGDCLGDIAARDLICAQKFNGLTVLPPLLTDEMIAQYTSALLAGTITSGWTFGAGAALQIPFAMQMAYRFNGIGVTQNVLYENQKLIANQFNSAIGKIQDSLSSTASALGKLQDVVNQNAQALNTLVKQLSSNFGAISSVLNDILSRLDPPEAEVQIDRLITGRLQSLQTYVTQQLIRAAEIRASANLAATKMSECVLGQSKRVDFCGKGYHLMSFPQSAPHGVVFLHVTYVPAQEKNFTTAPAICHDGKAHFPREGVFVSNGTHWFVTQRNFYEPQIITTDNTFVSGNCDVVIGIVNNTVYDPLQLELDSGGGGSDIIKLLNEQVNKEMQSSNLYMSMSSWCYTHSLDGAGLFLFDHAAEEYEHAKKLIIFLNENNVPVQLTSISAPEHKFEGLTQIFQKAYEHEQHISESINNIVDHAIKSKDHATFNFLQWYVAEQHEEEVLFKDILDKIELIGNENHGLYLADQYVKGIAKSRKS

SEQ ID NO: 8727 - protein, 1315 aa, Artificial Sequence
  SARS-CoV-2/India/1-31/2020__EPI_ISL_413523 spike protein (1-1147)(K986P_V987P) Ferritin construct
MFVFLVLLPLVSSQCVNLTTRTQLPPAYTNSFTRGVYYPDKVFRSSVLHSTQDLFLPFFSNVTWFHAIHVSGTNGTKRFDNPVLPFNDGVYFASTEKSNIIRGWIFGTTLDSKTQSLLIVNNATNVVIKVCEFQFCNDPFLGVYYHKNNKSWMESEFRVYSSANNCTFEYVSQPFLMDLEGKQGNFKNLREFVFKNIDGYFKIYSKHTPINLVRDLPQGFSALEPLVDLPIGINITRFQTLLALHRSYLTPGDSSSGWTAGAAAYYVGYLQPRTFLLKYNENGTITDAVDCALDPLSETKCTLKSFTVEKGIYQTSNFRVQPTESIVRFPNITNLCPFGEVFNATRFASVYAWNRKRISNCVADYSVLYNSASFSTFKCYGVSPTKLNDLCFTNVYADSFVIRGDEVRQIAPGQTGKIADYNYKLPDDFTGCVIAWNSNNLDSKVGGNYNYLYRLFRKSNLKPFERDISTEIYQAGSTPCNGVEGFNCYFPLQSYGFQPTNGVGYQPYRVVVLSFELLHAPATVCGPKKSTNLVKNKCVNFNFNGLTGTGVLTESNKKFLPFQQFGRDIADTTDAVRDPQTLEILDITPCSFGGVSVITPGTNTSNQVAVLYQDVNCTEVPVAIHADQLTPTWRVYSTGSNVFQTRAGCLIGAEHVNNSYECDIPIGAGICASYQTQTNSPRRARSVASQSIIAYTMSLGAENSVAYSNNSIAIPTNFTISVTTEILPVSMTKTSVDCTMYICGDSTECSNLLLQYGSFCTQLNRALTGIAVEQDKNTQEVFAQVKQIYKTPPIKDFGGFNFSQILPDPSKPSKRSFIEDLLFNKVTLADAGFIKQYGDCLGDIAARDLICAQKFNGLTVLPPLLTDEMIAQYTSALLAGTITSGWTFGAGAALQIPFAMQMAYRFNGIGVTQNVLYENQKLIANQFNSVIGKIQDSLSSTASALGKLQDVVNQNAQALNTLVKQLSSNFGAISSVLNDILSRLDPPEAEVQIDRLITGRLQSLQTYVTQQLIRAAEIRASANLAATKMSECVLGQSKRVDFCGKGYHLMSFPQSAPHGVVFLHVTYVPAQEKNFTTAPAICHDGKAHFPREGVFVSNGTHWFVTQRNFYEPQIITTDNTFVSGNCDVVIGIVNNTVYDPLQPELDSGGGGSDIIKLLNEQVNKEMQSSNLYMSMSSWCYTHSLDGAGLFLFDHAAEEYEHAKKLIIFLNENNVPVQLTSISAPEHKFEGLTQIFQKAYEHEQHISESINNIVDHAIKSKDHATFNFLQWYVAEQHEEEVLFKDILDKIELIGNENHGLYLADQYVKGIAKSRKS

SEQ ID NO: 8728 - protein, 1315 aa, Artificial Sequence
  SARS-CoV-2/Guangdong/GD2020087-P0008/2020__EPI_ISL_413863 spike protein (1-1147)(K986P_V987P) Ferritin construct
MFVFLVLLPLVSSQCVNLTTRTQLPPAYTNSFTRGVYYPDKVFRSSVLHSTQDLFLPFFSNVTWFHAIHVSGTNGTKRFDNPVLPFNDGVYFASTEKSNIIRGWIFGTTLDSKTQSLLIVNNATNVVIKVCEFQFCNDPFLGVYYHKNNKSWMESEFRVYSSANNCTFEYVSQPFLMDLEGKQGNFKNLREFVFKNIDGYFKIYSKHTPINLVRDLPQGFSALEPLVDLPIGINITRFQTLLALHRSYLTPGDSSSGWTAGAAAYYVGYLQPRTFLLKYNENGTITDAVDCALDPLSETKCTLKSFTVEKGIYQTSNFRVQPTESIVRFPNITNLCPFGEVFNATRFASVYAWNRKRISNCVADYSVLYNSASFSTFKCYGVSPTKLNDLCFTNVYADSFVIRGDEVREIAPGQTGKIADYNYKLPDDFTGCVIAWNSNNLDSKVGGNYNYLYRLFRKSNLKPFERDISTEIYQAGSTPCNGVEGFNCYFPLQSYGFQPTNGVGYQPYRVVVLSFELLHAPATVCGPKKSTNLVKNKCVNFNFNGLTGTGVLTESNKKFLPFQQFGRDIADTTDAVRDPQTLEILDITPCSFGGVSVITPGTNTSNQVAVLYQDVNCTEVPVAIHADQLTPTWRVYSTGSNVFQTRAGCLIGAEHVNNSYECDIPIGAGICASYQTQTNSPRRARSVASQSIIAYTMSLGAENSVAYSNNSIAIPTNFTISVTTEILPVSMTKTSVDCTMYICGDSTECSNLLLQYGSFCTQLNRALTGIAVEQDKNTQEVFAQVKQIYKTPPIKDFGGFNFSQILPDPSKPSKRSFIEDLLFNKVTLADAGFIKQYGDCLGDIAARDLICAQKFNGLTVLPPLLTDEMIAQYTSALLAGTITSGWTFGAGAALQIPFAMQMAYRFNGIGVTQNVLYENQKLIANQFNSAIGKIQDSLSSTASALGKLQDVVNQNAQALNTLVKQLSSNFGAISSVLNDILSRLDPPEAEVQIDRLITGRLQSLQTYVTQQLIRAAEIRASANLAATKMSECVLGQSKRVDFCGKGYHLMSFPQSAPHGVVFLHVTYVPAQEKNFTTAPAICHDGKAHFPREGVFVSNGTHWFVTQRNFYEPQIITTDNTFVSGNCDVVIGIVNNTVYDPLQPELDSGGGGSDIIKLLNEQVNKEMQSSNLYMSMSSWCYTHSLDGAGLFLFDHAAEEYEHAKKLIIFLNENNVPVQLTSISAPEHKFEGLTQIFQKAYEHEQHISESINNIVDHAIKSKDHATFNFLQWYVAEQHEEEVLFKDILDKIELIGNENHGLYLADQYVKGIAKSRKS

SEQ ID NO: 8729 - protein, 1315 aa, Artificial Sequence
  SARS-CoV-2/Sweden/01/2020__EPI_ISL_411951 spike protein (1-1147)(K986P_V987P) Ferritin construct
MFVFLVLLPLVSSQCVNLTTRTQLPPAYTNSFTRGVYYPDKVFRSSVLHSTQDLFLPFFSNVTWFHAIHVSGTNGTKRFDNPVLPFNDGVYFASTEKSNIIRGWIFGTTLDSKTQSLLIVNNATNVVIKVCEFQFCNDPFLGVYYHKNNKSWMESEFRVYSSANNCTFEYVSQPFLMDLEGKQGNFKNLREFVFKNIDGYFKIYSKHTPINLVRDLPQGFSALEPLVDLPIGINITRFQTLLALHRSYLTPGDSSSGWTAGAAAYYVGYLQPRTFLLKYNENGTITDAVDCALDPLSETKCTLKSFTVEKGIYQTSNFRVQPTESIVRFPNITNLCPFGEVFNATRFASVYAWNRKRISNCVADYSVLYNSASFSTFKCYGVSPTKLNDLCFTNVYADSFVIRGDEVRQIAPGQTGKIADYNYKLPDDFTGCVIAWNSNNLDSKVGGNYNYLYRLFRKSNLKPFERDISTEIYQAGSTPCNGVEGFNCYFPLQSYGFQPTNGVGYQPYRVVVLSFELLHAPATVCGPKKSTNLVKNKCVNFNFNGLTGTGVLTESNKKFLPFQQFGRDIADTTDAVRDPQTLEILDITPCSFGGVSVITPGTNTSNQVAVLYQDVNCTEVPVAIHADQLTPTWRVYSTGSNVFQTRAGCLIGAEHVNNSYECDIPIGAGICASYQTQTNSPRRARSVASQSIIAYTMSLGAENSVAYSNNSIAIPTNFTISVTTEILPVSMTKTSVDCTMYICGDSTECSNLLLQYGSFCTQLNRALTGIAVEQDKNTQEVFAQVKQIYKTPPIKDCGGFNFSQILPDPSKPSKRSFIEDLLFNKVTLADAGFIKQYGDCLGDIAARDLICAQKFNGLTVLPPLLTDEMIAQYTSALLAGTITSGWTFGAGAALQIPFAMQMAYRFNGIGVTQNVLYENQKLIANQFNSAIGKIQDSLSSTASALGKLQDVVNQNAQALNTLVKQLSSNFGAISSVLNDILSRLDPPEAEVQIDRLITGRLQSLQTYVTQQLIRAAEIRASANLAATKMSECVLGQSKRVDFCGKGYHLMSFPQSAPHGVVFLHVTYVPAQEKNFTTAPAICHDGKAHFPREGVFVSNGTHWFVTQRNFYEPQIITTDNTFVSGNCDVVIGIVNNTVYDPLQPELDSGGGGSDIIKLLNEQVNKEMQSSNLYMSMSSWCYTHSLDGAGLFLFDHAAEEYEHAKKLIIFLNENNVPVQLTSISAPEHKFEGLTQIFQKAYEHEQHISESINNIVDHAIKSKDHATFNFLQWYVAEQHEEEVLFKDILDKIELIGNENHGLYLADQYVKGIAKSRKS

SEQ ID NO: 8730 - protein, 1315 aa, Artificial Sequence
  SARS-CoV-2/Tianmen/HBCDC-HB-07/2020__EPI_ISL_412983 spike protein (1-1147)(K986P_V987P) Ferritin construct
MFVFLVLLPLVSSQCVNLTTRTQLPPAYTNSFTRGVYYPDKVFRSSVLHSTQDLFLPFFSNVTWFHAIHVSGTNGTKRFDNPVLPFNDGVYFASTEKSNIIRGWIFGTTLDSKTQSLLIVNNATNVVIKVCEFQFCNDPFLGVYYHKNNKSWMESEFRVYSSANNCTFEYVSQPFLMDLEGKQGNFKNLREFVFKNIDGYFKIYSKHTPINLVRDLPQGFSALEPLVDLPIGINITRFQTLLALHRSYLTPGDSSSGWTAGAAAYYVGYLQPRTFLLKYNENGTITDAVDCALDPLSETKCTLKSFTVEKGIYQTSNFRVQPTESIVRFPNITNLCPFGEVFNATRFASVYAWNRKRISNCVADYSVLYNSASFSTFKCYGVSPTKLNDLCFTNVYADSFVIRGDEVRQIAPGQTGKIADYNYKLPDDFTGCVIAWNSNNLDSKVGGNYNYLYRLFRKSNLKPFERDISTEIYQAGSTPCNGVEGFNCYFPLQSYGFQPTNGVGYQPYRVVVLSFELLHAPATVCGPKKSTNLVKNKCVNFNFNGLTGTGVLTESNKKFLPFQQFGRDIADTTDAVRDPQTLEILDITPCSFGGVSVITPGTNTSNQVAVLYQDLNCTEVPVAIHADQLTPTWRVYSTGSNVFQTRAGCLIGAEHVNNSYECDIPIGAGICASYQTQTNSPRRARSVASQSIIAYTMSLGAENSVAYSNNSIAIPTNFTISVTTEILPVSMTKTSVDCTMYICGDSTECSNLLLQYGSFCTQLNRALTGIAVEQDKNTQEVFAQVKQIYKTPPIKDFGGFNFSQILPDPSKPSKRSFIEDLLFNKVTLADAGFIKQYGDCLGDIAARDLICAQKFNGLTVLPPLLTDEMIAQYTSALLAGTITSGWTFGAGAALQIPFAMQMAYRFNGIGVTQNVLYENQKLIANQFNSAIGKIQDSLSSTASALGKLQDVVNQNAQALNTLVKQLSSNFGAISSVLNDILSRLDPPEAEVQIDRLITGRLQSLQTYVTQQLIRAAEIRASANLAATKMSECVLGQSKRVDFCGKGYHLMSFPQSAPHGVVFLHVTYVPAQEKNFTTAPAICHDGKAHFPREGVFVSNGTHWFVTQRNFYEPQIITTDNTFVSGNCDVVIGIVNNTVYDPLQPELDSGGGGSDIIKLLNEQVNKEMQSSNLYMSMSSWCYTHSLDGAGLFLFDHAAEEYEHAKKLIIFLNENNVPVQLTSISAPEHKFEGLTQIFQKAYEHEQHISESINNIVDHAIKSKDHATFNFLQWYVAEQHEEEVLFKDILDKIELIGNENHGLYLADQYVKGIAKSRKS

SEQ ID NO: 8731 - protein, 1315 aa, Artificial Sequence
  SARS-CoV-2/Hong Kong/case42_VM20002493/2020__EPI_ISL_414527 spike protein (1-1147)(K986P_V987P) Ferritin construct
MFVFLVLLPLVSSQCVNLTTRTQLPPAYTNSFTRGVYYPDKVFRSSVLHSTQDLFLPFFSNVTWFHAIHVSGTNGTKRFDNPVLPFNDGVYFASTEKSNIIRGWIFGTTLDSKTQSLLIVNNATNVVIKVCEFQFCNDPFLGVYYHKNNKSWMESEFRVYSSANNCTFEYVSQPFLMDLEGKQGNFKNLREFVFKNIDGYFKIYSKHTPINLVRDLPQGFSALEPLVDLPIGINITRFQTLLALHRSYLTPGDSSSGWTAGAAAYYVGYLQPRTFLLKYNENGTITDAVDCALDPLSETKCTLKSFTVEKGIYQTSNFRVQPTESIVRFPNITNLCPFGEVFNATRFASVYAWNRKRISNCVADYSVLYNSASFSTFKCYGVSPTKLNDLCFTNVYADSFVIRGDEVRQIAPGQTGKIADYNYKLPDDFTGCVIAWNSNNLDSKVGGNYNYLYRLFRKSNLKPFERDISTEIYQAGSTPCNGVEGFNCYFPLQSYGFQPTNGVGYQPYRVVVLSFELLHAPATVCGPKKSTNLVKNKCVNFNFNGLTGTGVLTESNKKFLPFQQFGRDIADTTDAVRDPQTLEILDITPCSFGGVSVITPGTNTSNQVAVLYQDVNCTEVPVAIHADQLTPTWRVYSTGSNVFQTRAGCLIGAEHVNNSYECDIPIGAGICASYQTQTNSPRRARSVASQSIIAYTMSLGAENSVAYSNNSIAIPTNFAISVTTEILPVSMTKTSVDCTMYICGDSTECSNLLLQYGSFCTQLNRALTGIAVEQDKNTQEVFAQVKQIYKTPPIKDFGGFNFSQILPDPSKPSKRSFIEDLLFNKVTLADAGFIKQYGDCLGDIAARDLICAQKFNGLTVLPPLLTDEMIAQYTSALLAGTITSGWTFGAGAALQIPFAMQMAYRFNGIGVTQNVLYENQKLIANQFNSAIGKIQDSLSSTASALGKLQDVVNQNAQALNTLVKQLSSNFGAISSVLNDILSRLDPPEAEVQIDRLITGRLQSLQTYVTQQLIRAAEIRASANLAATKMSECVLGQSKRVDFCGKGYHLMSFPQSAPHGVVFLHVTYVPAQEKNFTTAPAICHDGKAHFPREGVFVSNGTHWFVTQRNFYEPQIITTDNTFVSGNCDVVIGIVNNTVYDPLQPELDSGGGGSDIIKLLNEQVNKEMQSSNLYMSMSSWCYTHSLDGAGLFLFDHAAEEYEHAKKLIIFLNENNVPVQLTSISAPEHKFEGLTQIFQKAYEHEQHISESINNIVDHAIKSKDHATFNFLQWYVAEQHEEEVLFKDILDKIELIGNENHGLYLADQYVKGIAKSRKS

SEQ ID NO: 8732 - protein, 1315 aa, Artificial Sequence
  SARS-CoV-2/USA/CruiseA-23/2020__EPI_ISL_414482 spike protein (1-1147)(K986P_V987P) Ferritin construct
MFVFLVLLPLVSSQCVNLTTRTQLPPAYTNSFTRGVYYPDKVFRSSVLHSTQDLFLPFFSNVTWFHAIHVSGTNGTKRFDNPVLPFNDGVYFASTEKSNIIRGWIFGTTLDSKTQSLLIVNNATNVVIKVCEFQFCNDPFLGVYYHKNNKSWMESEFRVYSSANNCTFEYVSQPFLMDLEVKQGNFKNLREFVFKNIDGYFKIYSKHTPINLVRDLPQGFSALEPLVDLPIGINITRFQTLLALHRSYLTPGDSSSGWTAGAAAYYVGYLQPRTFLLKYNENGTITDAVDCALDPLSETKCTLKSFTVEKGIYQTSNFRVQPTESIVRFPNITNLCPFGEVFNATRFASVYAWNRKRISNCVADYSVLYNSASFSTFKCYGVSPTKLNDLCFTNVYADSFVIRGDEVRQIAPGQTGKIADYNYKLPDDFTGCVIAWNSNNLDSKVGGNYNYLYRLFRKSNLKPFERDISTEIYQAGSTPCNGVEGFNCYFPLQSYGFQPTNGVGYQPYRVVVLSFELLHAPATVCGPKKSTNLVKNKCVNFNFNGLTGTGVLTESNKKFLPFQQFGRDIADTTDAVRDPQTLEILDITPCSFGGVSVITPGTNTSNQVAVLYQDVNCTEVPVAIHADQLTPTWRVYSTGSNVFQTRAGCLIGAEHVNNSYECDIPIGAGICASYQTQTNSPRRARSVASQSIIAYTMSLGAENSVAYSNNSIAIPTNFTISVTTEILPVSMTKTSVDCTMYICGDSTECSNLLLQYGSFCTQLNRALTGIAVEQDKNTQEVFAQVKQIYKTPPIKDFGGFNFSQILPDPSKPSKRSFIEDLLFNKVTLADAGFIKQYGDCLGDIAARDLICAQKFNGLTVLPPLLTDEMIAQYTSALLAGTITSGWTFGAGAALQIPFAMQMAYRFNGIGVTQNVLYENQKLIANQFNSAIGKIQDSLSSTASALGKLQDVVNQNAQALNTLVKQLSSNFGAISSVLNDILSRLDPPEAEVQIDRLITGRLQSLQTYVTQQLIRAAEIRASANLAATKMSECVLGQSKRVDFCGKGYHLMSFPQSAPHGVVFLHVTYVPAQEKNFTTAPAICHDGKAHFPREGVFVSNGTHWFVTQRNFYEPQIITTDNTFVSGNCDVVIGIVNNTVYDPLQPELDSGGGGSDIIKLLNEQVNKEMQSSNLYMSMSSWCYTHSLDGAGLFLFDHAAEEYEHAKKLIIFLNENNVPVQLTSISAPEHKFEGLTQIFQKAYEHEQHISESINNIVDHAIKSKDHATFNFLQWYVAEQHEEEVLFKDILDKIELIGNENHGLYLADQYVKGIAKSRKS

SEQ ID NO: 8733 - protein, 1315 aa, Artificial Sequence
  SARS-CoV-2/Hong Kong/case85_VM20002868/2020__EPI_ISL_414519 spike protein (1-1147)(K986P_V987P) Ferritin construct
MFVFLVLVPLVSSQCVNLTTRTQLPPAYTNSFTRGVYYPDKVFRSSVLHSTQDLFLPFFSNVTWFHAIHVSGTNGTKRFDNPVLPFNDGVYFASTEKSNIIRGWIFGTTLDSKTQSLLIVNNATNVVIKVCEFQFCNDPFLGVYYHKNNKSWMESEFRVYSSANNCTFEYVSQPFLMDLEGKQGNFKNLREFVFKNIDGYFKIYSKHTPINLVRDLPQGFSALEPLVDLPIGINITRFQTLLALHRSYLTPGDSSSGWTAGAAAYYVGYLQPRTFLLKYNENGTITDAVDCALDPLSETKCTLKSFTVEKGIYQTSNFRVQPTESIVRFPNITNLCPFGEVFNATRFASVYAWNRKRISNCVADYSVLYNSASFSTFKCYGVSPTKLNDLCFTNVYADSFVIRGDEVRQIAPGQTGKIADYNYKLPDDFTGCVIAWNSNNLDSKVGGNYNYLYRLFRKSNLKPFERDISTEIYQAGSTPCNGVEGFNCYFPLQSYGFQPTNGVGYQPYRVVVLSFELLHAPATVCGPKKSTNLVKNKCVNFNFNGLTGTGVLTESNKKFLPFQQFGRDIADTTDAVRDPQTLEILDITPCSFGGVSVITPGTNTSNQVAVLYQDVNCTEVPVAIHADQLTPTWRVYSTGSNVFQTRAGCLIGAEHVNNSYECDIPIGAGICASYQTQTNSPRRARSVASQSIIAYTMSLGAENSVAYSNNSIAIPTNFTISVTTEILPVSMTKTSVDCTMYICGDSTECSNLLLQYGSFCTQLNRALTGIAVEQDKNTQEVFAQVKQIYKTPPIKDFGGFNFSQILPDPSKPSKRSFIEDLLFNKVTLADAGFIKQYGDCLGDIAARDLICAQKFNGLTVLPPLLTDEMIAQYTSALLAGTITSGWTFGAGAALQIPFAMQMAYRFNGIGVTQNVLYENQKLIANQFNSAIGKIQDSLSSTASALGKLQDVVNQNAQALNTLVKQLSSNFGAISSVLNDILSRLDPPEAEVQIDRLITGRLQSLQTYVTQQLIRAAEIRASANLAATKMSECVLGQSKRVDFCGKGYHLMSFPQSAPHGVVFLHVTYVPAQEKNFTTAPAICHDGKAHFPREGVFVSNGTHWFVTQRNFYEPQIITTDNTFVSGNCDVVIGIVNNTVYDPLQPELDSGGGGSDIIKLLNEQVNKEMQSSNLYMSMSSWCYTHSLDGAGLFLFDHAAEEYEHAKKLIIFLNENNVPVQLTSISAPEHKFEGLTQIFQKAYEHEQHISESINNIVDHAIKSKDHATFNFLQWYVAEQHEEEVLFKDILDKIELIGNENHGLYLADQYVKGIAKSRKS

SEQ ID NO: 8734 - protein, 1315 aa, Artificial Sequence; identical to SEQ ID NO: 8724
  SARS-CoV-2/England/200990660/2020__EPI_ISL_414523 spike protein (1-1147)(K986P_V987P) Ferritin construct

SEQ ID NO: 8735 - protein, 1315 aa, Artificial Sequence
  SARS-CoV-2/Australia/NSW09/2020__EPI_ISL_413595 spike protein (1-1147)(K986P_V987P) Ferritin construct
MFVFLVLLPLVSSQCVNLTTRTQLPPAYTNSFTRGVYYPDKVFRSSVLHSTQDLFLPFFSNVTWFHAIHVSGTNGTKRFDNPVLPFNDGVYFASTEKSNIIRGWIFGTTLDSKTQSLLIVNNATNVVIKVCEFQFCNDPFLGVYYHKNNKSWMESEFRVYSSANNCTFEYVSQPFLMDLEGKQGNFKNLREFVFKNIDGYFKIYSKHTPINLVRDLPQGFSALEPLVDLPIGINITRFQTLLALHRSYLTPGDSSSGWTAGAAAYYVGYLQPRTFLLKYNENGTITDAVDCALDPLSETKCTLKSFTVEKGIYQTSNFRVQPTESIVRFPNITNLCPFGEVFNATRFASVYAWNRKRISNCVADYSVLYNSASFSTFKCYGVSPTKLNDLCFTNVYADSFVIRGDEVRQIAPGQTGKIADYNYKLPDDFTGCVIAWNSNNLDSKVGGNYNYLYRLFRKSNLKPFERDISTEIYQAGSTPCNGVEGFNCYFPLQSYGFQPTNGVGYQPYRVVVLSFELLHAPATVCGPKKSTNLVKNKCVNFNFNGLTGTGVLTESNKKFLPFQQFGRDIADTTDAVRDPQTLEILDITPCSFGGVSVITPGTNTSNQVAVLYQDVNCTEVPVAIHADQLTPTWRVYSTGSNVFQTRAGCLIGAEHVNNSYECDIPIGAGICASYQTQTNSPRRARSVASQSIIAYTMSLGAENSVAYSNNSIAIPTNFTISVTTEILPVSMTKTSVDCTMYICGDSTECSNLLLQYGSFCTQLNRALTGIAVEQDKNTQEVFAQVKQIYKTPPIKDFGGFNFSQILPDPSKPSKRSFIEDLLFNKVTLADAGFIKQYGDCLGDIAARDLICAQKFNGLTVLPPLLTDEMIAQYTSALLAGTITSGWTFGAGAALQIPFAMQMAYRFNGIGVTQNVLYENQKLIANQFNSAIGKIQDSLSFTASALGKLQDVVNQNAQALNTLVKQLSSNFGAISSVLNDILSRLDPPEAEVQIDRLITGRLQSLQTYVTQQLIRAAEIRASANLAATKMSECVLGQSKRVDFCGKGYHLMSFPQSAPHGVVFLHVTYVPAQEKNFTTAPAICHDGKAHFPREGVFVSNGTHWFVTQRNFYEPQIITTDNTFVSGNCDVVIGIVNNTVYDPLQPELDSGGGGSDIIKLLNEQVNKEMQSSNLYMSMSSWCYTHSLDGAGLFLFDHAAEEYEHAKKLIIFLNENNVPVQLTSISAPEHKFEGLTQIFQKAYEHEQHISESINNIVDHAIKSKDHATFNFLQWYVAEQHEEEVLFKDILDKIELIGNENHGLYLADQYVKGIAKSRKS

SEQ ID NO: 8736 - protein, 1315 aa, Artificial Sequence; identical to SEQ ID NO: 8716
  SARS-CoV-2/Australia/NSW10/2020__EPI_ISL_413596 spike protein (1-1147)(K986P_V987P) Ferritin construct

SEQ ID NO: 8737 - protein, 1315 aa, Artificial Sequence
  SARS-CoV-2/Switzerland/1000477797/2020__EPI_ISL_413023 spike protein (1-1147)(K986P_V987P) Ferritin construct
MFVFLVLLPLVSSQCVNLTTRTQLPPAYTNSFTRGVYYPDKVFRSSVLHSTQDLFLPFFSNVTWFHAIHVSGTNGTKRFDNPVLPFNDGVYFASTEKSNIIRGWIFGTTLDSKTQSLLIVNNATNVVIKVCEFQFCNDPFLGVYYHKNNKSWMESEFRVYSSANNCTFEYVSQPFLMDLEGKQGNFKNLREFVFKNIDGYFNIYSKHTPINLVRDLPQGFSALEPLVDLPIGINITRFQTLLALHRSYLTPGDSSSGWTAGAAAYYVGYLQPRTFLLKYNENGTITDAVDCALDPLSETKCTLKSFTVEKGIYQTSNFRVQPTESIVRFPNITNLCPFGEVFNATRFASVYAWNRKRISNCVADYSVLYNSASFSTFKCYGVSPTKLNDLCFTNVYADSFVIRGDEVRQIAPGQTGKIADYNYKLPDDFTGCVIAWNSNNLDSKVGGNYNYLYRLFRKSNLKPFERDISTEIYQAGSTPCNGVEGFNCYFPLQSYGFQPTNGVGYQPYRVVVLSFELLHAPATVCGPKKSTNLVKNKCVNFNFNGLTGTGVLTESNKKFLPFQQFGRDIADTTDAVRDPQTLEILDITPCSFGGVSVITPGTNTSNQVAVLYQGVNCTEVPVAIHADQLTPTWRVYSTGSNVFQTRAGCLIGAEHVNNSYECDIPIGAGICASYQTQTNSPRRARSVASQSIIAYTMSLGAENSVAYSNNSIAIPTNFTISVTTEILPVSMTKTSVDCTMYICGDSTECSNLLLQYGSFCTQLNRALTGIAVEQDKNTQEVFAQVKQIYKTPPIKDFGGFNFSQILPDPSKPSKRSFIEDLLFNKVTLADAGFIKQYGDCLGDIAARDLICAQKFNGLTVLPPLLTDEMIAQYTSALLAGTITSGWTFGAGAALQIPFAMQMAYRFNGIGVTQNVLYENQKLIANQFNSAIGKIQDSLSSTASALGKLQDVVNQNAQALNTLVKQLSSNFGAISSVLNDILSRLDPPEAEVQIDRLITGRLQSLQTYVTQQLIRAAEIRASANLAATKMSECVLGQSKRVDFCGKGYHLMSFPQSAPHGVVFLHVTYVPAQEKNFTTAPAICHDGKAHFPREGVFVSNGTHWFVTQRNFYEPQIITTDNTFVSGNCDVVIGIVNNTVYDPLQPELDSGGGGSDIIKLLNEQVNKEMQSSNLYMSMSSWCYTHSLDGAGLFLFDHAAEEYEHAKKLIIFLNENNVPVQLTSISAPEHKFEGLTQIFQKAYEHEQHISESINNIVDHAIKSKDHATFNFLQWYVAEQHEEEVLFKDILDKIELIGNENHGLYLADQYVKGIAKSRKS

SEQ ID NO: 8738 - protein, 1315 aa, Artificial Sequence
  SARS-CoV-2/Belgium/BA-02291/2020__EPI_ISL_415159 spike protein (1-1147)(K986P_V987P) Ferritin construct
MFVFLVLLPLVSSQCVNLTTRTQLPPAYTNSFTRGVYYPDKVFRSSVLHSTQDLFLPFFSNVTWFHAIHVSGTNGTKRFDNPVLPFNDGVYFASTEKSNIIRGWIFGTTLDSKTQSLLIVNNATNVVIKVCEFQFCNDPFLGVYYHKNNKSWMESEFRVYSSANNCTFEYVSQPFLMDLEGKQGNFKNLREFVFKNIDGYFKIYSKHTPINLVRDLPQGFSALEPLVDLPIGINITRFQTLLALHRSYLTPGDSSSGWTAGAAAYYVGYLQPRTFLLKYNENGTITDAVDCALDPLSETKCTLKSFTVEKGIYQTSNFRVQPTESIVRFPNITNLCPFGEVFNATRFASVYAWNRKRISNCVADYSVLYNSASFSTFKCYGVSPTKLNDLCFTNVYADSFVIRGDEVRQIAPGQTGKIADYNYKLPDDFTGCVIAWNSNNLDSKVGGNYNYLYRLFRRSNLKPFERDISTEIYQAGSTPCNGVEGFNCYFPLQSYGFQPTNGVGYQPYRVVVLSFELLPAPATVCGPKKSTNLVKNKCVNFNFNGLTGTGVLTESNKKFLPFQQFGRDIADTTDAVRDPQTLEILDITPCSFGGVSVITPGTNTSNQVAVLYQGVNCTEVPVAIHADQLTPTWRVYSTGSNVFQTRAGCLIGAEHVNNSYECDIPIGAGICASYQTQTNSPRRARSVASQSIIAYTMSLGAENSVAYSNNSIAIPTNFTISVTTEILPVSMTKTSVDCTMYICGDSTECSNLLLQYGSFCTQLNRALTGIAVEQDKNTQEVFAQVKQIYKTPPIKDFGGFNFSQILPDPSKPSKRSFIEDLLFNKVTLADAGFIKQYGDCLGDIAARDLICAQKFNGLTVLPPLLTDEMIAQYTSALLAGTITSGWTFGAGAALQIPFAMQMAYRFNGIGVTQNVLYENQKLIANQFNSAIGKIQDSLSSAAPALGKLQDVVNQNAQALNTLVKQLSSNFGAISSVLNDILSRLDPPEAEVQIDRLITGRLQSLQTYVTQQLIRAAEIRASANLAATKMSECVLGQSKRVDFCGKGYHLMSFPQSAPHGVVFLHVTYVPAQEKNFTTAPAICHDGKAHFPREGVFVSNGTHWFVTQRNFYEPQIITTDNTFVSGNCDVVIGIVNNTVYDPLQPELDSGGGGSDIIKLLNEQVNKEMQSSNLYMSMSSWCYTHSLDGAGLFLFDHAAEEYEHAKKLIIFLNENNVPVQLTSISAPEHKFEGLTQIFQKAYEHEQHISESINNIVDHAIKSKDHATFNFLQWYVAEQHEEEVLFKDILDKIELIGNENHGLYLADQYVKGIAKSRKS

SEQ ID NO: 8739 - protein, 1315 aa, Artificial Sequence
  SARS-CoV-2/USA/WA8-UW5/2020__EPI_ISL_413486 spike protein (1-1147)(K986P_V987P) Ferritin construct
MFVFLVLLPLVSSQCVNLTTRTQLPPAYTNSFTRGVYYPDKVFRSSVLHSTQDLFLPFFSNVTWFHAIHVSGTNGTKRFDNPVLPFNDGVYFASTEKSNIIRGWIFGTTLDSKTQSLLIVNNATNVVIKVCEFQFCNDPFLGVYYHKNNKSWMESEFRVYSSANNCTFEYVSQPFLMDLEGKQGNFKNLREFVFKNIDGYFKIYSKHTPINLVRDLPQGFSALEPLVDLPIGINITRFQTLLALHRSYLTPGDSSSGWTAGAAAYYVGYLQPRTFLLKYNENGTITDAVDCALDPLSETKCTLKSFTVEKGIYQTSNFRVQPTESIVRFPNITNLCPFGEVFNATRFASVYAWNRKRISNCVADYSVLYNSASFSTFKCYGVSPTKLNDLCFTNVYADSFVIRGDEVRQIAPGQTGKIADYNYKLPDDFTGCVIAWNSNNLDSKVGGNYNYLYRLFRKSNLKPFERDISTEIYQAGSTPCNGVEGFNCYFPLQSYGFQPTNGVGYQPYRVVVLSFELLHAPATVCGPKKSTNLVKNKCVNFNFNGLTGTGVLTESNKKFLPFQQFGRDIADTTDAVRDPQTLEILDITPCSFGGVSVITPGTNTSNQVAVLYQDVNCTEVPVAIHADQLTPTWRVYSTGSNVFQTRAGCLIGAEYVNNSYECDIPIGAGICASYQTQTNSPRRARSVASQSIIAYTMSLGAENSVAYSNNSIAIPTNFTISVTTEILPVSMTKTSVDCTMYICGDSTECSNLLLQYGSFCTQLNRALTGIAVEQDKNTQEVFAQVKQIYKTPPIKDFGGFNFSQILPDPSKPSKRSFIEDLLFNKVTLADAGFIKQYGDCLGDIAARDLICAQKFNGLTVLPPLLTDEMIAQYTSALLAGTITSGWTFGAGAALQIPFAMQMAYRFNGIGVTQNVLYENQKLIANQFNSAIGKIQDSLSSTASALGKLQDVVNQNAQALNTLVKQLSSNFGAISSVLNDILSRLDPPEAEVQIDRLITGRLQSLQTYVTQQLIRAAEIRASANLAATKMSECVLGQSKRVDFCGKGYHLMSFPQSAPHGVVFLHVTYVPAQEKNFTTAPAICHDGKAHFPREGVFVSNGTHWFVTQRNFYEPQIITTDNTFVSGNCDVVIGIVNNTVYDPLQPELDSGGGGSDIIKLLNEQVNKEMQSSNLYMSMSSWCYTHSLDGAGLFLFDHAAEEYEHAKKLIIFLNENNVPVQLTSISAPEHKFEGLTQIFQKAYEHEQHISESINNIVDHAIKSKDHATFNFLQWYVAEQHEEEVLFKDILDKIELIGNENHGLYLADQYVKGIAKSRKS

SEQ ID NO: 8740 - protein, 1315 aa, Artificial Sequence
  SARS-CoV-2/England/20102000506/2020__EPI_ISL_415147 spike protein (1-1147)(K986P_V987P) Ferritin construct
MFVFLVLLPLVSSQCVNLTTRTQLPPAYTNSFTRGVYYPDKVFRSSVLHSTQDLFLPFFSNVTWFHAIHVSGTNGTKRFDNPVLPFNDGVYFASTEKSNIIRGWIFGTTLDSKTQSLLIVNNATNVVIKVCEFQFCNDPFLGVYYHKNNKSWMESEFRVYSSANNCTFEYVSQPFLMDLEGKQGNFKNLREFVFKNIDGYFKIYSKHTPINLVRDLPQGFSALEPLVDLPIGINITRFQTLLALHRSYLTPGDSSSGWTAGAAAYYVGYLQPRTFLLKYNENGTITDAVDCALDPLSETKCTLKSFTVEKGIYQTSNFRVQPTESIVRFPNITNLCPFGEVFNATRFASVYAWNRKRISNCVADYSVLYNSASFSTFKCYGVSPTKLNDLCFTNVYADSFVIRGDEVRQIAPGQTGKIADYNYKLPDDFTGCVIAWNSNNLDSKVGGNYNYLYRLFRKSNLKPFERDISTEIYQAGSTPCNGVEGFNCYFPLQSYGFQPTNGVGYQPYRVVVLSFELLHAPATVCGPKKSTNLVKNKCVNFNFNGLTGTGVLTESNKKFLPFQQFGRDIADTTDAVRDPQTLEILDITPCSFGGVSVITPGTNTSNQVAVLYQGVNCTEVPVAIHADQLTPTWRVYSTGSNVFQTRAGCLIGAEHVNNSYECDIPIGAGICASYQTQTNSPRRARSVASQSIIAYTMSLGAENSVAYSNNSIAIPTNFTISVTTEILPVSMTKTSVDCTMYICGDSTECSNLLLQYGSFCTQLNRALTGIAVEQDKNTQEVFAQVKQIYKTPPIKDFGGFNFSQILPDPSKPSKRSFIEDLLFNKVTLADAGFIKQYGYCLGDIAARDLICAQKFNGLTVLPPLLTDEMIAQYTSALLAGTITSGWTFGAGAALQIPFAMQMAYRFNGIGVTQNVLYENQKLIANQFNSAIGKIQDSLSSTASALGKLQDVVNQNAQALNTLVKQLSSNFGAISSVLNDILSRLDPPEAEVQIDRLITGRLQSLQTYVTQQLIRAAEIRASANLAATKMSECVLGQSKRVDFCGKGYHLMSFPQSAPHGVVFLHVTYVPAQEKNFTTAPAICHDGKAHFPREGVFVSNGTHWFVTQRNFYEPQIITTDNTFVSGNCDVVIGIVNNTVYDPLQPELDSGGGGSDIIKLLNEQVNKEMQSSNLYMSMSSWCYTHSLDGAGLFLFDHAAEEYEHAKKLIIFLNENNVPVQLTSISAPEHKFEGLTQIFQKAYEHEQHISESINNIVDHAIKSKDHATFNFLQWYVAEQHEEEVLFKDILDKIELIGNENHGLYLADQYVKGIAKSRKS

SEQ ID NO: 8741 - protein, 1315 aa, Artificial Sequence
  SARS-CoV-2/Belgium/VAG-03013/2020__EPI_ISL_415155 spike protein (1-1147)(K986P_V987P) Ferritin construct
MFVFLVLLPLVSSQCVNLTTRTQLPPAYTNSFTRGVYYPDKVFRSSVLHSTQDLFLPFFSNVTWFHAIHVSGTNGTKRFDNPVLPFNDGVYFASTEKSNIIRGWIFGTTLDSKTQSLLIVNNATNVVIKVCEFQFCNDPFLGVYYHKNNKSWMESEFRVYSSANNCTFEYVSQPFLMDLEGKQGNFKNLREFVFKNIDGYFKIYSKHTPINLVRDLPQGFSALEPLVDLPIGINITRFQTLLALHRSYLTPGDSSSGWTAGAAAYYVGYLQPRTFLLKYNENGTITDAVDCALDPLSETKCTLKSFTVEKGIYQTSNFRVQPTESIVRFPNITNLCPFGEVFNATRFASVYAWNRKRISNCVADYSVLYNSASFSTFKCYGVSPTKLNDLCFTNVYADSFVIRGDEVRQIAPGQTGKIADYNYKLPDDFTGCVIAWNSNNLDSKVGGNYNYLYRLFRKSNLKPFERDISTEIYQAGSTPCNGVEGFNCYFPLQSYGFQPTNGVGYQPYRVVVLSFELLHAPATVCGPKKSTNLVKNKCVNFNFNGLTGTGVLTESNKKFLPFQQFGRDIADTTDAVRDPQTLEILDITPCSFGGVSVITPGTNTSNQVAVLYQGVNCTEVPVAIHADQLTPTWRVYSTGSNVFQTRAGCLIGAEHVNNSYECDIPIGAGICASYQTQTNSPRRARSVASQSIIAYTMSLGAENSVAYSNNSIAIPTNFTISVTTEILPVSMTKTSVDCTMYICGDSTECSNLLLQYGSFCTQLNRALTGIAVEQDKNTQEVFAQVKQIYKTPPIKDFGGFNFSQILPDPSKPSKRSFIEDLLFNKVTLADAGFIKQYGDCLGDIAARDLICAQKFNGLTVLPPLLTDEMIAQYTSALLAGTITSGWTFGAGAALQIPFAMQMAYRFNGIGVTQNVLYENQKLIANQFNSAIGKIQDSLSSTATALGKLQDVVNQNAQALNTLVKQLSSNFGAISSVLNDILSRLDPPEAEVQIDRLITGRLQSLQTYVTQQLIRAAEIRASANLAATKMSECVLGQSKRVDFCGKGYHLMSFPQSAPHGVVFLHVTYVPAQEKNFTTAPAICHDGKAHFPREGVFVSNGTHWFVTQRNFYEPQIITTDNTFVSGNCDVVIGIVNNTVYDPLQPELDSGGGGSDIIKLLNEQVNKEMQSSNLYMSMSSWCYTHSLDGAGLFLFDHAAEEYEHAKKLIIFLNENNVPVQLTSISAPEHKFEGLTQIFQKAYEHEQHISESINNIVDHAIKSKDHATFNFLQWYVAEQHEEEVLFKDILDKIELIGNENHGLYLADQYVKGIAKSRKS

SEQ ID NO: 8742 - protein, 1315 aa, Artificial Sequence
  SARS-CoV-2/Belgium/BC-03016/2020__EPI_ISL_415157 spike protein (1-1147)(K986P_V987P) Ferritin construct
MFVFLVLLPLVSSQCVNLTTRTQLPPAYTNSFTRGVYYPDKVFRSSVLHSTQDLFLPFFSNVTWFHAIHVSGTNGTKRFDNPVLPFNDGVYFASTEKSNIIRGWIFGTTLDSKTQSLLIVNNATNVVIKVCEFQFCNDPFLGVYYHKNNKSWMESEFRVYSSANNCTFEYVSQPFLMDLEGKQGNFKNLREFVFKNIDGYFKIYSKHTPINLVRDLPQGFSALEPLVDLPIGINITRFQTLLALHRSYLTPGDSSSGWTAGAAAYYVGYLQPRTFLLKYNENGTITDAVDCALDPLSETKCTLKSFTVEKGIYQTSNFRVQPTESIVRFPNITNLCPFGEVFNATRFASVYAWNRKRISNCVADYSVLYNSASFSTFKCYGVSPTKLNDLCFTNVYADSFVIRGDEVRQIAPGQTGKIADYNYKLPDDFTGCVIAWNSNNLDSKVGGNYNYLYRLFRKSNLKPFERDISTEIYQAGSTPCNGVEGFNCYFPLQSYGFQPTNGVGYQPYRVVVLSFELLHAPATVCGPKKSTNLVKNKCVNFNFNGLTGTGVLTESNKKFLPFQQFGRDIADTTDAVRDPQTLEILDITPCSFGGVSVITPGTNTSNQVAVLYQGVNCTEVPVAIHADQLTPTWRVYSTGSNVFQTRAGCLIGAEHVNNSYECDIPIGAGICASYQTQTNSPRRARSVASQSIIAYTMSLGAENSVAYSNNSIAIPTNFTISVTTEILPVSMTKTSVDCTMYICGDSTECSNLLLQYGSFCTQLNRALTGIAVEQDKNTQEVFAQVKQIYKTPPIKDFGGFNFSQILPDPSKPSKRSFIEDLLFNKVTLADAGFIKQYGDCLGDIAARDLICAQKFNGLTVLPPLLTDEMIAQYTSALLAGTITSGWTFGAGAALQIPFAMQMAYRFNGIGVTQNVLYENQKLIANQFNSAIGKIQDSLSSTAPALGKLQDVVNQNAQALNTLVKQLSSNFGAISSVLNDILSRLDPPEAEVQIDRLITGRLQSLQTYVTQQLIRAAEIRASANLAATKMSECVLGQSKRVDFCGKGYHLMSFPQSAPHGVVFLHVTYVPAQEKNFTTAPAICHDGKAHFPREGVFVSNGTHWFVTQRNFYEPQIITTDNTFVSGNCDVVIGIVNNTVYDPLQPELDSGGGGSDIIKLLNEQVNKEMQSSNLYMSMSSWCYTHSLDGAGLFLFDHAAEEYEHAKKLIIFLNENNVPVQLTSISAPEHKFEGLTQIFQKAYEHEQHISESINNIVDHAIKSKDHATFNFLQWYVAEQHEEEVLFKDILDKIELIGNENHGLYLADQYVKGIAKSRKS

SEQ ID NO: 8743 - protein, 1315 aa, Artificial Sequence
  SARS-CoV-2/Germany/BavPat3/2020__EPI_ISL_414521 spike protein (1-1147)(K986P_V987P) Ferritin construct
MFVFLVLLPLVSSQCVNLTTRTQLPPAYTNSFTRGVYYPDKVFRSSVLHSTQDLFLPFFSNVTWFHAIHVSGTNGTKRFDNPVLPFNDGVYFASTEKSNIIRGWIFGTTLDSKTQSLLIVNNATNVVIKVCEFQFCNDPFLGVYYHKNNKSWMESEFRVYSSANNCTFEYVSQPFLMDLEGKQGNFKNLREFVFKNIDGYFKIYSKHTPINLVRDLPQGFSALEPLVDLPIGINITRFQTLLALHRSYLTPGDSSSGWTAGAAAYYVGYLQPRTFLLKYNENGTITDAVDCALDPLSETKCTLKSFTVEKGIYQTSNFRVQPTESIVRFPNITNLCPFGEVFNATRFASVYAWNRKRISNCVADYSVLYNSASFSTFKCYGVSPTKLNDLCFTNVYADSFVIRGDEVRQIAPGQTGKIADYNYKLPDDFTGCVIAWNSNNLDSKVGGNYNYLYRLFRKSNLKPFERDISTEIYQAGSTPCNGVEGFNCYFPLQSYGFQPTNGVGYQPYRVVVLSFELLHAPATVCGPKKSTNLVKNKCVNFNFNGLTGTGVLTESNKKFLPFQQFGRDIADTTDAVRDPQTLEILDITPCSFGGVSVITPGTNTSNQVAVLYQDVNCTEVPVAIHADQLTPTWRVYSTGSNVFQTRAGCLIGAEHVNNSYECDIPIGAGICASYQTQTNSPRRARSVASQSIIAYTMSLGAENSVAYSNNSIAIPTNFTISVTTEILPVSMTKTSVDCTMYICGDSTECSNLLLQYGSFCTQLNRALTGIAVEQDKNTQQVFAQVKQIYKTPPIKDFGGFNFSQILPDPSKPSKRSFIEDLLFNKVTLADAGFIKQYGDCLGDIAARDLICAQKFNGLTVLPPLLTDEMIAQYTSALLAGTITSGWTFGAGAALQIPFAMQMAYRFNGIGVTQNVLYENQKLIANQFNSAIGKIQDSLSSTASALGKLQDVVNQNAQALNTLVKQLSSNFGAISSVLNDILSRLDPPEAEVQIDRLITGRLQSLQTYVTQQLIRAAEIRASANLAATKMSECVLGQSKRVDFCGKGYHLMSFPQSAPHGVVFLHVTYVPAQEKNFTTAPAICHDGKAHFPREGVFVSNGTHWFVTQRNFYEPQIITTDNTFVSGNCDVVIGIVNNTVYDPLQPELDSGGGGSDIIKLLNEQVNKEMQSSNLYMSMSSWCYTHSLDGAGLFLFDHAAEEYEHAKKLIIFLNENNVPVQLTSISAPEHKFEGLTQIFQKAYEHEQHISESINNIVDHAIKSKDHATFNFLQWYVAEQHEEEVLFKDILDKIELIGNENHGLYLADQYVKGIAKSRKS

SEQ ID NO: 8744 - protein, 1315 aa, Artificial Sequence
  SARS-CoV-2/France/HF1805/2020__EPI_ISL_414628 spike protein (1-1147)(K986P_V987P) Ferritin construct
MFVFLVLLPLVSSQCVNLTTRTQLPPAYTNSFTRGVYYPDKVFRSSVLHSTQDLFLPFFSNVTWFHAIHVSGTNGTKRFDNPVLPFNDGVYFASTEKSNIIRGWIFGTTLDSKTQSLLIVNNATNVVIKVCEFQFCNDPFLGVYYHKNNKSWMESEFRVYSSANNCTFEYVSQPFLMDLEGKQGNFKNLREFVFKNIDGYFKIYSKHTPINLVRDLPQGFSALEPLVDLPIGINITRFQTLLALHRSYLTPGDSSSGWTAGAAAYYVGYLQPRTFLLKYNENGTITDAVDCALDPLSETKCTLKSFTVEKGIYQTSNFRVQPTESIVRFPNITNLCPFGEVFNATRFASVYAWNRKRISNCVADYSVLYNSASFSTFKCYGVSPTKLNDLCFTNVYADSFVIRGDEVRQIAPGQTGKIADYNYKLPDDFTGCVIAWNSNNLDSKVGGNYNYLYRLFRKSNLKPFERDISTEIYQAGSTPCNGVEGFNCYFPLQSYGFQPTNGVGYQPYRVVVLSFELLHAPATVCGPKKSTNLVKNKCVNFNFNGLTGTGVLTESNKKFLPFQQFGRDIADTTDAVRDPQTLEILDITPCSFGGVSVITPGTNTSNQVAVLYQGVNCTEVPVAIHADQLTPTWRVYSTGSNVFQTRAGCLIGAEHVNNSYECDIPIGAGICASYQTQTNSPRRARSVASQSIIAYTMSLGAENSVAYSNNSIAIPTNFTISVTTEILPVSMTKTSVDCTMYICGDSTECSNLLLQYGSFCTQLNRALTGIAVEQDKNTQEVFAQVKQIYKTPPIKDFGGFNFSQILPDPSKPSKRSFIEDLLFNKVTLADAGFIKQYGDCLGDIAARDLICAQKFNGLTVLPPLLTDEMIAQYTSALLAGTITSGWTFGAGAALQIPFAMQMAYRFNGIGVTQNVLYENQKLIANQFNSAIGKIQDSLSSTASALGKLQDVVNQNAQALNTLVKQLSSNFGAISSVLNDILSRLDPPEAEVQIDRLITGRLQSLQTYVTQQLIRAAEIRASANLAATKMSECVLGQSKRVDFCGKGYHLMSFPQSAPHGVVFLHVTYVPAQEKNFTTAPAICHDGKAHFPREGVFVSNGTHWFVTQRNFYEPQIITTDNTFVSGNCDVVIGVVNNTVYDPLQPELDSGGGGSDIIKLLNEQVNKEMQSSNLYMSMSSWCYTHSLDGAGLFLFDHAAEEYEHAKKLIIFLNENNVPVQLTSISAPEHKFEGLTQIFQKAYEHEQHISESINNIVDHAIKSKDHATFNFLQWYVAEQHEEEVLFKDILDKIELIGNENHGLYLADQYVKGIAKSRKS

SEQ ID NO: 8745 - protein, 1315 aa, Artificial Sequence
  SARS-CoV-2/Netherlands/ZuidHolland_9/2020__EPI_ISL_414445 spike protein (1-1147)(K986P_V987P) Ferritin construct
MFVFLVLLPLVSSQCVNLTTRTQLPPAYTNSFTRGVYYPDKVFRSSVLHSTQDLFLPFFSNVTWFHAIHVSGTNGTKRFDNPVLPFNDGVYFASTEKSNIIRGWIFGTTLDSKTQSLLIVNNATNVVIKVCEFQFCNDPFLGVYYHKNNKSWMESEFRVYSSANNCTFEYVSQPFLMDLEGKQGNFKNLREFVFKNIDGYFKIYSKHTPINLVRDLPQGFSALEPLVDLPIGINITRFQTLLALHRSYLTPGDSSSGWTAGAAAYYVGYLQPRTFLLKYNENGTITDAVDCALDPLSETKCTLKSFTVEKGIYQTSNFRVQPTESIVRFPNITNLCPFGEVFNATRFASVYAWNRKRISNCVADYSVLYNSASFSTFKCYGVSPTKLNDLCFTNVYADSFVIRGDEVRQIAPGQTGKIADYNYKLPDDFTGCVIAWNSNNLDSKVGGNYNYLYRLFRKSNLKPFERDISTEIYQAGSTPCNGVEGFNCYFPLQSYGFQPTNGVGYQPYRVVVLSFELLHAPATVCGPKKSTNLVKNKCVNFNFNGLTGTGVLTESNKKFLPFQQFGRDIADTTDAVRDPQTLEILDITPCSFGGVSVITPGTNTSNQVAVLYQGVNCTEVPVAIHADQLTPTWRVYSTGSNVFQTRAGCLIGAEHVNNSYECDIPIGAGICASYQTQTNSPRRARSVASQSIIAYTMSLGAENSVAYSNNSIAIPTNFTISVTTEILPVSMTKTSVDCTMYICGDSTECSNLLLQYGSFCTQLNRALTGIAVEQDKNTQEVFAQVKQIYKTPPIKDFGGFNFSQILPDPSKPSKRSFIEDLLFNKVTLADAGFIKQYGDCLGDIAARDLICVQKFNGLTVLPPLLTDEMIAQYTSALLAGTITSGWTFGAGAALQIPFAMQMAYRFNGIGVTQNVLYENQKLIANQFNSAIGKIQDSLSSTASALGKLQDVVNQNAQALNTLVKQLSSNFGAISSVLNDILSRLDPPEAEVQIDRLITGRLQSLQTYVTQQLIRAAEIRASANLAATKMSECVLGQSKRVDFCGKGYHLMSFPQSAPHGVVFLHVTYVPAQEKNFTTAPAICHDGKAHFPREGVFVSNGTHWFVTQRNFYEPQIITTDNTFVSGNCDVVIGIVNNTVYDPLQPELDSGGGGSDIIKLLNEQVNKEMQSSNLYMSMSSWCYTHSLDGAGLFLFDHAAEEYEHAKKLIIFLNENNVPVQLTSISAPEHKFEGLTQIFQKAYEHEQHISESINNIVDHAIKSKDHATFNFLQWYVAEQHEEEVLFKDILDKIELIGNENHGLYLADQYVKGIAKSRKS

SEQ ID NO: 8746 - protein, 1315 aa, Artificial Sequence
  SARS-CoV-2/Finland/FIN03032020A/2020__EPI_ISL_413602 spike protein (1-1147)(K986P_V987P) Ferritin construct
MFVFLVLLPLVSSQCVNLTTRTQLPPAYTNSFTRGVYYPDKVFRSSVLHSTQDLFLPFFSNVTWFHAIHVSGTNGTKRFDNPVLPFNDGVYFASTEKSNIIRGWIFGTTLDSKTQSLLIVNNATNVVIKVCEFQFCNDPFLGVYYHKNNKSWMESEFRVYSSANNCTFEYVSQPFLMDLEGKQGNFKNLREFVFKNIDGYFKIYSKHTPINLVRDLPQGFSALEPLVDLPIGINITRFQTLLALHRSYLTPGDSSSGWTAGAAAYYVGYLQPRTFLLKYNENGTITDAVDCALDPLSETKCTLKSFTVEKGIYQTSNFRVQPTESIVRFPNITNLCPFGEVFNATRFASVYAWNRKRISNCVADYSVLYNSASFSTFKCYGVSPTKLNDLCFTNVYADSFVIRGDEVRQIAPGQTGKIADYNYKLPDDFTGCVISWNSNNLDSKVGGNYNYLYRLFRKSNLKPFERDISTEIYQAGSTPCNGVEGFNCYFPLQSYGFQPTNGVGYQPYRVVVLSFELLHAPATVCGPKKSTNLVKNKCVNFNFNGLTGTGVLTESNKKFLPFQQFGRDIADTTDAVRDPQTLEILDITPCSFGGVSVITPGTNTSNQVAVLYQGVNCTEVPVAIHADQLTPTWRVYSTGSNVFQTRAGCLIGAEHVNNSYECDIPIGAGICASYQTQTNSPRRARSVASQSIIAYTMSLGAENSVAYSNNSIAIPTNFTISVTTEILPVSMTKTSVDCTMYICGDSTECSNLLLQYGSFCTQLNRALTGIAVEQDKNTQEVFAQVKQIYKTPPIKDFGGFNFSQILPDPSKPSKRSFIEDLLFNKVTLADAGFIKQYGDCLGDIAARDLICAQKFNGLTVLPPLLTDEMIAQYTSALLAGTITSGWTFGAGAALQIPFAMQMAYRFNGIGVTQNVLYENQKLIANQFNSAIGKIQDSLSSTASALGKLQDVVNQNAQALNTLVKQLSSNFGAISSVLNDILSRLDPPEAEVQIDRLITGRLQSLQTYVTQQLIRAAEIRASANLAATKMSECVLGQSKRVDFCGKGYHLMSFPQSAPHGVVFLHVTYVPAQEKNFTTAPAICHDGKAHFPREGVFVSNGTHWFVTQRNFYEPQIITTDNTFVSGNCDVVIGIVNNTVYDPLQPELDSGGGGSDIIKLLNEQVNKEMQSSNLYMSMSSWCYTHSLDGAGLFLFDHAAEEYEHAKKLIIFLNENNVPVQLTSISAPEHKFEGLTQIFQKAYEHEQHISESINNIVDHAIKSKDHATFNFLQWYVAEQHEEEVLFKDILDKIELIGNENHGLYLADQYVKGIAKSRKS

SEQ ID NO: 8747 - protein, 1315 aa, Artificial Sequence
  SARS-CoV-2/France/GE1977/2020__EPI_ISL_414632 spike protein (1-1147)(K986P_V987P) Ferritin construct
MFVFLVLLPLVSSQCVNLTTRTQLPPAYTNSFTRGVYYPDKVFRSSVLHSTQDLFLPFFSNVTWFHAIHVSGTNGTKRFDNPVLPFNDGVYFASTEKSNIIRGWIFGTTLDSKTQSLLIVNNATNVVIKVCEFQFCNDPFLGVYYHKNNKSWMESEFRVYSSANNCTFEYVSQPFLMDLEGKQGNFKNLREFVFKNIDGYFKIYSKHTPINLVRDLPQGFSALEPLVDLPIGINITRFQTLLALHRSYLTPGDSSSGWTAGAAAYYVGYLQPRTFLLKYNENGTITDAVDCALDPLSETKCTLKSFTVEKGIYQTSNFRVQPTESIVRFPNITNLCPFGEVFNATRFASVYAWNRKRISNCVADYSVLYNSASFSTFKCYGVSPTKLNDLCFTNVYADSFVIRGDEVRQIAPGQTGKIADYNYKLPDDFTGCVIAWNSNNLDSKVGGNYNYLYRLFRKSNLKPFERDISTEIYQAGSTPCNGVEGFNCYFPLQSYGFQPTNGVGYQPYRVVVLSFELLHAPATVCGPKKSTNLVKNKCVNFNFNGLTGTGVLTESNKKFLPFQQFGRDIADTTDAVRDPQTLEILDITPCSFGGVSVITPGTNTSNQVAVLYQGVNCTEVPVAIHADQLTPTWRVYSTGSNVFQTRAGCLIGAEHVNNSYECDIPIGAGICASYQTQTNSPRRARSVASQSIIAYTMSLGAENSVAYSNNSIAIPTNFTISVTTEILPVSMTKTSVDCTMYICGDSTECSNLLLQYGSFCTQLNRALTGIAVEQDKNTQEVFAQVKQIYKTPPIKDFGGFNFSQILPDPSKPSKRSFIEDLLFNKVTLADAGFIKQYGDCLGDIAARDLICAQKFNGLTVLPPLLTDEMIAQYTSALLAGTITSGWTFGAGAALQIPFAMQMAYRFNGIGVTQNVLYENQKLIANQFNSAIGKIQDSLFSTASALGKLQDVVNQNAQALNTLVKQLSSNFGAISSVLNDILSRLDPPEAEVQIDRLITGRLQSLQTYVTQQLIRAAEIRASANLAATKMSECVLGQSKRVDFCGKGYHLMSFPQSAPHGVVFLHVTYVPAQEKNFTTAPAICHDGKAHFPREGVFVSNGTHWFVTQRNFYEPQIITTDNTFVSGNCDVVIGIVNNTVYDPLQPELDSGGGGSDIIKLLNEQVNKEMQSSNLYMSMSSWCYTHSLDGAGLFLFDHAAEEYEHAKKLIIFLNENNVPVQLTSISAPEHKFEGLTQIFQKAYEHEQHISESINNIVDHAIKSKDHATFNFLQWYVAEQHEEEVLFKDILDKIELIGNENHGLYLADQYVKGIAKSRKS

SEQ ID NO: 8748 - protein, 1315 aa, Artificial Sequence
  SARS-CoV-2/Finland/FIN-313/2020__EPI_ISL_414641 spike protein (1-1147)(K986P_V987P) Ferritin construct
MFVFLVLLPLVSSQCVNLTTRTQLPPAYTNSFTRGVYYPDKVFRSSVLHSTQDLFLPFFSNVTWFHAIHVSGTNGTKRFDNPVLPFNDGVYFASTEKSNIIRGWIFGTTLDSKTQSLLIVNNATNVVIKVCEFQFCNDPFLGVYYHKNNKSWMESEFRVYSSANNCTFEYVSQPFLMDLEGKQGNFKNLREFVFKNIDGYFKIYSKHTPINLVRDLPQGFSALEPLVDLPIGINITRFKTLLALHRSYLTPGDSSSGWTAGAAAYYVGYLQPRTFLLKYNENGTITDAVDCALDPLSETKCTLKSFTVEKGIYQTSNFRVQPTESIVRFPNITNLCPFGEVFNATRFASVYAWNRKRISNCVADYSVLYNSASFSTFKCYGVSPTKLNDLCFTNVYADSFVIRGDEVRQIAPGQTGKIADYNYKLPDDFTGCVIAWNSNNLDSKVGGNYNYLYRLFRKSNLKPFERDISTEIYQAGSTPCNGVEGFNCYFPLQSYGFQPTNGVGYQPYRVVVLSFELLHAPATVCGPKKSTNLVKNKCVNFNFNGLTGTGVLTESNKKFLPFQQFGRDIADTTDAVRDPQTLEILDITPCSFGGVSVITPGTNTSNQVAVLYQGVNCTEVPVAIHADQLTPTWRVYSTGSNVFQTRAGCLIGAEHVNNSYECDIPIGAGICASYQTQTNSPRRARSVASQSIIAYTMSLGAENSVAYSNNSIAIPTNFTISVTTEILPVSMTKTSVDCTMYICGDSTECSNLLLQYGSFCTQLNRALTGIAVEQDKNTQEVFAQVKQIYKTPPIKDFGGFNFSQILPDPSKPSKRSFIEDLLFNKVTLADAGFIKQYGDCLGDIAARDLICAQKFNGLTVLPPLLTDEMIAQYTSALLAGTITSGWTFGAGAALQIPFAMQMAYRFNGIGVTQNVLYENQKLIANQFNSAIGKIQDSLSSTASALGKLQDVVNQNAQALNTLVKQLSSNFGAISSVLNDILSRLDPPEAEVQIDRLITGRLQSLQTYVTQQLIRAAEIRASANLAATKMSECVLGQSKRVDFCGKGYHLMSFPQSAPHGVVFLHVTYVPAQEKNFTTAPAICHDGKAHFPREGVFVSNGTHWFVTQRNFYEPQIITTDNTFVSGNCDVVIGIVNNTVYDPLQPELDSGGGGSDIIKLLNEQVNKEMQSSNLYMSMSSWCYTHSLDGAGLFLFDHAAEEYEHAKKLIIFLNENNVPVQLTSISAPEHKFEGLTQIFQKAYEHEQHISESINNIVDHAIKSKDHATFNFLQWYVAEQHEEEVLFKDILDKIELIGNENHGLYLADQYVKGIAKSRKS

SEQ ID NO: 8749 - protein, 1315 aa, Artificial Sequence
  SARS-CoV-2/Netherlands/ZuidHolland_2/2020__EPI_ISL_414556 spike protein (1-1147)(K986P_V987P) Ferritin construct
MFVFLVLLPLVSSQCVNLTTRTQLPPAYTNSFTRGVYYPDKVFRSSVLHSTQDLFLPFFSNVTWFHAIHVSGTNGTKRFDNPVLPFNDGVYFASTEKSNIIRGWIFGTTLDSKTQSLLIVNNATNVVIKVCEFQFCNDPFLGVYYHKNNKSWMESEFRVYSSANNCTFEYVSQPFLMDLEGKQGNFKNLREFVFKNIDGYFKIYSKHTPINLVRDLPQGFSALEPLVDLPIGINITRFQTLLALHRSYLTPGDSSSGWTAGAAAYYVGYLQPRTFLLKYNENGTITDAVDCALDPLSETKCTLKSFTVEKGIYQTSNFRVQPTESIVRFPNITNLCPFGEVFNATRFASVYAWNRKRISNCVADYSVLYNSASFSTFKCYGVSPTKLNDLCFTNVYADSFVIRGDEVRQIAPGQTGKIADYNYKLPDDFTGCVIAWNSNNLDSKVGGNYNYLYRLFRKSNLKPFERDISTEIYQAGSTPCNGVEGFNCYFPLQSYGFQPTNGVGYQPYRVVVLSFELLHAPATVCGPKKSTNLVKNKCVNFNFNGLTGTGVLTESNKKFLPFQQFGRDIADTTDAVRDPQTLEILDITPCSFGGVSVITPGTNTSNQVAVLYQGVNCTEVPVAIHADQLTPTWRVYSTGSNVFQTRAGCLIGAEHVNNSYECDIPIGAGICASYQTQTNSPRRARSVASQSIIAYTMSLGAENSVAYSNNSIAIPTNFTISVTTEILPVSMTKTSVDCTMYICGDSTECSNLLLQYGSFCTQLNRALTGIALEQDKNTQEVFAQVKQIYKTPPIKDFGGFNFSQILPDPSKPSKRSFIEDLLFNKVTLADAGFIKQYGDCLGDIAARDLICAQKFNGLTVLPPLLTDEMIAQYTSALLAGTITSGWTFGAGAALQIPFAMQMAYRFNGIGVTQNVLYENQKLIANQFNSAIGKIQDSLSSTASALGKLQDVVNQNAQALNTLVKQLSSNFGAISSVLNDILSRLDPPEAEVQIDRLITGRLQSLQTYVTQQLIRAAEIRASANLAATKMSECVLGQSKRVDFCGKGYHLMSFPQSAPHGVVFLHVTYVPAQEKNFTTAPAICHDGKAHFPREGVFVSNGTHWFVTQRNFYEPQIITTDNTFVSGNCDVVIGIVNNTVYDPLQPELDSGGGGSDIIKLLNEQVNKEMQSSNLYMSMSSWCYTHSLDGAGLFLFDHAAEEYEHAKKLIIFLNENNVPVQLTSISAPEHKFEGLTQIFQKAYEHEQHISESINNIVDHAIKSKDHATFNFLQWYVAEQHEEEVLFKDILDKIELIGNENHGLYLADQYVKGIAKSRKS

SEQ ID NO: 8750 - protein, 1315 aa, Artificial Sequence
  SARS-CoV-2/USA/WA-UW31/2020__EPI_ISL_414618 spike protein (1-1147)(K986P_V987P) Ferritin construct
MFVFLVLLPLVSSQCVNLTTRTQLPPAYTNSFTRGVYYPDKVFRSSVLHSTQDLFLPFFSNVTWFHAIHVSGTNGTKRFDNPVLPFNDGVYFASTEKSNIIRGWIFGTTLDSKTQSLLIVNNATNVVIKVCEFQFCNDPFLGVYYHKNNKSWMESEFRVYSSANNCTFEYVSQPFLMDLEGKQGNFKNLREFVFKNIDGYFKIYSKHTPINLVRDLPQGFSALEPLVDLPIGINITRFQTLLALHRSYLTPGDSSSGWTAGAAAYYVGYLQPRTFLLKYNENGTITDAVDCALDPLSETKCTLKSFTVEKGIYQTSNFRVQPTESIVRFPNITNLCPFGEVFNATRFASVYAWNRKRISNCVADYSVLYNSASFSTFKCYGVSPTKLNDLCFTNVYADSFVIRGDEVRQIAPGQTGKIADYNYKLPDDFTGCVIAWNSNNLDSKVGGNYNYLYRLFRKSNLKPFERDISTEIYQAGSTPCNGAEGFNCYFPLQSYGFQPTNGVGYQPYRVVVLSFELLHAPATVCGPKKSTNLVKNKCVNFNFNGLTGTGVLTESNKKFLPFQQFGRDIADTTDAVRDPQTLEILDITPCSFGGVSVITPGTNTSNQVAVLYQDVNCTEVPVAIHADQLTPTWRVYSTGSNVFQTRAGCLIGAEHVNNSYECDIPIGAGICASYQTQTNSPRRARSVASQSIIAYTMSLGAENSVAYSNNSIAIPTNFTISVTTEILPVSMTKTSVDCTMYICGDSTECSNLLLQYGSFCTQLNRALTGIAVEQDKNTQEVFAQVKQIYKTPPIKDFGGFNFSQILPDPSKPSKRSFIEDLLFNKVTLADAGFIKQYGDCLGDIAARDLICAQKFNGLTVLPPLLTDEMIAQYTSALLAGTITSGWTFGAGAALQIPFAMQMAYRFNGIGVTQNVLYENQKLIANQFNSAIGKIQDSLSSTASALGKLQDVVNQNAQALNTLVKQLSSNFGAISSVLNDILSRLDPPEAEVQIDRLITGRLQSLQTYVTQQLIRAAEIRASANLAATKMSECVLGQSKRVDFCGKGYHLMSFPQSAPHGVVFLHVTYVPAQEKNFTTAPAICHDGKAHFPREGVFVSNGTHWFVTQRNFYEPQIITTDNTFVSGNCDVVIGIVNNTVYDPLQPELDSGGGGSDIIKLLNEQVNKEMQSSNLYMSMSSWCYTHSLDGAGLFLFDHAAEEYEHAKKLIIFLNENNVPVQLTSISAPEHKFEGLTQIFQKAYEHEQHISESINNIVDHAIKSKDHATFNFLQWYVAEQHEEEVLFKDILDKIELIGNENHGLYLADQYVKGIAKSRKS

SEQ ID NO: 8751 - protein, 1315 aa, Artificial Sequence
  SARS-CoV-2/South Korea/SNU01/2020__EPI_ISL_411929 spike protein (1-1147)(K986P_V987P) Ferritin construct
MFVFLVLLPLVSSQCVNLTTRTQLPPAYTNSFTRGVYYPDKVFRSSVLHSTQDLFLPFFSNVTWFHAIHVSGTNGTKRFDNPVLPFNDGVYFASTEKSNIIRGWIFGTTLDSKTQSLLIVNNATNVVIKVCEFQFCNDPFLGVYYHKNNKSWMESEFRVYSSANNCTFEYVSQPFLMDLEGKQGNFKNLREFVFKNIDGYFKIYSKHTPINLVRDLPQGFWALEPLVDLPIGINITRFQTLLALHRSYLTPGDSSSGWTAGAAAYYVGYLQPRTFLLKYNENGTITDAVDCALDPLSETKCTLKSFTVEKGIYQTSNFRVQPTESIVRFPNITNLCPFGEVFNATRFASVYAWNRKRISNCVADYSVLYNSASFSTFKCYGVSPTKLNDLCFTNVYADSFVIRGDEVRQIAPGQTGKIADYNYKLPDDFTGCVIAWNSNNLDSKVGGNYNYLYRLFRKSNLKPFERDISTEIYQAGSTPCNGVEGFNCYFPLQSYGFQPTNGVGYQPYRVVVLSFELLHAPATVCGPKKSTNLVKNKCVNFNFNGLTGTGVLTESNKKFLPFQQFGRDIADTTDAVRDPQTLEILDITPCSFGGVSVITPGTNTSNQVAVLYQDVNCTEVPVAIHADQLTPTWRVYSTGSNVFQTRAGCLIGAEHVNNSYECDIPIGAGICASYQTQTNSPRRARSVASQSIIAYTMSLGAENSVAYSNNSIAIPTNFTISVTTEILPVSMTKTSVDCTMYICGDSTECSNLLLQYGSFCTQLNRALTGIAVEQDKNTQEVFAQVKQIYKTPPIKDFGGFNFSQILPDPSKPSKRSFIEDLLFNKVTLADAGFIKQYGDCLGDIAARDLICAQKFNGLTVLPPLLTDEMIAQYTSALLAGTITSGWTFGAGAALQIPFAMQMAYRFNGIGVTQNVLYENQKLIANQFNSAIGKIQDSLSSTASALGKLQDVVNQNAQALNTLVKQLSSNFGAISSVLNDILSRLDPPEAEVQIDRLITGRLQSLQTYVTQQLIRAAEIRASANLAATKMSECVLGQSKRVDFCGKGYHLMSFPQSAPHGVVFLHVTYVPAQEKNFTTAPAICHDGKAHFPREGVFVSNGTHWFVTQRNFYEPQIITTDNTFVSGNCDVVIGIVNNTVYDPLQPELDSGGGGSDIIKLLNEQVNKEMQSSNLYMSMSSWCYTHSLDGAGLFLFDHAAEEYEHAKKLIIFLNENNVPVQLTSISAPEHKFEGLTQIFQKAYEHEQHISESINNIVDHAIKSKDHATFNFLQWYVAEQHEEEVLFKDILDKIELIGNENHGLYLADQYVKGIAKSRKS

SEQ ID NO: 8752 - protein, 1315 aa, Artificial Sequence
  SARS-CoV-2/China/WF0004/2020__EPI_ISL_413694 spike protein (1-1147)(K986P_V987P) Ferritin construct
MFVFLVLLPLVSSQCVNLTTRTQLPPAYTNSFTRGVYYPDKVFRSSVLHSTQDLFLPFFSNVTWFHAIHVSGTNGTKRFDNPVLPFNDGVYFASTEKSNIIRGWIFGTTLDSKTQSLLIVNNATNVVIKVCEFQFCNDPFLGVYYHKNNKSWTESEFRVYSSANNCTFEYVSQPFLMDLEGKQGNFKNLREFVFKNIDGYFKIYSKHTPINLVRDLPQGFSALEPLVDLPIGINITRFQTLLALHRSYLTPGDSSSGWTAGAAAYYVGYLQPRTFLLKYNENGTITDAVDCALDPLSETKCTLKSFTVEKGIYQTSNFRVQPTESIVRFPNITNLCPFGEVFNATRFASVYAWNRKRISNCVADYSVLYNSASFSTFKCYGVSPTKLNDLCFTNVYADSFVIRGDEVRQIAPGQTGKIADYNYKLPDDFTGCVIAWNSNNLDSKVGGNYNYLYRLFRKSNLKPFERDISTEIYQAGSTPCNGVEGFNCYFPLQSYGFQPTNGVGYQPYRVVVLSFELLHAPATVCGPKKSTNLVKNKCVNFNFNGLTGTGVLTESNKKFLPFQQFGRDIADTTDAVRDPQTLEILDITPCSFGGVSVITPGTNTSNQVAVLYQDVNCTEVPVAIHADQLTPTWRVYSTGSNVFQTRAGCLIGAEHVNNSYECDIPIGAGICASYQTQTNSPRRARSVASQSIIAYTMSLGAENSVAYSNNSIAIPTNFTISVTTEILPVSMTKTSVDCTMYICGDSTECSNLLLQYGSFCTQLNRALTGIAVEQDKNTQEVFAQVKQIYKTPPIKDFGGFNFSQILPDPSKPSKRSFIEDLLFNKVTLADAGFIKQYGDCLGDIAARDLICAQKFNGLTVLPPLLTDEMIAQYTSALLAGTITSGWTFGAGAALQIPFAMQMAYRFNGIGVTQNVLYENQKLIANQFNSAIGKIQDSLSSTASALGKLQDVVNQNAQALNTLVKQLSSNFGAISSVLNDILSRLDPPEAEVQIDRLITGRLQSLQTYVTQQLIRAAEIRASANLAATKMSECVLGQSKRFDFCGKGYHLMSFPQSAPHGVVFLHVTYVPAQEKNFTTAPAICHDGKAHFPREGVFVSNGTHWFVTQRNFYEPQIITTDNTFVSGNCDVVIGIVNNTVYDPLQPELDSGGGGSDIIKLLNEQVNKEMQSSNLYMSMSSWCYTHSLDGAGLFLFDHAAEEYEHAKKLIIFLNENNVPVQLTSISAPEHKFEGLTQIFQKAYEHEQHISESINNIVDHAIKSKDHATFNFLQWYVAEQHEEEVLFKDILDKIELIGNENHGLYLADQYVKGIAKSRKS

SEQ ID NO: 8753 - protein, 1315 aa, Artificial Sequence
  SARS-CoV-2/China/WF0028/2020__EPI_ISL_413791 spike protein (1-1147)(K986P_V987P) Ferritin construct
MFVFLVLLPLVSSQCVNLTTRTQLPPAYTNSFTRGVYYPDKVFRSSVLHSTQDLFLPFFSNVTWFHAIHVSGTNGTKRFDNPVLPFNDGVYFASTEKSNIIRGWIFGTTLDSKTQSLLIVNNATNVVIKVCEFQFCNDPFLGVYYHKNNKSWMESEFRVYSSANNCTFEYVSQPFLMDLEGKQGNFKNLREFVFKNIDGYFKIYSKHTPINLVRDLPQGFSALEPLVDLPIGINITRFQTLLALHRSYLTPGDSSSGWTAGAAAYYVGYLQPRTFLLKYNENGTITDAVDCALDPLSETKCTLKSFTVEKGIYQTSNFRVQPTESIVRFPNITNLCPFGEVFNATRFASVYAWNRKRISNCVADYSVLYNSASFSTFKCYGVSPTKLNDLCFTNVYADSFVIRGDEVRQIAPGQTGKIADYNYKLPDDFTGCVIAWNSNNLDSKVGGNYNYLYRLFRKSNLKPFERDISTEIYQAGSTPCNGVEGFNCYFPLQSYGFQPTNGVGYQPYRVVVLSFELLHAPATVCGPKKSTNLVKNKCVNFNFNGLTGTGVLTESNKKFLPFQQFGRDIADTTDAVRDPQTLEILDITPCSFGGVSVITPGTNTSNQVAVLYQDVNCTEVPVAIHADQLTPTWRVYSTGSNVFQTRAGCLIGAEHVNNSYECDIPIGAGICASYQTQTNSPRRARSVASQSIIAYTMSLGAENSVAYSNNSIAIPTNFTISVTTEILPVSMTKTSVDCTMYICGDSTECSNLLLQYGSFCTQLNRALTGIAVEQDKNTQEVFAQVKQIYKTPPIKDFGGFNFSQILPDPSKPSKRSFIEDLLFNKVTLADAGFIKQYGDCLGDIAARDLICAQKFNGLTVLPPLLTDEMIAQYTSALLAGTITSGWTFGAGAALQIPFAMQMAYRFNGIGVTQNVLYENQKLIANQFNSAIGKIQDSLSSTASALGKLQDVVNQNAQALNTLVKQLSSNFGAISSVLNDILSRLDPPEAEVQIDRLITGRLQSLQTYVTQQLIRAAEIRASANLAATKMSECVLGQSKRVDFCGKGYHLMSFPQSAPHGVVFLHVTYVPAQEKNFTTAPAICHDGKAHFPREGVFVSNGTHWFVTQRNFYEPQIITTDNTFVSGNCDVVIGIVNNTVYDPLQPELESGGGGSDIIKLLNEQVNKEMQSSNLYMSMSSWCYTHSLDGAGLFLFDHAAEEYEHAKKLIIFLNENNVPVQLTSISAPEHKFEGLTQIFQKAYEHEQHISESINNIVDHAIKSKDHATFNFLQWYVAEQHEEEVLFKDILDKIELIGNENHGLYLADQYVKGIAKSRKS

SEQ ID NO: 8754 - protein, 1315 aa, Artificial Sequence
  SARS-CoV-2/2019-nCoV/USA-CruiseA-18/2020__MT159716.1 spike protein (1-1147)(K986P_V987P) Ferritin construct
MFVFLVLLPLVSSQCVNLTTRTQLPPAYTNSFTRGVYYPDKVFRSSVLHSTQDLFLPFFSNVTWFHAIHVSGTNGTKRFDNPVLPFNDGVYFASTEKSNIIRGWIFGTTLDSKTQSLLIVNNATNVVIKVCEFQFCNDPFLGVYYHKNNKSWMESELRVYSSANNCTFEYVSQPFLMDLEGKQGNFKNLREFVFKNIDGYFKIYSKHTPINLVRDLPQGFSALEPLVDLPIGINITRFQTLLALHRSYLTPGDSSSGWTAGAAAYYVGYLQPRTFLLKYNENGTITDAVDCALDPLSETKCTLKSFTVEKGIYQTSNFRVQPTESIVRFPNITNLCPFGEVFNATRFASVYAWNRKRISNCVADYSVLYNSASFSTFKCYGVSPTKLNDLCFTNVYADSFVIRGDEVRQIAPGQTGKIADYNYKLPDDFTGCVIAWNSNNLDSKVGGNYNYLYRLFRKSNLKPFERDISTEIYQAGSTPCNGVEGFNCYFPLQSYGFQPTNGVGYQPYRVVVLSFELLHAPATVCGPKKSTNLVKNKCVNFNFNGLTGTGVLTESNKKFLPFQQFGRDIADTTDAVRDPQTLEILDITPCSFGGVSVITPGTNTSNQVAVLYQDVNCTEVPVAIHADQLTPTWRVYSTGSNVFQTRAGCLIGAEHVNNSYECDIPIGAGICASYQTQTNSPRRARSVASQSIIAYTMSLGAENSVAYSNNSIAIPTNFTISVTTEILPVSMTKTSVDCTMYICGDSTECSNLLLQYGSFCTQLNRALTGIAVEQDKNTQEVFAQVKQIYKTPPIKDFGGFNFSQILPDPSKPSKRSFIEDLLFNKVTLADAGFIKQYGDCLGDIAARDLICAQKFNGLTVLPPLLTDEMIAQYTSALLAGTITSGWTFGAGAALQIPFAMQMAYRFNGIGVTQNVLYENQKLIANQFNSAIGKIQDSLSSTASALGKLQDVVNQNAQALNTLVKQLSSNFGAISSVLNDILSRLDPPEAEVQIDRLITGRLQSLQTYVTQQLIRAAEIRASANLAATKMSECVLGQSKRVDFCGKGYHLMSFPQSAPHGVVFLHVTYVPAQEKNFTTAPAICHDGKAHFPREGVFVSNGTHWFVTQRNFYEPQIITTDNTFVSGNCDVVIGIVNNTVYDPLQPELDSGGGGSDIIKLLNEQVNKEMQSSNLYMSMSSWCYTHSLDGAGLFLFDHAAEEYEHAKKLIIFLNENNVPVQLTSISAPEHKFEGLTQIFQKAYEHEQHISESINNIVDHAIKSKDHATFNFLQWYVAEQHEEEVLFKDILDKIELIGNENHGLYLADQYVKGIAKSRKS

SEQ ID NO: 8755 - protein, 1315 aa, Artificial Sequence
  SARS-CoV-2/SARS-CoV-2/Yunnan-01/human/2020/CHN__MT049951.1 spike protein (1-1147)(K986P_V987P) Ferritin construct
MFVFLVLLPLVSSQCVNLTTRTQLPPANTNSFTRGVYYPDKVFRSSVLHSTQDLFLPFFSNVTWFHAIHVSGTNGTKRFDNPVLPFNDGVYFASTEKSNIIRGWIFGTTLDSKTQSLLIVNNATNVVIKVCEFQFCNDPFLGVYYHKNNKSWMESEFRVYSSANNCTFEYVSQPFLMDLEGKQGNFKNLREFVFKNIDGYFKIYSKHTPINLVRDLPQGFSALEPLVDLPIGINITRFQTLLALHRSYLTPGDSSSGWTAGAAAYYVGYLQPRTFLLKYNENGTITDAVDCALDPLSETKCTLKSFTVEKGIYQTSNFRVQPTESIVRFPNITNLCPFGEVFNATRFASVYAWNRKRISNCVADYSVLYNSASFSTFKCYGVSPTKLNDLCFTNVYADSFVIRGDEVRQIAPGQTGKIADYNYKLPDDFTGCVIAWNSNNLDSKVGGNYNYLYRLFRKSNLKPFERDISTEIYQAGSTPCNGVEGFNCYFPLQSYGFQPTNGVGYQPYRVVVLSFELLHAPATVCGPKKSTNLVKNKCVNFNFNGLTGTGVLTESNKKFLPFQQFGRDIADTTDAVRDPQTLEILDITPCSFGGVSVITPGTNTSNQVAVLYQDVNCTEVPVAIHADQLTPTWRVYSTGSNVFQTRAGCLIGAEHVNNSYECDIPIGAGICASYQTQTNSPRRARSVASQSIIAYTMSLGAENSVAYSNNSIAIPTNFTISVTTEILPVSMTKTSVDCTMYICGDSTECSNLLLQYGSFCTQLNRALTGIAVEQDKNTQEVFAQVKQIYKTPPIKDFGGFNFSQILPDPSKPSKRSFIEDLLFNKVTLADAGFIKQYGDCLGDIAARDLICAQKFNGLTVLPPLLTDEMIAQYTSALLAGTITSGWTFGAGAALQIPFAMQMAYRFNGIGVTQNVLYENQKLIANQFNSAIGKIQDSLSSTASALGKLQDVVNQNAQALNTLVKQLSSNFGAISSVLNDILSRLDPPEAEVQIDRLITGRLQSLQTYVTQQLIRAAEIRASANLAATKMSECVLGQSKRVDFCGKGYHLMSFPQSAPHGVVFLHVTYVPAQEKNFTTAPAICHDGKAHFPREGVFVSNGTHWFVTQRNFYEPQIITTDNTFVSGNCDVVIGIVNNTVYDPLQPELDSGGGGSDIIKLLNEQVNKEMQSSNLYMSMSSWCYTHSLDGAGLFLFDHAAEEYEHAKKLIIFLNENNVPVQLTSISAPEHKFEGLTQIFQKAYEHEQHISESINNIVDHAIKSKDHATFNFLQWYVAEQHEEEVLFKDILDKIELIGNENHGLYLADQYVKGIAKSRKS

SEQ ID NO: 8756 - protein, 1315 aa, Artificial Sequence
  SARS-CoV-2/USA/WA-UW292/2020__EPI_ISL_418077 spike protein (1-1147)(K986P_V987P) Ferritin construct
MFVFLVLLPLVSSQCVNLTTRTQLPPAYTNSFTRGVYYPDKVFRSSVLHSTQDLFLPFFSNVTWFHAIHVSGTNGTKRFDNPVLPFNDGVYFASTEKSNIIRGWIFGTTLDSKTQSLLIVNNATNVVIKVCEFQFCNDPFLGVYYHKNNKSWMESEFRVYSSANNCTFEYVSQPFLMDLEGKQGNFKNLREFVFKNIDGYFKIYSKHTPINLVRDLPQGFSALEPLVDLPIGINITRFQTLLALHRSYLTPGDSSSGWTAGAAAYYVGYLQPRTFLLKYNENGTITDAVDCALDPLSETKCTLKSFTVEKGIYQTSNFRVQPTESIVRFPNITNLCPFGEVFNATRFASVYAWNRKRISNCVADYSVLYNSASFSTFKCYGVSPTKLNDLCFTNVYADSFVIRGDEVRQIAPGQTGKIADYNYKLPDDFTGCVIAWNSNNLDSKVGGNYNYLYRLFRKSNLKPFERDISTEIYQASSTPCNGVEGFNCYFPLQSYGFQPTNGVGYQPYRVVVLSFELLHAPATVCGPKKSTNLVKNKCVNFNFNGLTGTGVLTESNKKFLPFQQFGRDIADTTDAVRDPQTLEILDITPCSFGGVSVITPGTNTSNQVAVLYQDVNCTEVPVAIHADQLTPTWRVYSTGSNVFQTRAGCLIGAEHVNNSYECDIPIGAGICASYQTQTNSPRRARSVASQSIIAYTMSLGAENSVAYSNNSIAIPTNFTISVTTEILPVSMTKTSVDCTMYICGDSTECSNLLLQYGSFCTQLNRALTGIAVEQDKNTQEVFAQVKQIYKTPPIKDFGGFNFSQILPDPSKPSKRSFIEDLLFNKVTLADAGFIKQYGDCLGDIAARDLICAQKFNGLTVLPPLLTDEMIAQYTSALLAGTITSGWTFGAGAALQIPFAMQMAYRFNGIGVTQNVLYENQKLIANQFNSAIGKIQDSLSSTASALGKLQDVVNQNAQALNTLVKQLSSNFGAISSVLNDILSRLDPPEAEVQIDRLITGRLQSLQTYVTQQLIRAAEIRASANLAATKMSECVLGQSKRVDFCGKGYHLMSFPQSAPHGVVFLHVTYVPAQEKNFTTAPAICHDGKAHFPREGVFVSNGTHWFVTQRNFYEPQIITTDNTFVSGNCDVVIGIVNNTVYDPLQPELDSGGGGSDIIKLLNEQVNKEMQSSNLYMSMSSWCYTHSLDGAGLFLFDHAAEEYEHAKKLIIFLNENNVPVQLTSISAPEHKFEGLTQIFQKAYEHEQHISESINNIVDHAIKSKDHATFNFLQWYVAEQHEEEVLFKDILDKIELIGNENHGLYLADQYVKGIAKSRKS

SEQ ID NO: 8757 - protein, 1315 aa, Artificial Sequence
  SARS-CoV-2/Iceland/192/2020__EPI_ISL_417819 spike protein (1-1147)(K986P_V987P) Ferritin construct
MFVFFVLLPLVSSQCVNLTTRTQLPPAYTNSFTRGVYYPDKVFRSSVLHSTQDLFLPFFSNVTWFHAIHVSGTNGTKRFDNPVLPFNDGVYFASTEKSNIIRGWIFGTTLDSKTQSLLIVNNATNVVIKVCEFQFCNDPFLGVYYHKNNKSWMESEFRVYSSANNCTFEYVSQPFLMDLEGKQGNFKNLREFVFKNIDGYFKIYSKHTPINLVRDLPQGFSALEPLVDLPIGINITRFQTLLALHRSYLTPGDSSSGWTAGAAAYYVGYLQPRTFLLKYNENGTITDAVDCALDPLSETKCTLKSFTVEKGIYQTSNFRVQPTESIVRFPNITNLCPFGEVFNATRFASVYAWNRKRISNCVADYSVLYNSASFSTFKCYGVSPTKLNDLCFTNVYADSFVIRGDEVRQIAPGQTGKIADYNYKLPDDFTGCVIAWNSNNLDSKVGGNYNYLYRLFRKSNLKPFERDISTEIYQAGSTPCNGVEGFNCYFPLQSYGFQPTNGVGYQPYRVVVLSFELLHAPATVCGPKKSTNLVKNKCVNFNFNGLTGTGVLTESNKKFLPFQQFGRDIADTTDAVRDPQTLEILDITPCSFGGVSVITPGTNTSNQVAVLYQGVNCTEVPVAIHADQLTPTWRVYSTGSNVFQTRAGCLIGAEHVNNSYECDIPIGAGICASYQTQTNSPRRARSVASQSIIAYTMSLGAENSVAYSNNSIAIPTNFTISVTTEILPVSMTKTSVDCTMYICGDSTECSNLLLQYGSFCTQLNRALTGIAVEQDKNTQEVFAQVKQIYKTPPIKDFGGFNFSQILPDPSKPSKRSFIEDLLFNKVTLADAGFIKQYGDCLGDIAARDLICAQKFNGLTVLPPLLTDEMIAQYTSALLAGTITSGWTFGAGAALQIPFAMQMAYRFNGIGVTQNVLYENQKLIANQFNSAIGKIQDSLSSTASALGKLQDVVNQNAQALNTLVKQLSSNFGAISSVLNDILSRLDPPEAEVQIDRLITGRLQSLQTYVTQQLIRAAEIRASANLAATKMSECVLGQSKRVDFCGKGYHLMSFPQSAPHGVVFLHVTYVPAQEKNFTTAPAICHDGKAHFPREGVFVSNGTHWFVTQRNFYEPQIITTDNTFVSGNCDVVIGIVNNTVYDPLQPELDSGGGGSDIIKLLNEQVNKEMQSSNLYMSMSSWCYTHSLDGAGLFLFDHAAEEYEHAKKLIIFLNENNVPVQLTSISAPEHKFEGLTQIFQKAYEHEQHISESINNIVDHAIKSKDHATFNFLQWYVAEQHEEEVLFKDILDKIELIGNENHGLYLADQYVKGIAKSRKS

SEQ ID NO: 8758 - protein, 1315 aa, Artificial Sequence
  SARS-CoV-2/Belgium/ULG-6939/2020__EPI_ISL_417020 spike protein (1-1147)(K986P_V987P) Ferritin construct
MFVFLVLLPLVSSQCVNLTTRTQLPPAYTNSFTRGVYYPDKVFRSSVLHSTQDLFLPFFSNVTWFHAIHVSGTNGTKRFDNPVLPFNDGVYFASTEKSNIIRGWIFGTTLDSKTQSLLIVNNATNVVIKVCEFQFCNDPFLGVYYHKNNKSWMESEFRVYSSANNCTFEYVSQPFLMDLEGKQGNFKNLREFVFKNIDGYFKIYSKHTPINLVRDLPQGFSALEPLVDLPIGINITRFQTLLALHRSYLTPGDSSSGWTAGAAAYYVGYLQPRTFLLKYNENGTITDAVDCALDPLSETKCTLKSFTVEKGIYQTSNFRVQPTESIVRFPNITNLCPFGEVFNATRFASVYAWNRKRISNCVADYSVLYNSASFSTFKCYGVSPTKLNDLCFTNVYADSFVIRGDEVRQIAPGQTGKIADYNYKLPDDFTGCVIAWNSNNLDSKVGGNYNYLYRLFRKSNLKPFERDISTEIYQAGSTPCNGVEGFNCYFPLQSYGFQPTNGVGYQPYRVVVLSFELLHAPATVCGPKKSTNLVKNKCVNFNFNGLTGTGVLTESNKKFLPFQQFGRDIADTTDAVRDPQTLEILDITPCSFGGVSVITPGTNTSNQVAVLYQGVNCTEVPVAIHADQLTPTWRVYSTGSNVFQTRAGCLIGAEHVNNSYECDIPIGAGICASYQTQTNSPRRARSVASQSIIAYTMSLGAENSVVYSNNSIAIPTNFTISVTTEILPVSMTKTSVDCTMYICGDSTECSNLLLQYGSFCTQLNRALTGIAVEQDKNTQEVFAQVKQIYKTPPIKDFGGFNFSQILPDPSKPSKRSFIEDLLFNKVTLADAGFIKQYGDCLGDIAARDLICAQKFNGLTVLPPLLTDEMIAQYTSALLAGTITSGWTFGAGAALQIPFAMQMAYRFNGIGVTQNVLYENQKLIANQFNSAIGKIQDSLSSTASALGKLQDVVNQNAQALNTLVKQLSSNFGAISSVLNDILSRLDPPEAEVQIDRLITGRLQSLQTYVTQQLIRAAEIRASANLAATKMSECVLGQSKRVDFCGKGYHLMSFPQSAPHGVVFLHVTYVPAQEKNFTTAPAICHDGKAHFPREGVFVSNGTHWFVTQRNFYEPQIITTDNTFVSGNCDVVIGIVNNTVYDPLQPELDSGGGGSDIIKLLNEQVNKEMQSSNLYMSMSSWCYTHSLDGAGLFLFDHAAEEYEHAKKLIIFLNENNVPVQLTSISAPEHKFEGLTQIFQKAYEHEQHISESINNIVDHAIKSKDHATFNFLQWYVAEQHEEEVLFKDILDKIELIGNENHGLYLADQYVKGIAKSRKS

SEQ ID NO: 8759 - protein, 1315 aa, Artificial Sequence
  SARS-CoV-2/France/HF2496/2020__EPI_ISL_418231 spike protein (1-1147)(K986P_V987P) Ferritin construct
MFVFLVLLPLVSSQCVNLTTRTQLPPAYTNSFTRGVYYPDKVFRSSVLHSTQDLFLPFFSNVTWFHAIHVSGTNGTKRFDNPVLPFNDGVYFASTEKSNIIRGWIFGTTLDSKTQSLLIVNNATNVVIKVCEFQFCNDPFLGVYYHKNNKSWMESEFRVYSSANNCTFEYVSQPFLMDLEGKQGNFKNLREFVFKNIDGYFKIYSKHTPINLVRDLPQGFSALEPLVDLPIGINITRFQTLLALHRSYLTPGDSSSGWTAGAAAYYVGYLQPRTFLLKYNENGTITDAVDCALDPLSETKCTLKSFTVEKGIYQTSNFRVQPTESIVRFPNITNLCPFGEVFNATRFASVYAWNRKRISNCVADYSVLYNSASFSTFKCYGVSPTKLNDLCFTNVYADSFVIRGDEVRQIAPGQTGKIADYNYKLPDDFTGCVIAWNSNNLDSKVGGNYNYLYRLFRKSNLKPFERDISTEIYQAGSTPCNGVEGFNCYFPLQSYGFQPTNGVGYQPYRVVVLSFELLHAPATVCGPKKSTNLVKNKCVNFNFNGLTGTGVLTESNKKFLPFQQFGRDIADTTDAVRDPQTLEILDITPCSFGGVSVITPGTNTSNQVAVLYQGVNCTEVPVAIHADQLTPTWRVYSTGSNVFQTRAGCLIGAEHVNNSYECDIPIGAGICASYQTQTNSPRRARSVASQSIIAYTMSLGAENSVAYSNNSIAIPTNFTISVTTEILPVSMTKTSVDCTMYICGDSTECSNLLLQYGSFCTQLNRALTGIAVEQDKNTQEVFAQVKQIYKTPPIKDFGGFNFSQILPDPSKPSKRSFIEDLLFNKVTLADAGFIKQYGDCLGDIVARDLICAQKFNGLTVLPPLLTDEMIAQYTSALLAGTITSGWTFGAGAALQIPFAMQMAYRFNGIGVTQNVLYENQKLIANQFNSAIGKIQDSLSSTASALGKLQDVVNQNAQALNTLVKQLSSNFGAISSVLNDILSRLDPPEAEVQIDRLITGRLQSLQTYVTQQLIRAAEIRASANLAATKMSECVLGQSKRVDFCGKGYHLMSFPQSAPHGVVFLHVTYVPAQEKNFTTAPAICHDGKAHFPREGVFVSNGTHWFVTQRNFYEPQIITTDNTFVSGNCDVVIGIVNNTVYDPLQPELDSGGGGSDIIKLLNEQVNKEMQSSNLYMSMSSWCYTHSLDGAGLFLFDHAAEEYEHAKKLIIFLNENNVPVQLTSISAPEHKFEGLTQIFQKAYEHEQHISESINNIVDHAIKSKDHATFNFLQWYVAEQHEEEVLFKDILDKIELIGNENHGLYLADQYVKGIAKSRKS

SEQ ID NO: 8760 - protein, 1315 aa, Artificial Sequence
  SARS-CoV-2/USA/WA-UW291/2020__EPI_ISL_418076 spike protein (1-1147)(K986P_V987P) Ferritin construct
MFVFLVLLPLVSSQCVNLTTRTQLPPAYTNSFTRGVYYPDKVFRSSVLHSTQDLFLPFFSNVTWFHAIHVSGTNGTKRFDNPVLPFNDGVYFASTEKSNIIRGWIFGTTLDSKTQSLLIVNNATNVVIKVCEFQFCNDPFLGVYYHKNNKSWMESEFRVYSSANNCTFEYVSQPFLMDLEGKQGNFKNLREFVFKNIDGYFKIYSKHTPINLVRDLPQGFSALEPLVDLPIGINITRFQTLLALHRSYLTPGDSSSGWTAGAAAYYVGYLQPRTFLLKYNENGTITDAVDCALDPLSETKCTLKSFTVEKGIYQTSNFRVQPTESIVRFPNITNLCPFGEVFNATRFASVYAWNRKRISNCVADYSVLYNSASFSTFKCYGVSPTKLNDLCFTNVYADSFVIRGDEVRQIAPGQTGKIADYNYKLPDDFTGCVIAWNSNNLDSKVGGNYNYLYRLFRKSNLKPFERDISTEIYQAGSTPCNGVEGFNCYFPLQSYGFQPTNGVGYQPYRVVVLSFELLHAPATVCGPKKSTNLVKNKCVNFNFNGLTGTGVLTESNKKFLPFQQFGRDIADTTDAVRDPQTLEILDITPCSFGGVSVITPGTNTSNQVAVLYQGVNCTEVPVAIHADQLTPTWRVYSTGSNVFQTRAGCLIGAEHVNNSYECDIPIGAGICASYQTQTNSPRRARSVASQSIIAYTMSLGAENSVAYSNNSIAIPTNFTISVTTEILPVSMTKTSVDCTMYICGDSTECSNLLLQYGSFCTQLNRALTGIAVEQDKNTQEVFAQVKQIYKTPPIKDFGGFNFSQILPDPSKPSKRSFIEDLLFNKVTLADAGFIKQYGDCLGDIAARDLICAQKFNGLTVLPPLLTDEMIAQYTSALLAGTITSGWTFGAGAALQIPFAMQMAYRFNGIGVTQNVLYENQKLIANQFNSAIGKIQYSLSSTASALGKLQDVVNQNAQALNTLVKQLSSNFGAISSVLNDILSRLDPPEAEVQIDRLITGRLQSLQTYVTQQLIRAAEIRASANLAATKMSECVLGQSKRVDFCGKGYHLMSFPQSAPHGVVFLHVTYVPAQEKNFTTAPAICHDGKAHFPREGVFVSNGTHWFVTQRNFYEPQIITTDNTFVSGNCDVVIGIVNNTVYDPLQPELDSGGGGSDIIKLLNEQVNKEMQSSNLYMSMSSWCYTHSLDGAGLFLFDHAAEEYEHAKKLIIFLNENNVPVQLTSISAPEHKFEGLTQIFQKAYEHEQHISESINNIVDHAIKSKDHATFNFLQWYVAEQHEEEVLFKDILDKIELIGNENHGLYLADQYVKGIAKSRKS

SEQ ID NO: 8761 - protein, 1315 aa, Artificial Sequence; identical to SEQ ID NO: 8724
  SARS-CoV-2/Portugal/PT0034/2020__EPI_ISL_418019 spike protein (1-1147)(K986P_V987P) Ferritin construct

SEQ ID NO: 8762 - protein, 1315 aa, Artificial Sequence; identical to SEQ ID NO: 8716
  SARS-CoV-2/Iceland/202/2020__EPI_ISL_417750 spike protein (1-1147)(K986P_V987P) Ferritin construct

SEQ ID NO: 8763 - protein, 1315 aa, Artificial Sequence
  SARS-CoV-2/USA/WA-UW261/2020__EPI_ISL_418046 spike protein (1-1147)(K986P_V987P) Ferritin construct
MFVFLVLLPLVSSQCVNLTTRTQLPPAYTNSFTRGVYYPDKVFRSSVLHSTQDLFLPFFSNVTWFHAIHVSGTNGTKRFDNPVLPFNDGVYFASTEKSNIIRGWIFGTTLDSKTQSLLIVNNATNVVIKVCEFQFCNDPFLGVYYHKNNKSWMESEFRVYSSANNCTFEYVSQPFLMDLEGKQGNFKNLREFVFKNIDGYFKIYSKHTPINLVRDLPQGFSALEPLVDLPIGINITRFQTLLALHRSYLTPGDSSSGWTAGAAAYYVGYLQPRTFLLKYNENGTITDAVDCALDPLSETKCTLKSFTVEKGIYQTSNFRVQPTESIVRFPNITNLCPFGEVFNATRFTSVYAWNRKRISNCVADYSVLYNSASFSTFKCYGVSPTKLNDLCFTNVYADSFVIRGDEVRQIAPGQTGKIADYNYKLPDDFTGCVIAWNSNNLDSKVGGNYNYLYRLFRKSNLKPFERDISTEIYQAGSTPCNGVEGFNCYFPLQSYGFQPTNGVGYQPYRVVVLSFELLHAPATVCGPKKSTNLVKNKCVNFNFNGLTGTGVLTESNKKFLPFQQFGRDIADTTDAVRDPQTLEILDITPCSFGGVSVITPGTNTSNQVAVLYQDVNCTEVPVAIHADQLTPTWRVYSTGSNVFQTRAGCLIGAEHVNNSYECDIPIGAGICASYQTQTNSPRRARSVASQSIIAYTMSLGAENSVAYSNNSIAIPTNFTISVTTEILPVSMTKTSVDCTMYICGDSTECSNLLLQYGSFCTQLNRALTGIAVEQDKNTQEVFAQVKQIYKTPPIKDFGGFNFSQILPDPSKPSKRSFIEDLLFNKVTLADAGFIKQYGDCLGDIAARDLICAQKFNGLTVLPPLLTDEMIAQYTSALLAGTITSGWTFGAGAALQIPFAMQMAYRFNGIGVTQNVLYENQKLIANQFNSAIGKIQDSLSSTASALGKLQDVVNQNAQALNTLVKQLSSNFGAISSVLNDILSRLDPPEAEVQIDRLITGRLQSLQTYVTQQLIRAAEIRASANLAATKMSECVLGQSKRVDFCGKGYHLMSFPQSAPHGVVFLHVTYVPAQEKNFTTAPAICHDGKAHFPREGVFVSNGTHWFVTQRNFYEPQIITTDNTFVSGNCDVVIGIVNNTVYDPLQPELDSGGGGSDIIKLLNEQVNKEMQSSNLYMSMSSWCYTHSLDGAGLFLFDHAAEEYEHAKKLIIFLNENNVPVQLTSISAPEHKFEGLTQIFQKAYEHEQHISESINNIVDHAIKSKDHATFNFLQWYVAEQHEEEVLFKDILDKIELIGNENHGLYLADQYVKGIAKSRKS

SEQ ID NO: 8764 - protein, 1315 aa, Artificial Sequence
  SARS-CoV-2/Portugal/PT0035/2020__EPI_ISL_418020 spike protein (1-1147)(K986P_V987P) Ferritin construct
MFVFLVLLPLVSSQCVNLTTRTQLPPAYTNSFTRGVYYPDKVFRSSVLHSTQDLFLPFFSNVTWFHAIHVSGTNGTKRFDNPVLPFNDGVYFASTEKSNIIRGWIFGTTLDSKTQSLLIVNNATNVVIKVCEFQFCNDPFLGVYYHKNNKSWMESEFRVYSSANNCTFEYVSQPFLMDLEGKQGNFKNLREFVFKNIDGYFKIYSKHTPINLVRDLPQGFSALEPLVDLPIGINITRFQTLLALHRSYLTPGDSSSGWTAGAAAYYVGYLQPRTFLLKYNENGTITDAVDCALDPLSETKCTLKSFTVEKGIYQTSNFRVQPTESIVRFPNITNLCPFGEVFNATRFASVYAWNRKRISNCVADYSVLYNSASFSTFKCYGVSPTKLNDLCFTNVYADSFVIRGDEVRQIAPGQTGKIADYNYKLPDDFTGCVIAWNSNNLDSKVGGNYNYLYRLFRKSNLKPFERDISTEIYQAGSTPCNGVEGFNCYFPLQSYGFQPTNGVGYQPYRVVVLSFELLHAPATVCGPKKSTNLVKNKCVNFNFNGLTGTGVLTESNKKFLPFQQFGRDIADTTDAVRDPQTLEILDITPCSFGGVSVITPGTNTSNQVAVLYQDVNCTEVPVAIHADQLTPTWRVYSTGSNVFQTRAGCLIGAEHVNNSYECDIPIGAGICASYQTQTNSPRRARSVASQSIIAYTMSLGAENSVAYSNNSIAIPTNFTISVTTEILPVSMTKTSVDCTMYICGDSTECSNLLLQYGSFCTQLNRALTGIAVEQDKNTQEVFAQVKQIYKTPPIKDFGGFNFSQILPDPSKPSKRSFIEDLLFNKVTLADAGFIKQYGDCLGDISARDLICAQKFNGLTVLPPLLTDEMIAQYTSALLAGTITSGWTFGAGAALQIPFAMQMAYRFNGIGVTQNVLYENQKLIANQFNSAIGKIQDSLSSTASALGKLQDVVNQNAQALNTLVKQLSSNFGAISSVLNDILSRLDPPEAEVQIDRLITGRLQSLQTYVTQQLIRAAEIRASANLAATKMSECVLGQSKRVDFCGKGYHLMSFPQSAPHGVVFLHVTYVPAQEKNFTTAPAICHDGKAHFPREGVFVSNGTHWFVTQRNFYEPQIITTDNTFVSGNCDVVIGIVNNTVYDPLQPELDSGGGGSDIIKLLNEQVNKEMQSSNLYMSMSSWCYTHSLDGAGLFLFDHAAEEYEHAKKLIIFLNENNVPVQLTSISAPEHKFEGLTQIFQKAYEHEQHISESINNIVDHAIKSKDHATFNFLQWYVAEQHEEEVLFKDILDKIELIGNENHGLYLADQYVKGIAKSRKS

SEQ ID NO: 8765 - protein, 1315 aa, Artificial Sequence
  SARS-CoV-2/USA/NY-NYUMC7/2020__EPI_ISL_418192 spike protein (1-1147)(K986P_V987P) Ferritin construct
MFVFLVLLPLVSSQCVNLTTRTQLPPAYTNSFTRGVYYPDKVFRSSVLHSTQDLFLPFFSNVTWFHAIHVSGTNGTKRFDNPVLPFNDGVYFASTEKSNIIRGWIFGTTLDSKTQSLLIVNNATNVVIKVCEFQFCNDPFLGVYHHKNNKSWMESEFRVYSSANNCTFEYVSQPFLMDLEGKQGNFKNLREFVFKNIDGYFKIYSKHTPINLVRDLPQGFSALEPLVDLPIGINITRFQTLLALHRSYLTPGDSSSGWTAGAAAYYVGYLQPRTFLLKYNENGTITDAVDCALDPLSETKCTLKSFTVEKGIYQTSNFRVQPTESIVRFPNITNLCPFGEVFNATRFASVYAWNRKRISNCVADYSVLYNSASFSTFKCYGVSPTKLNDLCFTNVYADSFVIRGDEVRQIAPGQTGKIADYNYKLPDDFTGCVIAWNSNNLDSKVGGNYNYLYRLFRKSNLKPFERDISTEIYQAGSTPCNGVEGFNCYFPLQSYGFQPTNGVGYQPYRVVVLSFELLHAPATVCGPKKSTNLVKNKCVNFNFNGLTGTGVLTESNKKFLPFQQFGRDIADTTDAVRDPQTLEILDITPCSFGGVSVITPGTNTSNQVAVLYQGVNCTEVPVAIHADQLTPTWRVYSTGSNVFQTRAGCLIGAEHVNNSYECDIPIGAGICASYQTQTNSPRRARSVASQSIIAYTMSLGAENSVAYSNNSIAIPTNFTISVTTEILPVSMTKTSVDCTMYICGDSTECSNLLLQYGSFCTQLNRALTGIAVEQDKNTQEVFAQVKQIYKTPPIKDFGGFNFSQILPDPSKPSKRSFIEDLLFNKVTLADAGFIKQYGDCLGDIAARDLICAQKFNGLTVLPPLLTDEMIAQYTSALLAGTITSGWTFGAGAALQIPFAMQMAYRFNGIGVTQNVLYENQKLIANQFNSAIGKIQDSLSSTASALGKLQDVVNQNAQALNTLVKQLSSNFGAISSVLNDILSRLDPPEAEVQIDRLITGRLQSLQTYVTQQLIRAAEIRASANLAATKMSECVLGQSKRVDFCGKGYHLMSFPQSAPHGVVFLHVTYVPAQEKNFTTAPAICHDGKAHFPREGVFVSNGTHWFVTQRNFYEPQIITTDNTFVSGNCDVVIGIVNNTVYDPLQPELDSGGGGSDIIKLLNEQVNKEMQSSNLYMSMSSWCYTHSLDGAGLFLFDHAAEEYEHAKKLIIFLNENNVPVQLTSISAPEHKFEGLTQIFQKAYEHEQHISESINNIVDHAIKSKDHATFNFLQWYVAEQHEEEVLFKDILDKIELIGNENHGLYLADQYVKGIAKSRKS

SEQ ID NO: 8766 - protein, 1315 aa, Artificial Sequence
  SARS-CoV-2/Iceland/189/2020__EPI_ISL_417709 spike protein (1-1147)(K986P_V987P) Ferritin construct
MFVFLVLLPLVSSQCVNLTTRTQLPPAYTNSFTRGVYYPDKVFRSSVLHSTQDLFLPFFSNVTWFHAIHVSGTNGTKRFDNPVLPFNDGVYFASTEKSNIIRGWIFGTTLDSKTQSLLIVNNATNVVIKVCEFQFCNDPFLGVYYHKNNKSWMESEFRVYSSANNCTFEYVSQPFLMDLEGKQGNFKNLREFVFKNIDGYFKIYSKHTPINLVRDLPQGFSALEPLVDLPIGINITRFQTLLALHRSYLTPGDSSSGWTAGAAAYYVGYLQPRTFLLKYNENGTITDAVDCALDPLSETKCTLKSFTVEKGIYQTSNFRVQPTESIVRFPNITNLCPFGEVFNATRFASVYAWNRKRISNCVADYSVLYNSASFSTFKCYGVSPTKLNDLCFTNVYADSFVIRGDEVRQIAPGQTGKIADYNYKLPDDFTGCVIAWNSNNLDSKVGGNYNYLYRLFRKSNLKPFERDISTEIYQAGSTPCNGVEGFNCYFPLQSYGFQPTNGVGYQPYRVVVLSFELLHAPATVCGPKKSTNLVKNKCVNFNFNGLTGTGVLTESNKKFLPFQQFGRDIADTTDAVRDPQTLEILDITPCSFGGVSVITPGTNTSNQVAVLYQGVNCTEVPVAIHADQLTPTWRVYSTGSNVFQTRAGCLIGAEHVNNSYECDIPIGAGICASYQTQTNSPRRARSVASQSIIAYTMSLGAENSVAYSNNSIAIPTNFTISVTTEILPVSMTKTSVDCTMYICGDSTECSNLLLQYGSFCTQLNRALTGIAVEQDKNTQEVFAQVKQIYKTPPIKDFGGFNFSQILPDPSKPSKRSFIEDLLFNKVTLADAGFTKQYGDCLGDIAARDLICAQKFNGLTVLPPLLTDEMIAQYTSALLAGTITSGWTFGAGAALQIPFAMQMAYRFNGIGVTQNVLYENQKLIANQFNSAIGKIQDSLSSTASALGKLQDVVNQNAQALNTLVKQLSSNFGAISSVLNDILSRLDPPEAEVQIDRLITGRLQSLQTYVTQQLIRAAEIRASANLAATKMSECVLGQSKRVDFCGKGYHLMSFPQSAPHGVVFLHVTYVPAQEKNFTTAPAICHDGKAHFPREGVFVSNGTHWFVTQRNFYEPQIITTDNTFVSGNCDVVIGIVNNTVYDPLQPELDSGGGGSDIIKLLNEQVNKEMQSSNLYMSMSSWCYTHSLDGAGLFLFDHAAEEYEHAKKLIIFLNENNVPVQLTSISAPEHKFEGLTQIFQKAYEHEQHISESINNIVDHAIKSKDHATFNFLQWYVAEQHEEEVLFKDILDKIELIGNENHGLYLADQYVKGIAKSRKS

SEQ ID NO: 8767 - protein, 1315 aa, Artificial Sequence
  SARS-CoV-2/Australia/NSW56/2020__EPI_ISL_417408 spike protein (1-1147)(K986P_V987P) Ferritin construct
MFVFLVLLPLVSSQCVNLTTRTQLPPAYTNSFTRGVYYPDKVFRSSVLHSTQDLFLPFFSNVTWFHAIHVSGTNGTKRFDNPVLPFNDGVYFASTEKSNIIRGWIFGTTLDSKTQSLLIVNNATNVVIKVCEFQFCNDPFLGVYYHKNNKSWMESEFRVYSSANNCTFEYVSQPFLMDLEGKQGNFKNLREFVFKNIDGYFKIYSKHTPINLVRDLPQGFSALEPLVDLPIGINITRFQTLLALHRSYLTPGDSSSGWTAGAAAYYVGYLQPRTFLLKYNENGTITDAVDCALDPLSETKCTLKSFTVEKGIYQTSNFRVQPTESIVRFPNITNLCPFGEVFNATRFASVYAWNRKRISNCVADYSVLYNSASFSTFKCYGVSPTKLNDLCFTNVYADSFVIRGDEVRQIAPGQTGKIADYNYKLPDDFTGCVIAWNSNNLDSKVGGNYNYLYRLFRKSNLKPFERDISTEIYQAGSTPCNGVEGFNCYFPLQSYGFQPTNGVGYQPYRVVVLSFELLHAPATVCGPKKSTNLVKNKCVNFNFNGLTGTGVLTESNKKFLPFQQFGRDIADTTDAVRDPQTLEILDITPCSFGGVSVITPGTNTSNQVAVLYQDVNCTEVPVAIHADQLTPTWRVYSTGSNVFQTRAGCLIGAEHVNNSYECDIPIGAGICASYQTQTNSPRRARSVASQSIIAYTMSLGAENSVAYSNNSIAIPTNFTISVTTEILPVSMTKTSVDCTMYICGDSTECSNLLLQYGSFCTQLNRALTGIAVEQDKNTQEVFAQVKQIYKTPPIKDFGGFNFSQILPDSSKPSKRSFIEDLLFNKVTLADAGFIKQYGDCLGDIAARDLICAQKFNGLTVLPPLLTDEMIAQYTSALLAGTITSGWTFGAGAALQIPFAMQMAYRFNGIGVTQNVLYENQKLIANQFNSAIGKIQDSLSSTASALGKLQDVVNQNAQALNTLVKQLSSNFGAISSVLNDILSRLDPPEAEVQIDRLITGRLQSLQTYVTQQLIRAAEIRASANLAATKMSECVLGQSKRVDFCGKGYHLMSFPQSAPHGVVFLHVTYVPAQEKNFTTAPAICHDGKAHFPREGVFVSNGTHWFVTQRNFYEPQIITTDNTFVSGNCDVVIGIVNNTVYDPLQPELDSGGGGSDIIKLLNEQVNKEMQSSNLYMSMSSWCYTHSLDGAGLFLFDHAAEEYEHAKKLIIFLNENNVPVQLTSISAPEHKFEGLTQIFQKAYEHEQHISESINNIVDHAIKSKDHATFNFLQWYVAEQHEEEVLFKDILDKIELIGNENHGLYLADQYVKGIAKSRKS

SEQ ID NO: 8768 - protein, 1315 aa, Artificial Sequence
  SARS-CoV-2/Iceland/280/2020__EPI_ISL_417608 spike protein (1-1147)(K986P_V987P) Ferritin construct
MFVFLVLLPLVSSQCVNLTTRTQLPPAYTNSFTRGVYYPDKVFRSSVLHSTQDLFLPFFSNVTWFHAIHVSGTNGTKRFDNPVLPFNDGVYFASTEKSNIIRGWIFGTTLDSKTQSLLIVNNATNVVIKVCEFQFCNDPFLGVYYHKNNKSWMESEFRVYSSANNCTFEYVSQPFLMDLEGKQGNFKNLREFVFKNIDGYFKIYSKHTPINLVRDLPQGFSALEPLVDLPIGINITRFQTLLALHRSYLTPGDSSSGWTAGAAAYYVGYLQPRTFLLKYNENGTITDAVDCALDPLSETKCTLKSFTVEKGIYQTSNFRVQPTESIVRFPNITNLCPFGEVFNATRFASVYAWNRKRISNCVADYSVLYNSASFSTFKCYGVSPTKLNDLCFTNVYADSFVIRGDEVRQIAPGQTGKIADYNYKLPDDFTGCVIAWNSNNLDSKVGGNYNYLYRLFRKSNLKPFERDISTEIYQAGSTPCNGVEGFNCYFPLQSYGFQPTNGVGYQPYRVVVLSFELLHAPATVCGPKKSTNLVKNKCVNFNFNGLTGTGVLTESNKKFLPFQQFGRDIADTTDAVRDPQTLEILDITPCSFGGVSVITPGTNTSNQVAVLYQGVNCTEVPVAIHADQLTPTWRVYSTGSNVFQTRAGCLIGAEHVNNSYECDIPIGAGICASYHTQTNSPRRARSVASQSIIAYTMSLGAENSVAYSNNSIAIPTNFTISVTTEILPVSMTKTSVDCTMYICGDSTECSNLLLQYGSFCTQLNRALTGIAVEQDKNTQEVFAQVKQIYKTPPIKDFGGFNFSQILPDPSKPSKRSFIEDLLFNKVTLADAGFIKQYGDCLGDIAARDLICAQKFNGLTVLPPLLTDEMIAQYTSALLAGTITSGWTFGAGAALQIPFAMQMAYRFNGIGVTQNVLYENQKLIANQFNSAIGKIQDSLSSTASALGKLQDVVNQNAQALNTLVKQLSSNFGAISSVLNDILSRLDPPEAEVQIDRLITGRLQSLQTYVTQQLIRAAEIRASANLAATKMSECVLGQSKRVDFCGKGYHLMSFPQSAPHGVVFLHVTYVPAQEKNFTTAPAICHDGKAHFPREGVFVSNGTHWFVTQRNFYEPQIITTDNTFVSGNCDVVIGIVNNTVYDPLQPELDSGGGGSDIIKLLNEQVNKEMQSSNLYMSMSSWCYTHSLDGAGLFLFDHAAEEYEHAKKLIIFLNENNVPVQLTSISAPEHKFEGLTQIFQKAYEHEQHISESINNIVDHAIKSKDHATFNFLQWYVAEQHEEEVLFKDILDKIELIGNENHGLYLADQYVKGIAKSRKS

SEQ ID NO: 8769 - protein, 1315 aa, Artificial Sequence; identical to SEQ ID NO: 8724
  SARS-CoV-2/Iceland/247/2020__EPI_ISL_417575 spike protein (1-1147)(K986P_V987P) Ferritin construct

SEQ ID NO: 8770 - protein, 1315 aa, Artificial Sequence
  SARS-CoV-2/Iceland/238/2020__EPI_ISL_417566 spike protein (1-1147)(K986P_V987P) Ferritin construct
MFVFLVLLPLVSSQCVNLTTRTQLPPAYTNSFTRGVYYPDKVFRSSVLHSTQDLFLPFFSNVTWFHAIHVSGTNGTKRFDNPVLPFNDGVYFASTEKSNIIRGWIFGTTLDSKTQSLLIVNNATNVVIKVCEFQFCNDPFLGVYYHKNNKSWMESEFRVYSSANNCTFEYVSQPFLMDLEGKQGNFKNLREFVFKNIDGYFKIYSKHTPINLVRDLPQGFSALEPLVDLPIGINITRFQTLLALHRSYLTPGDSSSGWTAGAAAYYVGYLQPRTFLLKYNENGTITDAVDCALDPLSETKCTLKSFTVEKGIYQTSNFRVQPTESIVRFPNITNLCPFGEVFNATRFASVYAWNRKRISNCVADYSVLYNSASFSTFKCYGVSPTKLNDLCFTNVYADSFVIRGDEVRQIAPGQTGKIADYNYKLPDDFTGCVIAWNSNNLDSKVGGNYNYLYRLFRKSNLKPFERDISTEIYQAGSTPCNGVEGFNCYFPLQSYGFQPTNGVGYQPYRVVVLSFELLHAPATVCGPKKSTNLVKNKCVNFNFNGLTGTGVLTESNKKFLPFQQFGRDIADTTDAVRDPQTLEILDITPCSFGGVSVITPGTNTSNQVAVLYQGVNCTEVPVAIHADQLTPTWRVYSTGSNVFQTRAGCLIGAEHVNNSYECDIPIGAGICASYQTQTNSPRRARSVASQSIIAYTMSLGAENSVAYSNNSIAIPTNFTISVTTEILPVSMTKTSVDCTMYICGDSTECSNLLLQYGSFCTQLNRALTGIAVEQDKNTQEVFAQVKQIYKTPPIKDFGGFNFSQILPDPSKPSKRSFIEDLLFNKVTLADVGFIKQYGDCLGDIAARDLICAQKFNGLTVLPPLLTDEMIAQYTSALLAGTITSGWTFGAGAALQIPFAMQMAYRFNGIGVTQNVLYENQKLIANQFNSAIGKIQDSLSSTASALGKLQDVVNQNAQALNTLVKQLSSNFGAISSVLNDILSRLDPPEAEVQIDRLITGRLQSLQTYVTQQLIRAAEIRASANLAATKMSECVLGQSKRVDFCGKGYHLMSFPQSAPHGVVFLHVTYVPAQEKNFTTAPAICHDGKAHFPREGVFVSNGTHWFVTQRNFYEPQIITTDNTFVSGNCDVVIGIVNNTVYDPLQPELDSGGGGSDIIKLLNEQVNKEMQSSNLYMSMSSWCYTHSLDGAGLFLFDHAAEEYEHAKKLIIFLNENNVPVQLTSISAPEHKFEGLTQIFQKAYEHEQHISESINNIVDHAIKSKDHATFNFLQWYVAEQHEEEVLFKDILDKIELIGNENHGLYLADQYVKGIAKSRKS

SEQ ID NO: 8771 - protein, 1315 aa, Artificial Sequence
  SARS-CoV-2/Greece/16/2020__EPI_ISL_418265 spike protein (1-1147)(K986P_V987P) Ferritin construct
MFVFLVLLPLVSSQCVNLTTRTQLPPAYTNSFTRGVYYPDKVFRSSVLHSTQDLFLPFFSNVTWFHAIHVSGTNGTKRFDNPVLPFNDGVYFASTEKSNIIRGWIFGTTLDSKTQSLLIVNNATNVVIKVCEFQFCNDPFLGVYYHKNNKSWMESEFRVYSSANNCTFEYVSQPFLMDLEGKQGNFKNLREFVFKNVDGYFKIYSKHTPINLVRDLPQGFSALEPLVDLPIGINITRFQTLLALHRSYLTPGDSSSGWTAGAAAYYVGYLQPRTFLLKYNENGTITDAVDCALDPLSETKCTLKSFTVEKGIYQTSNFRVQPTESIVRFPNITNLCPFGEVFNATRFASVYAWNRKRISNCVADYSVLYNSASFSTFKCYGVSPTKLNDLCFTNVYADSFVIRGDEVRQIAPGQTGKIADYNYKLPDDFTGCVIAWNSNNLDSKVGGNYNYLYRLFRKSNLKPFERDISTEIYQAGSTPCNGVEGFNCYFPLQSYGFQPTNGVGYQPYRVVVLSFELLHAPATVCGPKKSTNLVKNKCVNFNFNGLTGTGVLTESNKKFLPFQQFGRDIADTTDAVRDPQTLEILDITPCSFGGVSVITPGTNTSNQVAVLYQDVNCTEVPVAIHADQLTPTWRVYSTGSNVFQTRAGCLIGAEHVNNSYECDIPIGAGICASYQTQTNSPRRARSVASQSIIAYTMSLGAENSVAYSNNSIAIPTNFTISVTTEILPVSMTKTSVDCTMYICGDSTECSNLLLQYGSFCTQLNRALTGIAVEQDKNTQEVFAQVKQIYKTPPIKDFGGFNFSQILPDPSKPSKRSFIEDLLFNKVTLADAGFIKQYGDCLGDIAARDLICAQKFNGLTVLPPLLTDEMIAQYTSALLAGTITSGWTFGAGAALQIPFAMQMAYRFNGIGVTQNVLYENQKLIANQFNSAIGKIQDSLSSTASALGKLQDVVNQNAQALNTLVKQLSSNFGAISSVLNDILSRLDPPEAEVQIDRLITGRLQSLQTYVTQQLIRAAEIRASANLAATKMSECVLGQSKRVDFCGKGYHLMSFPQSAPHGVVFLHVTYVPAQEKNFTTAPAICHDGKAHFPREGVFVSNGTHWFVTQRNFYEPQIITTDNTFVSGNCDVVIGIVNNTVYDPLQPELDSGGGGSDIIKLLNEQVNKEMQSSNLYMSMSSWCYTHSLDGAGLFLFDHAAEEYEHAKKLIIFLNENNVPVQLTSISAPEHKFEGLTQIFQKAYEHEQHISESINNIVDHAIKSKDHATFNFLQWYVAEQHEEEVLFKDILDKIELIGNENHGLYLADQYVKGIAKSRKS

SEQ ID NO: 8772 - protein, 1315 aa, Artificial Sequence
  SARS-CoV-2/Iceland/319/2020__EPI_ISL_417648 spike protein (1-1147)(K986P_V987P) Ferritin construct
MFVFLVLLPLVSSQCVNLTTRTQLPPAYTNSFTRGVYYPDKVFRSSVLHSTQDLFLPFFSNVTWFHAIHVSGTNGTKRFDNPVLPFNDGVYFASTEKSNIIRGWIFGTTLDSKTQSLLIVNNATNVVIKVCEFQFCNDPFLGVYYHKNNKSWMESEFRVYSSANNCTFEYVSQPFLIDLEGKQGNFKNLREFVFKNIDGYFKIYSKHTPINLVRDLPQGFSALEPLVDLPIGINITRFQTLLALHRSYLTPGDSSSGWTAGAAAYYVGYLQPRTFLLKYNENGTITDAVDCALDPLSETKCTLKSFTVEKGIYQTSNFRVQPTESIVRFPNITNLCPFGEVFNATRFASVYAWNRKRISNCVADYSVLYNSASFSTFKCYGVSPTKLNDLCFTNVYADSFVIRGDEVRQIAPGQTGKIADYNYKLPDDFTGCVIAWNSNNLDSKVGGNYNYLYRLFRKSNLKPFERDISTEIYQAGSTPCNGVEGFNCYFPLQSYGFQPTNGVGYQPYRVVVLSFELLHAPATVCGPKKSTNLVKNKCVNFNFNGLTGTGVLTESNKKFLPFQQFGRDIADTTDAVRDPQTLEILDITPCSFGGVSVITPGTNTSNQVAVLYQGVNCTEVPVAIHADQLTPTWRVYSTGSNVFQTRAGCLIGAEHVNNSYECDIPIGAGICASYQTQTNSPRRARSVASQSIIAYTMSLGAENSVAYSNNSIAIPTNFTISVTTEILPVSMTKTSVDCTMYICGDSTECSNLLLQYGSFCTQLNRALTGIAVEQDKNTQEVFAQVKQIYKTPPIKDFGGFNFSQILPDPSKPSKRSFIEDLLFNKVTLADAGFIKQYGDCLGDIAARDLICAQKFNGLTVLPPLLTDEMIAQYTSALLAGTITSGWTFGAGAALQIPFAMQMAYRFNGIGVTQNVLYENQKLIANQFNSAIGKIQDSLSSTASALGKLQDVVNQNAQALNTLVKQLSSNFGAISSVLNDILSRLDPPEAEVQIDRLITGRLQSLQTYVTQQLIRAAEIRASANLAATKMSECVLGQSKRVDFCGKGYHLMSFPQSAPHGVVFLHVTYVPAQEKNFTTAPAICHDGKAHFPREGVFVSNGTHWFVTQRNFYEPQIITTDNTFVSGNCDVVIGIVNNTVYDPLQPELDSGGGGSDIIKLLNEQVNKEMQSSNLYMSMSSWCYTHSLDGAGLFLFDHAAEEYEHAKKLIIFLNENNVPVQLTSISAPEHKFEGLTQIFQKAYEHEQHISESINNIVDHAIKSKDHATFNFLQWYVAEQHEEEVLFKDILDKIELIGNENHGLYLADQYVKGIAKSRKS

SEQ ID NO: 8773 - protein, 1315 aa, Artificial Sequence
  SARS-CoV-2/Congo/94/2020__EPI_ISL_417947 spike protein (1-1147)(K986P_V987P) Ferritin construct
MFVFLVLLPLVSSQCVNLTTRTQLPPAYTNSFTRGVYYPDKVFRSSVLHSTQDLFLPFFSNVTWFHAIHVSGTNGTKRFDNPVLPFNDGVYFASTEKSNIIRGWIFGTTLDSKTQSLLIVNNATNVVIKVCEFQFCNDPFLGVYYHKNNKSWMESEFRVYSSANNCTFEYVSQPFLMDLEGKQGNFKNLREFVFKNIDGYFKIYSKHTPINLVRDLPQGFSALEPLVDLPIGINITRFQTLLALHRSYLTPGDSSSGWTAGAAAYYVGYLQPRTFLLKYNENGTITDAVDCALDPLSETKCTLKSFTVEKGIYQTSNFRVQPTESIVRFPNITNLCPFGEVFNATRFASVYAWNRKRISNCVADYSVLYNSASFSTFKCYGVSPTKLNDLCFTNVYADSFVIRGDEVRQIAPGQTGKIADYNYKLPDDFTGCVIAWNSNNLDSKVGGNYNYLYRLFRKSNLKPFERDISTEIYQAGSTPCNGVEGFNCYFPLQSYGFQPTNGVGYQPYRVVVLSFELLHAPATVCGPKKSTNLVKNKCVNFNFNGLTGTGVLTESNKKFLPFQQFGRDIADTTDAVRDPQTLEILDITPCSFGGVSVITPGTNTSNQVAVLYQGVNCTEVPVAIHADQLTPTWRVYSTGSNVFQTRAGCLIGAEHVNNSYECDIPIGAGICASYQTQTNSPRRARSVASQSIIAYTMSLGAENSVAYSNNSIAIPTNFTISVTTEILPVSMTKTSVDCTMYICGDSTECSNLLLQYGSFCTQLNRALTGIAVEQDKNTQEVFAQVKQIYKTPPIKDFGGFNFSQILPDPSKPSKRSFIEDILFNKVTLADAGFIKQYGDCLGDIAARDLICAQKFNGLTVLPPLLTDEMIAQYTSALLAGTITSGWTFGAGAALQIPFAMQMAYRFNGIGVTQNVLYENQKLIANQFNSAIGKIQDSLSSTASALGKLQDVVNQNAQALNTLVKQLSSNFGAISSVLNDILSRLDPPEAEVQIDRLITGRLQSLQTYVTQQLIRAAEIRASANLAATKMSECVLGQSKRVDFCGKGYHLMSFPQSAPHGVVFLHVTYVPAQEKNFTTAPAICHDGKAHFPREGVFVSNGTHWFVTQRNFYEPQIITTDNTFVSGNCDVVIGIVNNTVYDPLQPELDSGGGGSDIIKLLNEQVNKEMQSSNLYMSMSSWCYTHSLDGAGLFLFDHAAEEYEHAKKLIIFLNENNVPVQLTSISAPEHKFEGLTQIFQKAYEHEQHISESINNIVDHAIKSKDHATFNFLQWYVAEQHEEEVLFKDILDKIELIGNENHGLYLADQYVKGIAKSRKS

SEQ ID NO: 8774 - protein, 1315 aa, Artificial Sequence
  SARS-CoV-2/Congo/158/2020__EPI_ISL_417950 spike protein (1-1147)(K986P_V987P) Ferritin construct
MFVFLVLLPLVSSQCVNLTTRTQLPPAYTNSFTRGVYYPDKVFRSSVLHSTQDLFLPFFSNVTWFHAIHVSGTNGTKRFDNPVLPFNDGVYFASTEKSNIIRGWIFGTTLDSKTQSLLIVNNATNVVIKVCEFQFCNDPFLGVYYHKNNKSWMESEFRVYSSANNCTFEYVSQPFLMDLEGKQGNFKNLREFVFKNIDGYFKIYSKHTPINLVRDLPQGFSALEPLVDLPIGINITRFQTLLALHRSYLTPGDSSSGWTAGAAAYYVGYLQPRTFLLKYNENGTITDAVDCALDPLSETKCTLKSFTVEKGIYQTSNFRVQPTESIVRFPNITNLCPFGEVFNATRFASVYAWNRKRISNCVADYSVLYNSASFSTFKCYGVSPTKLNDLCFTNVYADSFVIRGDEVRQIAPGQTGKIADYNYKLPDDFTGCVIAWNSNNLDSKVGGNYNYLYRLFRKSNLKPFERDISTEIYQAGSTPCNGVEGFNCYFPLQSYGFQPTNGVGYQPYRVVVLSFELLHAPATVCGPKKSTNLVKNKCVNFNFNGLTGTGVLTESNKKFLPFQQFGRDIADTTDAVRDPQTLEILDITPCSFGGVSVITPGTNTSNQVAVLYQDVNCTEVPVAIHADQLTPTWRVYSTGSNVFQTRAGCLIGAEHVNNSYECDIPIGAGICASYQTQTNSPRRARSVASQSIIAYTMSLGAENSVAYSNNSIAIPTNFTISVTTEILPVSMTKTSVDCTMYICGDSTECSNLLLQYGSFCTQLNRALTGIAVEQDKNTQEVFAQVKQIYKTPPIKDFGGFNFSQILPDPSKPSKRSFIEDLLFNKVTLADAGFIKQYGDCLGDIAARDLICAQKFNGLTVLPPLLTDEMIAQYTSALLAGTITSGWTFGAGAALQIPFAMQMAYRFNGIGVTQNVLYENQKLIANQFNSAIGKIQDSLSSTASALGKLQDVVNQNAQALNTLVKQLSSNFGAISSVLNDILSRLDPPEAEVQIDRLITGRLQSLQTYVTQQLIRAAEIRASANLAATKMSECVLGQSKRVDFCGKGYHLMSFPQSAPHGVVFLHVTYVPAQEKNFTTAPAICHDGKAHFPREGVFVSNGTHWFVTQRNFYEPQIITTDNTFLSGNCDVVIGIVNNTVYDPLQPELDSGGGGSDIIKLLNEQVNKEMQSSNLYMSMSSWCYTHSLDGAGLFLFDHAAEEYEHAKKLIIFLNENNVPVQLTSISAPEHKFEGLTQIFQKAYEHEQHISESINNIVDHAIKSKDHATFNFLQWYVAEQHEEEVLFKDILDKIELIGNENHGLYLADQYVKGIAKSRKS

SEQ ID NO: 8775 - protein, 1315 aa, Artificial Sequence
  SARS-CoV-2/USA/UT-00034/2020__EPI_ISL_417977 spike protein (1-1147)(K986P_V987P) Ferritin construct
MFVFLVLLPLVSSQCVNLTTRTQLPPAYTNSFTRGVYYPDKVFRSSVLHSTQDLFLPFFSNVTWFHAIHVSGTNGTKRFDNPVLPFNDGVYFASTEKSNIIRGWIFGTTLDSKTQSLLIVNNATNVVIKVCEFQFCNDPFLGVYYYKNNKSWMESEFRVYSSANNCTFEYVSQPFLMDLEGKQGNFKNLREFVFKNIDGYFKIYSKHTPINLVRDLPQGFSALEPLVDLPIGINITRFQTLLALHRSYLTPGDSSSGWTAGAAAYYVGYLQPRTFLLKYNENGTITDAVDCALDPLSETKCTLKSFTVEKGIYQTSNFRVQPTESIVRFPNITNLCPFGEVFNATRFASVYAWNRKRISNCVADYSVLYNSASFSTFKCYGVSPTKLNDLCFTNVYADSFVIRGDEVRQIAPGQTGKIADYNYKLPDDFTGCVIAWNSNNLDSKVGGNYNYLYRLFRKSNLKPFERDISTEIYQAGSTPCNGVEGFNCYFPLQSYGFQPTNGVGYQPYRVVVLSFELLHAPATVCGPKKSTNLVKNKCVNFNFNGLTGTGVLTESNKKFLPFQQFGRDIADTTDAVRDPQTLEILDITPCSFGGVSVITPGTNTSNQVAVLYQGVNCTEVPVAIHADQLTPTWRVYSTGSNVFQTRAGCLIGAEHVNNSYECDIPIGAGICASYQTQTNSPRRARSVASQSIIAYTMSLGAENSVAYSNNSIAIPTNFTISVTTEILPVSMTKTSVDCTMYICGDSTECSNLLLQYGSFCTQLNRALTGIAVEQDKNTQEVFAQVKQIYKTPPIKDFGGFNFSQILPDPSKPSKRSFIEDLLFNKVTLADAGFIKQYGDCLGDIAARDLICAQKFNGLTVLPPLLTDEMIAQYTSALLAGTITSGWTFGAGAALQIPFAMQMAYRFNGIGVTQNVLYENQKLIANQFNSAIGKIQDSLSSTASALGKLQDVVNQNAQALNTLVKQLSSNFGAISSVLNDILSRLDPPEAEVQIDRLITGRLQSLQTYVTQQLIRAAEIRASANLAATKMSECVLGQSKRVDFCGKGYHLMSFPQSAPHGVVFLHVTYVPAQEKNFTTAPAICHDGKAHFPREGVFVSNGTHWFVTQRNFYEPQIITTDNTFVSGNCDVVIGIVNNTVYDPLQPELDSGGGGSDIIKLLNEQVNKEMQSSNLYMSMSSWCYTHSLDGAGLFLFDHAAEEYEHAKKLIIFLNENNVPVQLTSISAPEHKFEGLTQIFQKAYEHEQHISESINNIVDHAIKSKDHATFNFLQWYVAEQHEEEVLFKDILDKIELIGNENHGLYLADQYVKGIAKSRKS

SEQ ID NO: 8776 - protein, 1315 aa, Artificial Sequence
  SARS-CoV-2/USA/UT-00033/2020__EPI_ISL_417976 spike protein (1-1147)(K986P_V987P) Ferritin construct
MFVFLVLLPLVSSQCVNLTTRTQLPPAYTNSFTRGVYYPDKVFRSSVLHSTQDLFLPFFSNVTWFHAIHVSGTNGTKRFDNPVLPFNDGVYFASTEKSNIIRGWIFGTTLDSKTQSLLIVNNATNVVIKVCEFQFCNDPFLGVYYHKNNKSWMESEFRVYSSANNCTFEYVSQPFLMDLEGKQGNFKNLREFVFKNIDGYFKIYSKHTPINLVRDLPQGFSALEPLVDLPIGINITRFQTLLALHRSYLTPGDSSSGLTAGAAAYYVGYLQPRTFLLKYNENGTITDAVDCALDPLSETKCTLKSFTVEKGIYQTSNFRVQPTESIVRFPNITNLCPFGEVFNATRFASVYAWNRKRISNCVADYSVLYNSASFSTFKCYGVSPTKLNDLCFTNVYADSFVIRGDEVRQIAPGQTGKIADYNYKLPDDFTGCVIAWNSNNLDSKVGGNYNYLYRLFRKSNLKPFERDISTEIYQAGSTPCNGVEGFNCYFPLQSYGFQPTNGVGYQPYRVVVLSFELLHAPATVCGPKKSTNLVKNKCVNFNFNGLTGTGVLTESNKKFLPFQQFGRDIADTTDAVRDPQTLEILDITPCSFGGVSVITPGTNTSNQVAVLYQGVNCTEVPVAIHADQLTPTWRVYSTGSNVFQTRAGCLIGAEHVNNSYECDIPIGAGICASYQTQTNSPRRARSVASQSIIAYTMSLGAENSVAYSNNSIAIPTNFTISVTTEILPVSMTKTSVDCTMYICGDSTECSNLLLQYGSFCTQLNRALTGIAVEQDKNTQEVFAQVKQIYKTPPIKDFGGFNFSQILPDPSKPSKRSFIEDLLFNKVTLADAGFIKQYGDCLGDIAARDLICAQKFNGLTVLPPLLTDEMIAQYTSALLAGTITSGWTFGAGAALQIPFAMQMAYRFNGIGVTQNVLYENQKLIANQFNSAIGKIQDSLSSTASALGKLQDVVNQNAQALNTLVKQLSSNFGAISSVLNDILSRLDPPEAEVQIDRLITGRLQSLQTYVTQQLIRAAEIRASANLAATKMSECVLGQSKRVDFCGKGYHLMSFPQSAPHGVVFLHVTYVPAQEKNFTTAPAICHDGKAHFPREGVFVSNGTHWFVTQRNFYEPQIITTDNTFVSGNCDVVIGIVNNTVYDPLQPELDSGGGGSDIIKLLNEQVNKEMQSSNLYMSMSSWCYTHSLDGAGLFLFDHAAEEYEHAKKLIIFLNENNVPVQLTSISAPEHKFEGLTQIFQKAYEHEQHISESINNIVDHAIKSKDHATFNFLQWYVAEQHEEEVLFKDILDKIELIGNENHGLYLADQYVKGIAKSRKS

SEQ ID NO: 8777 - protein, 1315 aa, Artificial Sequence
  SARS-CoV-2/USA/WI-13/2020__EPI_ISL_417516 spike protein (1-1147)(K986P_V987P) Ferritin construct
MFVFLVLLPLVSSQCVNLTTRTQLPPAYTNSFTRGVYYPDKVFRSSVLHSTQDLFLPFFSNVTWFHAIHVSGTNGTKRFDNPVLPFNDGVYFASTEKSNIIRGWIFGTTLDSKTQSLLIVNNATNVVIKVCEFQFCNDPFLGVYYHKNNKSWMESEFRVYSSANNCTFEYVSQPFLMDLEGKQGNFKNLREFVFKNIDGYFKIYSKHTPINLVRDLPQGFSALEPLVDLPIGINITRFQTLLALHRSYLTPGDSSSGWTAGAAAYYVGYLQPRTFLLKYNENGTITDAVDCALDPLSETKCTLKSFTVEKGIYQTSNFRVLPTESIVRFPNITNLCPFGEVFNATRFASVYAWNRKRISNCVADYSVLYNSASFSTFKCYGVSPTKLNDLCFTNVYADSFVIRGDEVRQIAPGQTGKIADYNYKLPDDFTGCVIAWNSNNLDSKVGGNYNYLYRLFRKSNLKPFERDISTEIYQAGSTPCNGVEGFNCYFPLQSYGFQPTNGVGYQPYRVVVLSFELLHAPATVCGPKKSTNLVKNKCVNFNFNGLTGTGVLTESNKKFLPFQQFGRDIADTTDAVRDPQTLEILDITPCSFGGVSVITPGTNTSNQVAVLYQGVNCTEVPVAIHADQLTPTWRVYSTGSNVFQTRAGCLIGAEHVNNSYECDIPIGAGICASYQTQTNSPRRARSVASQSIIAYTMSLGAENSVAYSNNSIAIPTNFTISVTTEILPVSMTKTSVDCTMYICGDSTECSNLLLQYGSFCTQLNRALTGIAVEQDKNTQEVFAQVKQIYKTPPIKDFGGFNFSQILPDPSKPSKRSFIEDLLFNKVTLADAGFIKQYGDCLGDIAARDLICAQKFNGLTVLPPLLTDEMIAQYTSALLAGTITSGWTFGAGAALQIPFAMQMAYRFNGIGVTQNVLYENQKLIANQFNSAIGKIQDSLSSTASALGKLQDVVNQNAQALNTLVKQLSSNFGAISSVLNDILSRLDPPEAEVQIDRLITGRLQSLQTYVTQQLIRAAEIRASANLAATKMSECVLGQSKRVDFCGKGYHLMSFPQSAPHGVVFLHVTYVPAQEKNFTTAPAICHDGKAHFPREGVFVSNGTHWFVTQRNFYEPQIITTDNTFVSGNCDVVIGIVNNTVYDPLQPELDSGGGGSDIIKLLNEQVNKEMQSSNLYMSMSSWCYTHSLDGAGLFLFDHAAEEYEHAKKLIIFLNENNVPVQLTSISAPEHKFEGLTQIFQKAYEHEQHISESINNIVDHAIKSKDHATFNFLQWYVAEQHEEEVLFKDILDKIELIGNENHGLYLADQYVKGIAKSRKS

SEQ ID NO: 8778 - protein, 1314 aa, Artificial Sequence
  SARS-CoV-2/India/1-27/2020__EPI_ISL_413522 spike protein (1-1146)(K985P_V986P) Ferritin construct
MFVFLVLLPLVSSQCVNLTTRTQLPPAYTNSFTRGVYYPDKVFRSSVLHSTQDLFLPFFSNVTWFHAIHVSGTNGTKRFDNPVLPFNDGVYFASTEKSNIIRGWIFGTTLDSKTQSLLIVNNATNVVIKVCEFQFCNDPFLGVYHKNNKSWMESEFRVYSSANNCTFEYVSQPFLMDLEGKQGNFKNLREFVFKNIDGYFKIYSKHTPINLVRDLPQGFSALEPLVDLPIGINITRFQTLLALHRSYLTPGDSSSGWTAGAAAYYVGYLQPRTFLLKYNENGTITDAVDCALDPLSETKCTLKSFTVEKGIYQTSNFRVQPTESIVRFPNITNLCPFGEVFNATRFASVYAWNRKRISNCVADYSVLYNSASFSTFKCYGVSPTKLNDLCFTNVYADSFVIRGDEVIQIAPGQTGKIADYNYKLPDDFTGCVIAWNSNNLDSKVGGNYNYLYRLFRKSNLKPFERDISTEIYQAGSTPCNGVEGFNCYFPLQSYGFQPTNGVGYQPYRVVVLSFELLHAPATVCGPKKSTNLVKNKCVNFNFNGLTGTGVLTESNKKFLPFQQFGRDIADTTDAVRDPQTLEILDITPCSFGGVSVITPGTNTSNQVAVLYQDVNCTEVPVAIHADQLTPTWRVYSTGSNVFQTRAGCLIGAEHVNNSYECDIPIGAGICASYQTQTNSPRRARSVASQSIIAYTMSLGAENSVAYSNNSIAIPTNFTISVTTEILPVSMTKTSVDCTMYICGDSTECSNLLLQYGSFCTQLNRALTGIAVEQDKNTQEVFAQVKQIYKTPPIKDFGGFNFSQILPDPSKPSKRSFIEDLLFNKVTLADAGFIKQYGDCLGDIAARDLICAQKFNGLTVLPPLLTDEMIAQYTSALLAGTITSGWTFGAGAALQIPFAMQMAYRFNGIGVTQNVLYENQKLIANQFNSAIGKIQDSLSSTASALGKLQDVVNQNAQALNTLVKQLSSNFGAISSVLNDILSRLDPPEAEVQIDRLITGRLQSLQTYVTQQLIRAAEIRASANLAATKMSECVLGQSKRVDFCGKGYHLMSFPQSAPHGVVFLHVTYVPAQEKNFTTAPAICHDGKAHFPREGVFVSNGTHWFVTQRNFYEPQIITTDNTFVSGNCDVVIGIVNNTVYDPLQPELDSGGGGSDIIKLLNEQVNKEMQSSNLYMSMSSWCYTHSLDGAGLFLFDHAAEEYEHAKKLIIFLNENNVPVQLTSISAPEHKFEGLTQIFQKAYEHEQHISESINNIVDHAIKSKDHATFNFLQWYVAEQHEEEVLFKDILDKIELIGNENHGLYLADQYVKGIAKSRKS

SEQ ID NO: 8779 - protein, 1309 aa, Artificial Sequence
  SARS-CoV-2/pangolin/Guangxi/P4L/2017__EPI_ISL_410538 spike protein (1-1141)(K980P_V981P) Ferritin construct
MFVFLFVLPLVSSQCVNLTTRTGIPPGYTNSSTRGVYYPDKVFRSSILHLTQDLFLPFFSNVTWFNTINYQGGFKKFDNPVLPFNDGVYFASTEKSNIIRGWIFGTTLDARTQSLLIVNNATNVVIKVCEFQFCTDPFLGVYYHNNNKTWVENEFRVYSSANNCTFEYISQPFLMDLEGKQGNFKNLREFVFKNVDGYFKIYSKHTPIDLVRDLPRGFAALEPLVDLPIGINITRFQTLLALHRSYLTPGNLESGWTTGAAAYYVGYLQQRTFLLSYNQNGTITDAVDCSLDPLSETKCTLKSLTVEKGIYQTSNFRVQPTISIVRFPNITNLCPFGEVFNASKFASVYAWNRKRISNCVADYSVLYNSTSFSTFKCYGVSPTKLNDLCFTNVYADSFVVKGDEVRQIAPGQTGVIADYNYKLPDDFTGCVIAWNSVKQDALTGGNYGYLYRLFRKSKLKPFERDISTEIYQAGSTPCNGQVGLNCYYPLERYGFHPTTGVNYQPFRVVVLSFELLNGPATVCGPKLSTTLVKDKCVNFNFNGLTGTGVLTTSKKQFLPFQQFGRDISDTTDAVRDPQTLEILDITPCSFGGVSVITPGTNTSNQVAVLYQDVNCTEVPMAIHAEQLTPAWRVYSAGANVFQTRAGCLVGAEHVNNSYECDIPVGAGICASYHSMSSLRSVNQRSIIAYTMSLGAENSVAYSNNSIAIPTNFTISVTTEILPVSMTKTSVDCTMYICGDSIECSNLLLQYGSFCTQLNRALTGIAVEQDKNTQEVFAQVKQIYKTPPIKDFGGFNFSQILPDPSKPSKRSFIEDLLFNKVTLADAGFIKQYGDCLGDIAARDLICAQKFNGLTVLPPLLTDEMIAQYTSALLAGTITSGWTFGAGAALQIPFAMQMAYRFNGIGVTQNVLYENQKLIANQFNSAIGKIQDSLSSTASALGKLQDVVNQNAQALNTLVKQLSSNFGAISSVLNDILSRLDPPEAEVQIDRLITGRLQSLQTYVTQQLIRAAEIRASANLAATKMSECVLGQSKRVDFCGKGYHLMSFPQSAPHGVVFLHVTYVPAQEKNFTTAPAICHEGKAHFPREGVFVSNGTHWFITQRNFYEPQIITTDNTFVSGSCDVVIGIVNNTVYDPLQPELDSGGGGSDIIKLLNEQVNKEMQSSNLYMSMSSWCYTHSLDGAGLFLFDHAAEEYEHAKKLIIFLNENNVPVQLTSISAPEHKFEGLTQIFQKAYEHEQHISESINNIVDHAIKSKDHATFNFLQWYVAEQHEEEVLFKDILDKIELIGNENHGLYLADQYVKGIAKSRKS

SEQ ID NO: 8780 - protein, 1309 aa, Artificial Sequence
  SARS-CoV-2/pangolin/Guangxi/P5L/2017__EPI_ISL_410540 spike protein (1-1141)(K980P_V981P) Ferritin construct
MFVFLFVLPLVSSQCVNLTTRTGIPPGYTNSSTRGVYYPDKVFRSSILHLTQDLFLPFFSNVTWFNTINYQGGFKKFDNPVLPFNDGVYFASTEKSNIIRGWIFGTTLDARTQSLLIVNNATNVVIKVCEFQFCTDPFLGVYYHNNNKTWVENEFRVYSSANNCTFEYISQPFLMDLEGKQGNFKNLREFVFKNVDGYFKIYSKHTPIDLVRDLPRGFAALEPLVDLPIGINITRFQTLLALHRSYLTPGKLESGWTTGAAAYYVGYLQQRTFLLSYNQNGTITDAVDCSLDPLSETKCTLKSLTVEKGIYQTSNFRVQPTISIVRFPNITNLCPFGEVFNASKFASVYAWNRKRISNCVADYSVLYNSTSFSTFKCYGVSPTKLNDLCFTNVYADSFVVKGDEVRQIAPGQTGVIADYNYKLPDDFTGCVIAWNSVKQDALTGGNYGYLYRLFRKSKLKPFERDISTEIYQAGSTPCNGQVGLNCYYPLERYGFHPTTGVNYQPFRVVVLSFELLNGPATVCGPKLSTTLVKDKCVNFNFNGLTGTGVLTTSKKQFLPFQQFGRDISDTTDAVRDPQTLEILDITPCSFGGVSVITPGTNTSNQVAVLYQDVNCTEVPMAIHAEQLTPAWRVYSAGANVFQTRAGCLVGAEHVNNSYECDIPVGAGICASYHSMSSFRSVNQRSIIAYTMSLGAENSVAYSNNSIAIPTNFTISVTTEILPVSMTKTSVDCTMYICGDSIECSNLLLQYGSFCTQLNRALTGIAVEQDKNTQEVFAQVKQIYKTPPIKDFGGFNFSQILPDPSKPSKRSFIEDLLFNKVTLADAGFIKQYGDCLGDIAARDLICAQKFNGLTVLPPLLTDEMIAQYTSALLAGTITSGWTFGAGAALQIPFAMQMAYRFNGIGVTQNVLYENQKLIANQFNSAIGKIQDSLSSTASALGKLQDVVNQNAQALNTLVKQLSSNFGAISSVLNDILSRLDPPEAEVQIDRLITGRLQSLQTYVTQQLIRAAEIRASANLAATKMSECVLGQSKRVDFCGKGYHLMSFPQSAPHGVVFLHVTYVPAQEKNFTTAPAICHEGKAHFPREGVFVSNGTHWFITQRNFYEPQIITTDNTFVSGSCDVVIGIVNNTVYDPLQPELDSGGGGSDIIKLLNEQVNKEMQSSNLYMSMSSWCYTHSLDGAGLFLFDHAAEEYEHAKKLIIFLNENNVPVQLTSISAPEHKFEGLTQIFQKAYEHEQHISESINNIVDHAIKSKDHATFNFLQWYVAEQHEEEVLFKDILDKIELIGNENHGLYLADQYVKGIAKSRKS

SEQ ID NO: 8781 - protein, 1309 aa, Artificial Sequence
  SARS-CoV-2/pangolin/Guangxi/P5E/2017__EPI_ISL_410541 spike protein (1-1141)(K980P_V981P) Ferritin construct
MFVFLFVLPLVSSQCVNLTTRTGIPPGYTNSSTRGVYYPDKVFRSSILHLTQDLFLPFFSNVTWFNTITYQGGSKKFDNPVLPFNDGVYFASTEKSNIIRGWIFGTTLDARTQSLLIVNNATNVVIKVCEFQFCTDPFLGVYYHNNNKTWVENEFRVYSSANNCTFEYISQPFLMDLEGKQGNFKNLREFVFKNVDGYFKIYSKHTPIDLVRDLPRGFAALEPLVDLPIGINITRFQTLLALHRSYLTPGKLESGWTTGAAAYYVGYLQQRTFLLSYNQNGTITDAVDCSLDPLSETKCTLKSLTVEKGIYQTSNFRVQPTISIVRFPNITNLCPFGEVFNASKFASVYAWNRKRISNCVADYSVLYNSTSFSTFKCYGVSPTKLNDLCFTNVYADSFVVKGDEVRQIAPGQTGVIADYNYKLPDDFTGCVIAWNSVKQDALTGDNYGYLYRLFRKSKLKPFERDISTEIYQAGSTPCNGQVGLNCYYPLERYGFHPTTGVNYQPFRVVVLSFELLNGPATVCGPKLSTTLVKDKCVNFNFNGLTGTGVLTTSKKQFLPFQQFGRDISDTTDAVRDPQTLEILDITPCSFGGVSVITPGTNTSNQVAVLYQDVNCTEVPMAIHAEQLTPAWRVYSAGANVFQTRAGCLVGAEHVNNSYECDIPVGAGICASYHSMSSFRSVNQRSIIAYTMSLGAENSVAYSNNSIAIPTNFTISVTTEILPVSMTKTSVDCTMYICGDSIECSNLLLQYGSFCTQLNRALTGIAVEQDKNTQEVFAQVKQIYKTPPIKDFGGFNFSQILPDPSKPSKRSFIEDLLFNKVTLADAGFIKQYGDCLGDIAARDLICAQKFNGLTVLPPLLTDEMIAQYTSALLAGTITSGWTFGAGAALQIPFAMQMAYRFNGIGVTQNVLYENQKLIANQFNSAIGKIQDSLSSTASALGKLQDVVNQNAQALNTLVKQLSSNFGAISSVLNDILSRLDPPEAEVQIDRLITGRLQSLQTYVTQQLIRAAEIRASANLAATKMSECVLGQSKRVDFCGKGYHLMSFPQSAPHGVVFLHVTYVPAQEKNFTTAPAICHEGKAHFPREGVFVSNGTHWFITQRNFYEPQIITTDNTFVSGSCDVVIGIVNNTVYDPLQPELDSGGGGSDIIKLLNEQVNKEMQSSNLYMSMSSWCYTHSLDGAGLFLFDHAAEEYEHAKKLIIFLNENNVPVQLTSISAPEHKFEGLTQIFQKAYEHEQHISESINNIVDHAIKSKDHATFNFLQWYVAEQHEEEVLFKDILDKIELIGNENHGLYLADQYVKGIAKSRKS

SEQ ID NO: 8782 - protein, 1307 aa, Artificial Sequence
  SARS-CoV-2/pangolin/Guangxi/P1E/2017__EPI_ISL_410539 spike protein (1-1139)(K978P_V979P) Ferritin construct
MFVFLFVLPLVSSQCVNLTTRTGIQPGYTNSSTRGVYYPDKVFRSSILHLTQDLFLPFFSNVTWFNTINYQGGFKKFDNPVLPFNDGVYFASTEKSNIIRGWIFGTTLDARTQSLLIVNNATNVVIKVCEFQFCTDPFLGVYYHNNNKTWVENEFRVYSSANNCTFEYISQPFLMDLEGKQGNFKNLREFVFKNVDGYFKIYSKHTPIDLVRDLPRGFAALEPLVDLPIGINITRFQTLLALHRSYLTPGKLESGWTTGAAAYYVGYLQQRTFLLSYNQNGTITDAVDCSLDPLSETKCTLKSLTVEKGIYQTSNFRVQPTISIVRFPNITNLCPFGEVFNASKFASVYAWNRKRISNCVADYSVLYNSTSFSTFKCYGVSPTKLNDLCFTNVYADSFVVKGDEVRQIAPGQTGVIADYNYKLPDDFTGCVIAWNSVKQDALTGGNYLYRLFRKSKLKPFERDISTEIYQAGSTPCNGQVGLNCYYPLERYGFHPTTGVNYQPFRVVVLSFELLNGPATVCGPKLSTTLVKDKCVNFNFNGLTGTGVLTTSKKQFLPFQQFGRDISDTTDAVRDPQTLEILDITPCSFGGVSVITPGTNTSNQVAVLYQDVNCTEVPMAIHAEQLTPAWRVYSAGANVFQTRAGCLVGAEHVNNSYECDIPVGAGICASYHSMSSLRSVNQRSIIAYTMSLGAENSVAYSNNSIAIPTNFTISVTTEILPVSMTKTSVDCTMYICGDSIECSNLLLQYGSFCTQLNRALTGIAVEQDKNTQEVFAQVKQIYKTPPIKDFGGFNFSQILPDPSKPSKRSFIEDLLFNKVTLADAGFIKQYGDCLGDIAARDLICAQKFNGLTVLPPLLTDEMIAQYTSALLAGTITSGWTFGAGAALQIPFAMQMAYRFNGIGVTQNVLYENQKLIANQFNSAIGKIQDSLSSTASALGKLQDVVNQNAQALNTLVKQLSSNFGAISSVLNDILSRLDPPEAEVQIDRLITGRLQSLQTYVTQQLIRAAEIRASANLAATKMSECVLGQSKRVDFCGKGYHLMSFPQSAPHGVVFLHVTYVPAQEKNFTTAPAICHEGKAHFPREGVFVSNGTHWFITQRNFYEPQIITTDNTFVSGSCDVVIGIVNNTVYDPLQPELDSGGGGSDIIKLLNEQVNKEMQSSNLYMSMSSWCYTHSLDGAGLFLFDHAAEEYEHAKKLIIFLNENNVPVQLTSISAPEHKFEGLTQIFQKAYEHEQHISESINNIVDHAIKSKDHATFNFLQWYVAEQHEEEVLFKDILDKIELIGNENHGLYLADQYVKGIAKSRKS

SEQ ID NO: 8783 - protein, 1315 aa, Artificial Sequence
  SARS-CoV-2/Wuhan/WIV05/2019__EPI_ISL_402128 spike protein (1-1147)(K986P_V987P_T887W_A1020W) Ferritin construct
MFVFLVLLPLVSSQCVNLTTRTQLPPAYTNSFTRGVYYPDKVFRSSVLHSTQDLFLPFFSNVTWFHAIHVSGTNGTKRFDNPVLPFNDGVYFASTEKSNIIRGWIFGTTLDSKTQSLLIVNNATNVVIKVCEFQFCNDPFLGVYYHKNNKSWMESEFRVYSSANNCTFEYVSQPFLMDLEGKQGNFKNLREFVFKNIDGYFKIYSKHTPINLVRDLPQGFSALEPLVDLPIGINITRFQTLLALHRSYLTPGDSSSGWTAGAAAYYVGYLQPRTFLLKYNENGTITDAVDCALDPLSETKCTLKSFTVEKGIYQTSNFRVQPTESIVRFPNITNLCPFGEVFNATRFASVYAWNRKRISNCVADYSVLYNSASFSTFKCYGVSPTKLNDLCFTNVYADSFVIRGDEVRQIAPGQTGKIADYNYKLPDDFTGCVIAWNSNNLDSKVGGNYNYLYRLFRKSNLKPFERDISTEIYQAGSTPCNGVEGFNCYFPLQSYGFQPTNGVGYQPYRVVVLSFELLHAPATVCGPKKSTNLVKNKCVNFNFNGLTGTGVLTESNKKFLPFQQFGRDIADTTDAVRDPQTLEILDITPCSFGGVSVITPGTNTSNQVAVLYQDVNCTEVPVAIHADQLTPTWRVYSTGSNVFQTRAGCLIGAEHVNNSYECDIPIGAGICASYQTQTNSPRRARSVASQSIIAYTMSLGAENSVAYSNNSIAIPTNFTISVTTEILPVSMTKTSVDCTMYICGDSTECSNLLLQYGSFCTQLNRALTGIAVEQDKNTQEVFAQVKQIYKTPPIKDFGGFNFSQILPDPSKPSKRSFIEDLLFNKVTLADAGFIKQYGDCLGDIAARDLICAQKFNGLTVLPPLLTDEMIAQYTSALLAGTITSGWWFGAGAALQIPFAMQMAYRFNGIGVTQNVLYENQKLIANQFNSAIGKIQDSLSSTASALGKLQDVVNQNAQALNTLVKQLSSNFGAISSVLNDILSRLDPPEAEVQIDRLITGRLQSLQTYVTQQLIRAAEIRWSANLAATKMSECVLGQSKRVDFCGKGYHLMSFPQSAPHGVVFLHVTYVPAQEKNFTTAPAICHDGKAHFPREGVFVSNGTHWFVTQRNFYEPQIITTDNTFVSGNCDVVIGIVNNTVYDPLQPELDSGGGGSDIIKLLNEQVNKEMQSSNLYMSMSSWCYTHSLDGAGLFLFDHAAEEYEHAKKLIIFLNENNVPVQLTSISAPEHKFEGLTQIFQKAYEHEQHISESINNIVDHAIKSKDHATFNFLQWYVAEQHEEEVLFKDILDKIELIGNENHGLYLADQYVKGIAKSRKS

SEQ ID NO: 8784 - protein, 1311 aa, Artificial Sequence
  SARS-CoV-2/bat/Yunnan/RaTG13/2013__EPI_ISL_402131 spike protein (1-1143)(K982P_V983P_T883W_A1016W) Ferritin construct
MFVFLVLLPLVSSQCVNLTTRTQLPPAYTNSSTRGVYYPDKVFRSSVLHLTQDLFLPFFSNVTWFHAIHVSGTNGIKRFDNPVLPFNDGVYFASTEKSNIIRGWIFGTTLDSKTQSLLIVNNATNVVIKVCEFQFCNDPFLGVYYHKNNKSWMESEFRVYSSANNCTFEYVSQPFLMDLEGKQGNFKNLREFVFKNIDGYFKIYSKHTPINLVRDLPPGFSALEPLVDLPIGINITRFQTLLALHRSYLTPGDSSSGWTAGAAAYYVGYLQPRTFLLKYNENGTITDAVDCALDPLSETKCTLKSFTVEKGIYQTSNFRVQPTDSIVRFPNITNLCPFGEVFNATTFASVYAWNRKRISNCVADYSVLYNSTSFSTFKCYGVSPTKLNDLCFTNVYADSFVITGDEVRQIAPGQTGKIADYNYKLPDDFTGCVIAWNSKHIDAKEGGNFNYLYRLFRKANLKPFERDISTEIYQAGSKPCNGQTGLNCYYPLYRYGFYPTDGVGHQPYRVVVLSFELLNAPATVCGPKKSTNLVKNKCVNFNFNGLTGTGVLTESNKKFLPFQQFGRDIADTTDAVRDPQTLEILDITPCSFGGVSVITPGTNASNQVAVLYQDVNCTEVPVAIHADQLTPTWRVYSTGSNVFQTRAGCLIGAEHVNNSYECDIPIGAGICASYQTQTNSRSVASQSIIAYTMSLGAENSVAYSNNSIAIPTNFTISVTTEILPVSMTKTSVDCTMYICGDSTECSNLLLQYGSFCTQLNRALTGIAVEQDKNTQEVFAQVKQIYKTPPIKDFGGFNFSQILPDPSKPSKRSFIEDLLFNKVTLADAGFIKQYGDCLGDIAARDLICAQKFNGLTVLPPLLTDEMIAQYTSALLAGTITSGWWFGAGAALQIPFAMQMAYRFNGIGVTQNVLYENQKLIANQFNSAIGKIQDSLSSTASALGKLQDVVNQNAQALNTLVKQLSSNFGAISSVLNDILSRLDPPEAEVQIDRLITGRLQSLQTYVTQQLIRAAEIRWSANLAATKMSECVLGQSKRVDFCGKGYHLMSFPQSAPHGVVFLHVTYVPAQEKNFTTAPAICHDGKAHFPREGVFVSNGTHWFVTQRNFYEPQIITTDNTFVSGSCDVVIGIVNNTVYDPLQPELDSGGGGSDIIKLLNEQVNKEMQSSNLYMSMSSWCYTHSLDGAGLFLFDHAAEEYEHAKKLIIFLNENNVPVQLTSISAPEHKFEGLTQIFQKAYEHEQHISESINNIVDHAIKSKDHATFNFLQWYVAEQHEEEVLFKDILDKIELIGNENHGLYLADQYVKGIAKSRKS

SEQ ID NO: 8785 - protein, 1315 aa, Artificial Sequence
  SARS-CoV-2/Wuhan/HBCDC-HB-01/2019__EPI_ISL_402132 spike protein (1-1147)(K986P_V987P_T887W_A1020W) Ferritin construct
MFVFLVLLPLVSSQCVNLTTRTQLPPAYTNSITRGVYYPDKVFRSSVLHSTQDLFLPFFSNVTWFHAIHVSGTNGTKRFDNPVLPFNDGVYFASTEKSNIIRGWIFGTTLDSKTQSLLIVNNATNVVIKVCEFQFCNDPFLGVYYHKNNKSWMESEFRVYSSANNCTFEYVSQPFLMDLEGKQGNFKNLREFVFKNIDGYFKIYSKHTPINLVRDLPQGFSALEPLVDLPIGINITRFQTLLALHRSYLTPGDSSSGWTAGAAAYYVGYLQPRTFLLKYNENGTITDAVDCALDPLSETKCTLKSFTVEKGIYQTSNFRVQPTESIVRFPNITNLCPFGEVFNATRFASVYAWNRKRISNCVADYSVLYNSASFSTFKCYGVSPTKLNDLCFTNVYADSFVIRGDEVRQIAPGQTGKIADYNYKLPDDFTGCVIAWNSNNLDSKVGGNYNYLYRLFRKSNLKPFERDISTEIYQAGSTPCNGVEGFNCYFPLQSYGFQPTNGVGYQPYRVVVLSFELLHAPATVCGPKKSTNLVKNKCVNFNFNGLTGTGVLTESNKKFLPFQQFGRDIADTTDAVRDPQTLEILDITPCSFGGVSVITPGTNTSNQVAVLYQDVNCTEVPVAIHADQLTPTWRVYSTGSNVFQTRAGCLIGAEHVNNSYECDIPIGAGICASYQTQTNSPRRARSVASQSIIAYTMSLGAENSVAYSNNSIAIPTNFTISVTTEILPVSMTKTSVDCTMYICGDSTECSNLLLQYGSFCTQLNRALTGIAVEQDKNTQEVFAQVKQIYKTPPIKDFGGFNFSQILPDPSKPSKRSFIEDLLFNKVTLADAGFIKQYGDCLGDIAARDLICAQKFNGLTVLPPLLTDEMIAQYTSALLAGTITSGWWFGAGAALQIPFAMQMAYRFNGIGVTQNVLYENQKLIANQFNSAIGKIQDSLSSTASALGKLQDVVNQNAQALNTLVKQLSSNFGAISSVLNDILSRLDPPEAEVQIDRLITGRLQSLQTYVTQQLIRAAEIRWSANLAATKMSECVLGQSKRVDFCGKGYHLMSFPQSAPHGVVFLHVTYVPAQEKNFTTAPAICHDGKAHFPREGVFVSNGTHWFVTQRNFYEPQIITTDNTFVSGNCDVVIGIVNNTVYDPLQPELDSGGGGSDIIKLLNEQVNKEMQSSNLYMSMSSWCYTHSLDGAGLFLFDHAAEEYEHAKKLIIFLNENNVPVQLTSISAPEHKFEGLTQIFQKAYEHEQHISESINNIVDHAIKSKDHATFNFLQWYVAEQHEEEVLFKDILDKIELIGNENHGLYLADQYVKGIAKSRKS

SEQ ID NO: 8786 - protein, 1315 aa, Artificial Sequence
  SARS-CoV-2/Guangdong/20SF028/2020__EPI_ISL_403936 spike protein (1-1147)(K986P_V987P_T887W_A1020W) Ferritin construct
MFVFLVLLPLVSSQCVNLTTRTQLPPAYTNSFTRGVYYPDKVFRSSVLYSTQDLFLPFFSNVTWFHAIHVSGTNGTKRFDNPVLPFNDGVYFASTEKSNIIRGWIFGTTLDSKTQSLLIVNNATNVVIKVCEFQFCNDPFLGVYYHKNNKSWMESEFRVYSSANNCTFEYVSQPFLMDLEGKQGNFKNLREFVFKNIDGYFKIYSKHTPINLVRDLPQGFSALEPLVDLPIGINITRFQTLLALHRSYLTPGDSSSGWTAGAAAYYVGYLQPRTFLLKYNENGTITDAVDCALDPLSETKCTLKSFTVEKGIYQTSNFRVQPTESIVRFPNITNLCPFGEVFNATRFASVYAWNRKRISNCVADYSVLYNSASFSTFKCYGVSPTKLNDLCFTNVYADSFVIRGDEVRQIAPGQTGKIADYNYKLPDDFTGCVIAWNSNNLDSKVGGNYNYLYRLFRKSNLKPFERDISTEIYQAGSTPCNGVEGFNCYFPLQSYGFQPTNGVGYQPYRVVVLSFELLHAPATVCGPKKSTNLVKNKCVNFNFNGLTGTGVLTESNKKFLPFQQFGRDIADTTDAVRDPQTLEILDITPCSFGGVSVITPGTNTSNQVAVLYQDVNCTEVPVAIHADQLTPTWRVYSTGSNVFQTRAGCLIGAEHVNNSYECDIPIGAGICASYQTQTNSPRRARSVASQSIIAYTMSLGAENSVAYSNNSIAIPTNFTISVTTEILPVSMTKTSVDCTMYICGDSTECSNLLLQYGSFCTQLNRALTGIAVEQDKNTQEVFAQVKQIYKTPPIKDFGGFNFSQILPDPSKPSKRSFIEDLLFNKVTLADAGFIKQYGDCLGDIAARDLICAQKFNGLTVLPPLLTDEMIAQYTSALLAGTITSGWWFGAGAALQIPFAMQMAYRFNGIGVTQNVLYENQKLIANQFNSAIGKIQDSLSSTASALGKLQDVVNQNAQALNTLVKQLSSNFGAISSVLNDILSRLDPPEAEVQIDRLITGRLQSLQTYVTQQLIRAAEIRWSANLAATKMSECVLGQSKRVDFCGKGYHLMSFPQSAPHGVVFLHVTYVPAQEKNFTTAPAICHDGKAHFPREGVFVSNGTHWFVTQRNFYEPQIITTDNTFVSGNCDVVIGIVNNTVYDPLQPELDSGGGGSDIIKLLNEQVNKEMQSSNLYMSMSSWCYTHSLDGAGLFLFDHAAEEYEHAKKLIIFLNENNVPVQLTSISAPEHKFEGLTQIFQKAYEHEQHISESINNIVDHAIKSKDHATFNFLQWYVAEQHEEEVLFKDILDKIELIGNENHGLYLADQYVKGIAKSRKS

SEQ ID NO: 8787 - protein, 1315 aa, Artificial Sequence
  SARS-CoV-2/Shenzhen/SZTH-001/2020__EPI_ISL_406592 spike protein (1-1147)(K986P_V987P_T887W_A1020W) Ferritin construct
MFVFLVLLPLVSSQCVNLTTRTQLPPAYTNSFTRGVYYPDKVFRSSVLHSTQDLFLPFFSNVTWFHAIHVSGTNGTKRFDNPVLPFNDGVYFASTEKSNIIRGWIFGTTLDSKTQSLLIVNNATNVVIKVCEFQFCNDPFLGVYYHKNNKSWMESEFRVYSSANNCTFEYVSQPFLMDLEGKQGNFKNLREFVFKNIDGYFKIYSKHTPINLVRDLPQGFSALEPLVDLPIGINITRFQTLLALHRSYLTPGDSSSGWTAGAAAYYVGYLQPRTFLLKYNENGTITDAVDCALDPLSETKCTLKSFTVEKGIYQTSNFRVQPTESIVRFPNITNLCPFGEVFNATRFASVYAWNRKRISNCVADYSVLYNSASFSTFKCYGVSPTKLNDLCFTNVYADSFVIRGDEVRQIAPGQTGKIADYNYKLPDDFTGCVIAWNSNNLDSKVGGNYNYLYRLFRKSNLKPFERDISTEIYQAGSTPCNGVEGFNCYFPLQSYGFQPTNGVGYQPYRVVVLSFELLHAPATVCGPKKSTNLVKNKCVNFNFNGLTGTGVLTESNKKFLPFQQFGRDIADTTDAVRDPQTLEILDITPCSFGGVSVITPGTNTSNQVAVLYQDVNCTEVPVAIHADQLTPTWRVYSTGSNVFQTRAGCLIGAEHVNNSYECDIPIGAGICASYQTQTNSPRRARSVASQSIIAYTMSLGAENSVAYSNNSIAIPTNFTISVTTEILPVSMTKTSVDCTMYICGDSTECSNLLLQYGSFCTQLNRALTGIAVEQDKNTQEVFAQVKQIYKTPPIKDFGGFNFSQILPDPSKPSKRSFIEDLLFNKVTLADAGFIKQYGDCLGDIAARDLICAQKFNGLTVLPPLLTDEMIAQYTSALLAGTITSGWWFGAGAALQIPFAMQMAYRFNGIGVTQNVLYENQKLIANQFNSAIGKIQDSLSSTASALGKLQDVVNQNAQALNTLVKQLSSNFGAISSVLNDILSRLDPPEAEVQIDRLITGRLQSLQTYVTQQLIRAAEIRWSANLAATKMSECVLGQSKRVDFCGKGYHLMSFPQSAPHGVVFLHVTYVPAQEKNFTTAPAICHDGKAHFPREGVFVSNGTHWFVTQRNFYEPQIITTDNTFVSGNCDVLIGIVNNTVYDPLQPELDSGGGGSDIIKLLNEQVNKEMQSSNLYMSMSSWCYTHSLDGAGLFLFDHAAEEYEHAKKLIIFLNENNVPVQLTSISAPEHKFEGLTQIFQKAYEHEQHISESINNIVDHAIKSKDHATFNFLQWYVAEQHEEEVLFKDILDKIELIGNENHGLYLADQYVKGIAKSRKS

SEQ ID NO: 8788 - protein, 1315 aa, Artificial Sequence
  SARS-CoV-2/Shenzhen/SZTH-004/2020__EPI_ISL_406595 spike protein (1-1147)(K986P_V987P_T887W_A1020W) Ferritin construct
MFVFLVLLPLVSSQCVNLTTRTQLPPAYTNSFTRGVYYPDKVFRSSVLHSTQDLFLPFFSNVTWFHAIHVSGTNGTKRFDNPVLPFNDGVYFASTEKSNIIRGWIFGTTLDSKTQSLLIVNNATNVVIKVCEFQFCNDPFLGVYYHKNNKSWMESEFRVYSSANNCTFEYVSQPFLMDLEGKQGNFKNLREFVFKNIDGYFKIYSKHTPINLVRDLPQGFSALEPLVDLPIGINITRFQTLLALHRSYLTPGDSSSGWTAGAAAYYVGYLQPRTFLLKYNENGTITDAVDCALDPLSETKCTLKSFTVEKGIYQTSNFRVQPTESIVRFPNITNLCPFGEVFNATRFASVYAWDRKRISNCVAYYSVLYNSASFSTFKCYGVSPTKLNDLCFTNVYADSFVIRGDEVRQIAPGQTGKIADYNYKLPDDFTGCVIAWNSNNLDSKVGGNYNYLYRLFRKSNLKPFERDISTEIYQAGSTPCNGVEGFNCYFPLQSYGFQPTNGVGYQPYRVVVLSFELLHAPATVCGPKKSTNLVKNKCVNFNFNGLTGTGVLTESNKKFLPFQQFGRDIADTTDAVRDPQTLEILDITPCSFGGVSVITPGTNTSNQVAVLYQDVNCTEVPVAIHADQLTPTWRVYSTGSNVFQTRAGCLIGAEHVNNSYECDIPIGAGICASYQTQTNSPRRARSVASQSIIAYTMSLGAENSVAYSNNSIAIPTNFTISVTTEILPVSMTKTSVDCTMYICGDSTECSNLLLQYGSFCTQLNRALTGIAVEQDKNTQEVFAQVKQIYKTPPIKDFGGFNFSQILPDPSKPSKRSFIEDLLFNKVTLADAGFIKQYGDCLGDIAARDLICAQKFNGLTVLPPLLTDEMIAQYTSALLAGTITSGWWFGAGAALQIPFAMQMAYRFNGIGVTQNVLYENQKLIANQFNSAIGKIQDSLSSTASALGKLQDVVNQNAQALNTLVKQLSSNFGAISSVLNDILSRLDPPEAEVQIDRLITGRLQSLQTYVTQQLIRAAEIRWSANLAATKMSECVLGQSKRVDFCGKGYHLMSFPQSAPHGVVFLHVTYVPAQEKNFTTAPAICHDGKAHFPREGVFVSNGTHWFVTQRNFYEPQIITTDNTFVSGNCDVVIGIVNNTVYDPLQPELDSGGGGSDIIKLLNEQVNKEMQSSNLYMSMSSWCYTHSLDGAGLFLFDHAAEEYEHAKKLIIFLNENNVPVQLTSISAPEHKFEGLTQIFQKAYEHEQHISESINNIVDHAIKSKDHATFNFLQWYVAEQHEEEVLFKDILDKIELIGNENHGLYLADQYVKGIAKSRKS

SEQ ID NO: 8789 - protein, 1315 aa, Artificial Sequence
  SARS-CoV-2/France/IDF0372/2020__EPI_ISL_406596 spike protein (1-1147)(K986P_V987P_T887W_A1020W) Ferritin construct
MFVFLVLLPLVSSQCVNLTTRTQLPPAYTNSFTRGVYYPDKVFRSSVLHSTQDLFLPFFSNVTWFHAIHVSGTNGTKRFDNPVLPFNDGVYFASTEKSNIIRGWIFGTTLDSKTQSLLIVNNATNVVIKVCEFQFCNDPFLGVYYHKNNKSWMESEFRVYSSANNCTFEYVSQPFLMDLEGKQGNFKNLREFVFKNIDGYFKIYSKHTPINLVRDLPQGFSALEPLVDLPIGINITRFQTLLALHRSYLTPGDSSSGWTAGAAAYYVGYLQPRTFLLKYNENGTITDAVDCALDPLSETKCTLKSFTVEKGIYQTSNFRVQPTESIVRFPNITNLCPFGEVFNATRFASVYAWNRKRISNCVADYSFLYNSASFSTFKCYGVSPTKLNDLCFTNVYADSFVIRGDEVRQIAPGQTGKIADYNYKLPDDFTGCVIAWNSNNLDSKVGGNYNYLYRLFRKSNLKPFERDISTEIYQAGSTPCNGVEGFNCYFPLQSYGFQPTNGVGYQPYRVVVLSFELLHAPATVCGPKKSTNLVKNKCVNFNFNGLTGTGVLTESNKKFLPFQQFGRDIADTTDAVRDPQTLEILDITPCSFGGVSVITPGTNTSNQVAVLYQDVNCTEVPVAIHADQLTPTWRVYSTGSNVFQTRAGCLIGAEHVNNSYECDIPIGAGICASYQTQTNSPRRARSVASQSIIAYTMSLGAENSVAYSNNSIAIPTNFTISVTTEILPVSMTKTSVDCTMYICGDSTECSNLLLQYGSFCTQLNRALTGIAVEQDKNTQEVFAQVKQIYKTPPIKDFGGFNFSQILPDPSKPSKRSFIEDLLFNKVTLADAGFIKQYGDCLGDIAARDLICAQKFNGLTVLPPLLTDEMIAQYTSALLAGTITSGWWFGAGAALQIPFAMQMAYRFNGIGVTQNVLYENQKLIANQFNSAIGKIQDSLSSTASALGKLQDVVNQNAQALNTLVKQLSSNFGAISSVLNDILSRLDPPEAEVQIDRLITGRLQSLQTYVTQQLIRAAEIRWSANLAATKMSECVLGQSKRVDFCGKGYHLMSFPQSAPHGVVFLHVTYVPAQEKNFTTAPAICHDGKAHFPREGVFVSNGTHWFVTQRNFYEPQIITTDNTFVSGNCDVVIGIVNNTVYDPLQPELDSGGGGSDIIKLLNEQVNKEMQSSNLYMSMSSWCYTHSLDGAGLFLFDHAAEEYEHAKKLIIFLNENNVPVQLTSISAPEHKFEGLTQIFQKAYEHEQHISESINNIVDHAIKSKDHATFNFLQWYVAEQHEEEVLFKDILDKIELIGNENHGLYLADQYVKGIAKSRKS

SEQ ID NO: 8790 - protein, 1315 aa, Artificial Sequence
  SARS-CoV-2/Australia/VIC01/2020__EPI_ISL_406844 spike protein (1-1147)(K986P_V987P_T887W_A1020W) Ferritin construct
MFVFLVLLPLVSSQCVNLTTRTQLPPAYTNSFTRGVYYPDKVFRSSVLHSTQDLFLPFFSNVTWFHAIHVSGTNGTKRFDNPVLPFNDGVYFASTEKSNIIRGWIFGTTLDSKTQSLLIVNNATNVVIKVCEFQFCNDPFLGVYYHKNNKSWMESEFRVYSSANNCTFEYVSQPFLMDLEGKQGNFKNLREFVFKNIDGYFKIYSKHTPINLVRDLPQGFSALEPLVDLPIGINITRFQTLLALHRRYLTPGDSSSGWTAGAAAYYVGYLQPRTFLLKYNENGTITDAVDCALDPLSETKCTLKSFTVEKGIYQTSNFRVQPTESIVRFPNITNLCPFGEVFNATRFASVYAWNRKRISNCVADYSVLYNSASFSTFKCYGVSPTKLNDLCFTNVYADSFVIRGDEVRQIAPGQTGKIADYNYKLPDDFTGCVIAWNSNNLDSKVGGNYNYLYRLFRKSNLKPFERDISTEIYQAGSTPCNGVEGFNCYFPLQSYGFQPTNGVGYQPYRVVVLSFELLHAPATVCGPKKSTNLVKNKCVNFNFNGLTGTGVLTESNKKFLPFQQFGRDIADTTDAVRDPQTLEILDITPCSFGGVSVITPGTNTSNQVAVLYQDVNCTEVPVAIHADQLTPTWRVYSTGSNVFQTRAGCLIGAEHVNNSYECDIPIGAGICASYQTQTNSPRRARSVASQSIIAYTMSLGAENSVAYSNNSIAIPTNFTISVTTEILPVSMTKTSVDCTMYICGDSTECSNLLLQYGSFCTQLNRALTGIAVEQDKNTQEVFAQVKQIYKTPPIKDFGGFNFSQILPDPSKPSKRSFIEDLLFNKVTLADAGFIKQYGDCLGDIAARDLICAQKFNGLTVLPPLLTDEMIAQYTSALLAGTITSGWWFGAGAALQIPFAMQMAYRFNGIGVTQNVLYENQKLIANQFNSAIGKIQDSLSSTASALGKLQDVVNQNAQALNTLVKQLSSNFGAISSVLNDILSRLDPPEAEVQIDRLITGRLQSLQTYVTQQLIRAAEIRWSANLAATKMSECVLGQSKRVDFCGKGYHLMSFPQSAPHGVVFLHVTYVPAQEKNFTTAPAICHDGKAHFPREGVFVSNGTHWFVTQRNFYEPQIITTDNTFVSGNCDVVIGIVNNTVYDPLQPELDSGGGGSDIIKLLNEQVNKEMQSSNLYMSMSSWCYTHSLDGAGLFLFDHAAEEYEHAKKLIIFLNENNVPVQLTSISAPEHKFEGLTQIFQKAYEHEQHISESINNIVDHAIKSKDHATFNFLQWYVAEQHEEEVLFKDILDKIELIGNENHGLYLADQYVKGIAKSRKS

SEQ ID NO: 8791 - protein, 1315 aa, Artificial Sequence
  SARS-CoV-2/Germany/BavPat1/2020__EPI_ISL_406862 spike protein (1-1147)(K986P_V987P_T887W_A1020W) Ferritin construct
MFVFLVLLPLVSSQCVNLTTRTQLPPAYTNSFTRGVYYPDKVFRSSVLHSTQDLFLPFFSNVTWFHAIHVSGTNGTKRFDNPVLPFNDGVYFASTEKSNIIRGWIFGTTLDSKTQSLLIVNNATNVVIKVCEFQFCNDPFLGVYYHKNNKSWMESEFRVYSSANNCTFEYVSQPFLMDLEGKQGNFKNLREFVFKNIDGYFKIYSKHTPINLVRDLPQGFSALEPLVDLPIGINITRFQTLLALHRSYLTPGDSSSGWTAGAAAYYVGYLQPRTFLLKYNENGTITDAVDCALDPLSETKCTLKSFTVEKGIYQTSNFRVQPTESIVRFPNITNLCPFGEVFNATRFASVYAWNRKRISNCVADYSVLYNSASFSTFKCYGVSPTKLNDLCFTNVYADSFVIRGDEVRQIAPGQTGKIADYNYKLPDDFTGCVIAWNSNNLDSKVGGNYNYLYRLFRKSNLKPFERDISTEIYQAGSTPCNGVEGFNCYFPLQSYGFQPTNGVGYQPYRVVVLSFELLHAPATVCGPKKSTNLVKNKCVNFNFNGLTGTGVLTESNKKFLPFQQFGRDIADTTDAVRDPQTLEILDITPCSFGGVSVITPGTNTSNQVAVLYQGVNCTEVPVAIHADQLTPTWRVYSTGSNVFQTRAGCLIGAEHVNNSYECDIPIGAGICASYQTQTNSPRRARSVASQSIIAYTMSLGAENSVAYSNNSIAIPTNFTISVTTEILPVSMTKTSVDCTMYICGDSTECSNLLLQYGSFCTQLNRALTGIAVEQDKNTQEVFAQVKQIYKTPPIKDFGGFNFSQILPDPSKPSKRSFIEDLLFNKVTLADAGFIKQYGDCLGDIAARDLICAQKFNGLTVLPPLLTDEMIAQYTSALLAGTITSGWWFGAGAALQIPFAMQMAYRFNGIGVTQNVLYENQKLIANQFNSAIGKIQDSLSSTASALGKLQDVVNQNAQALNTLVKQLSSNFGAISSVLNDILSRLDPPEAEVQIDRLITGRLQSLQTYVTQQLIRAAEIRWSANLAATKMSECVLGQSKRVDFCGKGYHLMSFPQSAPHGVVFLHVTYVPAQEKNFTTAPAICHDGKAHFPREGVFVSNGTHWFVTQRNFYEPQIITTDNTFVSGNCDVVIGIVNNTVYDPLQPELDSGGGGSDIIKLLNEQVNKEMQSSNLYMSMSSWCYTHSLDGAGLFLFDHAAEEYEHAKKLIIFLNENNVPVQLTSISAPEHKFEGLTQIFQKAYEHEQHISESINNIVDHAIKSKDHATFNFLQWYVAEQHEEEVLFKDILDKIELIGNENHGLYLADQYVKGIAKSRKS

SEQ ID NO: 8792 - protein, 1315 aa, Artificial Sequence
  SARS-CoV-2/Wuhan/HBCDC-HB-02/2020__EPI_ISL_412978 spike protein (1-1147)(K986P_V987P_T887W_A1020W) Ferritin construct
MFVFLVLLPLVSSQCVNLTTRTQLPPAYTNSFTRGVYYPDKVFRSSVLHSTQDLFLPFFSNVTWFHAIHVSGTNGTKRFDNPVLPFNDGVYFASTEKSNIIRGWIFGTTLDSKTQSLLIVNNATNVVIKVCEFQFCNDPFLGVYYHKNNKSWMESEFRVYSSANNCTFEYVSQPFLMDLEGKQGNFKNLREFVFKNIDGYFKIYSKHTPINLVRDLPQGFSALEPLVDLPIGINITRFQTLLALHRSYLTPGDSSSGWTAGAAAYYVGYLQPRTFLLKYNENGTITDAVDCALDPLSETKCTLKSFTVEKGIYQTSNFRVQPTESIVRFPNITNLCPFGEVFNATRFASVYAWNRKRISNCVADYSVLYNSASFSTFKCYGVSPTKLNDLCFTNVYADSFVIRGDEVRQIAPGQTGKIADYNYKLPDDFTGCVIAWNSNNLDSKVGGNYNYLYRLFRKSNLKPFERDISTEIYQAGSTPCNGVEGFNCYFPLQSYGFQPTNGVGYQPYRVVVLSFELLHAPATVCGPKKSTNLVKNKCVNFNFNGLTGTGVLTESNKKFLPFQQFGRDIADTTDAVRDPQTLEILDITPCSFGGVSVITPGTNTSNQVAVLYQDVNCTEVPVAIHADQLTPTWRVYSTGSNVFQTRAGCLIGAEHVNNSYECDIPIGAGICASYQTQTNSPRRARSVASQSIIAYTMSLGAENSVAYSNNSIAIPTNFTISVTTEILPVSMTKTSVDCTMYICGDSTECSNFLLQYGSFCTQLNRALTGIAVEQDKNTQEVFAQVKQIYKTPPIKDFGGFNFSQILPDPSKPSKRSFIEDLLFNKVTLADAGFIKQYGDCLGDIAARDLICAQKFNGLTVLPPLLTDEMIAQYTSALLAGTITSGWWFGAGAALQIPFAMQMAYRFNGIGVTQNVLYENQKLIANQFNSAIGKIQDSLSSTASALGKLQDVVNQNAQALNTLVKQLSSNFGAISSVLNDILSRLDPPEAEVQIDRLITGRLQSLQTYVTQQLIRAAEIRWSANLAATKMSECVLGQSKRVDFCGKGYHLMSFPQSAPHGVVFLHVTYVPAQEKNFTTAPAICHDGKAHFPREGVFVSNGTHWFVTQRNFYEPQIITTDNTFVSGNCDVVIGIVNNTVYDPLQPELDSGGGGSDIIKLLNEQVNKEMQSSNLYMSMSSWCYTHSLDGAGLFLFDHAAEEYEHAKKLIIFLNENNVPVQLTSISAPEHKFEGLTQIFQKAYEHEQHISESINNIVDHAIKSKDHATFNFLQWYVAEQHEEEVLFKDILDKIELIGNENHGLYLADQYVKGIAKSRKS

SEQ ID NO: 8793 - protein, 1315 aa, Artificial Sequence
  SARS-CoV-2/Australia/QLD02/2020__EPI_ISL_407896 spike protein (1-1147)(K986P_V987P_T887W_A1020W) Ferritin construct
MFVFLVLLPLVSSQCVNLTTRTQLPPAYTNSFTRGVYYPDKVFRSSVLHSTQDLFLPFFSNVTWFHAIHVSGTNGTKRFDNPVLPFNDGVYFASTEKSNIIRGWIFGTTLDSKTQSLLIVNNATNVVIKVCEFQFCNDPFLGVYYHKNNKSWMESEFRVYSSANNCTFEYVSQPFLMDLEGKQGNFKNLREFVFKNIDGYFKIYSKHTPINLVRDLPQGFSALEPLVDLPIGINITRFQTLLALHRSYLTPGDSSSGWTAGAAAYYVGYLQPRTFLLKYNENGTITDAVDCALDPLSETKCTLKSFTVEKGIYQTSNFRVQPTESIVRFPNITNLCPFGEVFNATRFASVYAWNRKRISNCVADYSVLYNSASFSTFKCYGVSPTKLNDLCFTNVYADSFVIRGDEVRQIAPGQTGKIADYNYKLPDDFTGCVIAWNSNNLDSKVGGNYNYLYRLFRKSNLKPFERDISTEIYQAGSTPCNGVEGFNCYFPLQSYGFQPTNGVGYQPYRVVVLSFELLHAPATVCGPKKSTNLVKNKCVNFNFNGLTGTGVLTESNKKFLPFQQFGRDIADTTDAVRDPQTLEILDITPCSFGGVSVITPGTNTSNQVAVLYQDVNCTEVPVAIHADQLTPTWRVYSTGSNVFQTRAGCLIGAEHVNNSYECDIPIGAGICASYQTQTNSPRRARSVASQSIIAYTMSLGAENSVAYSNNSIAIPTNFTISVTTEILPVSMTKTSVDCTMYICGDSTECSNLLLQYGSFCTQLNRALTGIAVEQDKNTQEVFAQVKQIYKTPPIKDFGGFNFSQILPDPSKPSKRSFIEDLLFNKVTLADAGFIKQYGDCLGDIAARDLICAQKFNGLTVLPPLLTDEMIAQYTSALLAGTITSGWWFGAGAALQIPFAMQMAYRFNGIGVTQNVLYENQKLIANQFNSAIGKIQDSLSSTASALGKLQDVVNQNAQALNTLVKQLSSNFGAISSVLNDILSRLDPPEAEVQIDRLITGRLQSLQTYVTQQLIRAAEIRWSANLAATKMSECVLGQSKRVDFCGKGYHLMSFPQSAPHGVVFLHVTYVPAQEKNFTTAPAICHDGKAHFPREGVFVSNGTHWFVTQRNFYEPQIITTDNTFVSGNCDVVIGIVNNTVYDPLQLELDSGGGGSDIIKLLNEQVNKEMQSSNLYMSMSSWCYTHSLDGAGLFLFDHAAEEYEHAKKLIIFLNENNVPVQLTSISAPEHKFEGLTQIFQKAYEHEQHISESINNIVDHAIKSKDHATFNFLQWYVAEQHEEEVLFKDILDKIELIGNENHGLYLADQYVKGIAKSRKS

SEQ ID NO: 8794 - protein, 1315 aa, Artificial Sequence
  SARS-CoV-2/India/1-31/2020__EPI_ISL_413523 spike protein (1-1147)(K986P_V987P_T887W_A1020W) Ferritin construct
MFVFLVLLPLVSSQCVNLTTRTQLPPAYTNSFTRGVYYPDKVFRSSVLHSTQDLFLPFFSNVTWFHAIHVSGTNGTKRFDNPVLPFNDGVYFASTEKSNIIRGWIFGTTLDSKTQSLLIVNNATNVVIKVCEFQFCNDPFLGVYYHKNNKSWMESEFRVYSSANNCTFEYVSQPFLMDLEGKQGNFKNLREFVFKNIDGYFKIYSKHTPINLVRDLPQGFSALEPLVDLPIGINITRFQTLLALHRSYLTPGDSSSGWTAGAAAYYVGYLQPRTFLLKYNENGTITDAVDCALDPLSETKCTLKSFTVEKGIYQTSNFRVQPTESIVRFPNITNLCPFGEVFNATRFASVYAWNRKRISNCVADYSVLYNSASFSTFKCYGVSPTKLNDLCFTNVYADSFVIRGDEVRQIAPGQTGKIADYNYKLPDDFTGCVIAWNSNNLDSKVGGNYNYLYRLFRKSNLKPFERDISTEIYQAGSTPCNGVEGFNCYFPLQSYGFQPTNGVGYQPYRVVVLSFELLHAPATVCGPKKSTNLVKNKCVNFNFNGLTGTGVLTESNKKFLPFQQFGRDIADTTDAVRDPQTLEILDITPCSFGGVSVITPGTNTSNQVAVLYQDVNCTEVPVAIHADQLTPTWRVYSTGSNVFQTRAGCLIGAEHVNNSYECDIPIGAGICASYQTQTNSPRRARSVASQSIIAYTMSLGAENSVAYSNNSIAIPTNFTISVTTEILPVSMTKTSVDCTMYICGDSTECSNLLLQYGSFCTQLNRALTGIAVEQDKNTQEVFAQVKQIYKTPPIKDFGGFNFSQILPDPSKPSKRSFIEDLLFNKVTLADAGFIKQYGDCLGDIAARDLICAQKFNGLTVLPPLLTDEMIAQYTSALLAGTITSGWWFGAGAALQIPFAMQMAYRFNGIGVTQNVLYENQKLIANQFNSVIGKIQDSLSSTASALGKLQDVVNQNAQALNTLVKQLSSNFGAISSVLNDILSRLDPPEAEVQIDRLITGRLQSLQTYVTQQLIRAAEIRWSANLAATKMSECVLGQSKRVDFCGKGYHLMSFPQSAPHGVVFLHVTYVPAQEKNFTTAPAICHDGKAHFPREGVFVSNGTHWFVTQRNFYEPQIITTDNTFVSGNCDVVIGIVNNTVYDPLQPELDSGGGGSDIIKLLNEQVNKEMQSSNLYMSMSSWCYTHSLDGAGLFLFDHAAEEYEHAKKLIIFLNENNVPVQLTSISAPEHKFEGLTQIFQKAYEHEQHISESINNIVDHAIKSKDHATFNFLQWYVAEQHEEEVLFKDILDKIELIGNENHGLYLADQYVKGIAKSRKS

SEQ ID NO: 8795 - protein, 1315 aa, Artificial Sequence
  SARS-CoV-2/Guangdong/GD2020087-P0008/2020__EPI_ISL_413863 spike protein (1-1147)(K986P_V987P_T887W_A1020W) Ferritin construct
MFVFLVLLPLVSSQCVNLTTRTQLPPAYTNSFTRGVYYPDKVFRSSVLHSTQDLFLPFFSNVTWFHAIHVSGTNGTKRFDNPVLPFNDGVYFASTEKSNIIRGWIFGTTLDSKTQSLLIVNNATNVVIKVCEFQFCNDPFLGVYYHKNNKSWMESEFRVYSSANNCTFEYVSQPFLMDLEGKQGNFKNLREFVFKNIDGYFKIYSKHTPINLVRDLPQGFSALEPLVDLPIGINITRFQTLLALHRSYLTPGDSSSGWTAGAAAYYVGYLQPRTFLLKYNENGTITDAVDCALDPLSETKCTLKSFTVEKGIYQTSNFRVQPTESIVRFPNITNLCPFGEVFNATRFASVYAWNRKRISNCVADYSVLYNSASFSTFKCYGVSPTKLNDLCFTNVYADSFVIRGDEVREIAPGQTGKIADYNYKLPDDFTGCVIAWNSNNLDSKVGGNYNYLYRLFRKSNLKPFERDISTEIYQAGSTPCNGVEGFNCYFPLQSYGFQPTNGVGYQPYRVVVLSFELLHAPATVCGPKKSTNLVKNKCVNFNFNGLTGTGVLTESNKKFLPFQQFGRDIADTTDAVRDPQTLEILDITPCSFGGVSVITPGTNTSNQVAVLYQDVNCTEVPVAIHADQLTPTWRVYSTGSNVFQTRAGCLIGAEHVNNSYECDIPIGAGICASYQTQTNSPRRARSVASQSIIAYTMSLGAENSVAYSNNSIAIPTNFTISVTTEILPVSMTKTSVDCTMYICGDSTECSNLLLQYGSFCTQLNRALTGIAVEQDKNTQEVFAQVKQIYKTPPIKDFGGFNFSQILPDPSKPSKRSFIEDLLFNKVTLADAGFIKQYGDCLGDIAARDLICAQKFNGLTVLPPLLTDEMIAQYTSALLAGTITSGWWFGAGAALQIPFAMQMAYRFNGIGVTQNVLYENQKLIANQFNSAIGKIQDSLSSTASALGKLQDVVNQNAQALNTLVKQLSSNFGAISSVLNDILSRLDPPEAEVQIDRLITGRLQSLQTYVTQQLIRAAEIRWSANLAATKMSECVLGQSKRVDFCGKGYHLMSFPQSAPHGVVFLHVTYVPAQEKNFTTAPAICHDGKAHFPREGVFVSNGTHWFVTQRNFYEPQIITTDNTFVSGNCDVVIGIVNNTVYDPLQPELDSGGGGSDIIKLLNEQVNKEMQSSNLYMSMSSWCYTHSLDGAGLFLFDHAAEEYEHAKKLIIFLNENNVPVQLTSISAPEHKFEGLTQIFQKAYEHEQHISESINNIVDHAIKSKDHATFNFLQWYVAEQHEEEVLFKDILDKIELIGNENHGLYLADQYVKGIAKSRKS

SEQ ID NO: 8796 - protein, 1315 aa, Artificial Sequence
  SARS-CoV-2/Sweden/01/2020__EPI_ISL_411951 spike protein (1-1147)(K986P_V987P_T887W_A1020W) Ferritin construct
MFVFLVLLPLVSSQCVNLTTRTQLPPAYTNSFTRGVYYPDKVFRSSVLHSTQDLFLPFFSNVTWFHAIHVSGTNGTKRFDNPVLPFNDGVYFASTEKSNIIRGWIFGTTLDSKTQSLLIVNNATNVVIKVCEFQFCNDPFLGVYYHKNNKSWMESEFRVYSSANNCTFEYVSQPFLMDLEGKQGNFKNLREFVFKNIDGYFKIYSKHTPINLVRDLPQGFSALEPLVDLPIGINITRFQTLLALHRSYLTPGDSSSGWTAGAAAYYVGYLQPRTFLLKYNENGTITDAVDCALDPLSETKCTLKSFTVEKGIYQTSNFRVQPTESIVRFPNITNLCPFGEVFNATRFASVYAWNRKRISNCVADYSVLYNSASFSTFKCYGVSPTKLNDLCFTNVYADSFVIRGDEVRQIAPGQTGKIADYNYKLPDDFTGCVIAWNSNNLDSKVGGNYNYLYRLFRKSNLKPFERDISTEIYQAGSTPCNGVEGFNCYFPLQSYGFQPTNGVGYQPYRVVVLSFELLHAPATVCGPKKSTNLVKNKCVNFNFNGLTGTGVLTESNKKFLPFQQFGRDIADTTDAVRDPQTLEILDITPCSFGGVSVITPGTNTSNQVAVLYQDVNCTEVPVAIHADQLTPTWRVYSTGSNVFQTRAGCLIGAEHVNNSYECDIPIGAGICASYQTQTNSPRRARSVASQSIIAYTMSLGAENSVAYSNNSIAIPTNFTISVTTEILPVSMTKTSVDCTMYICGDSTECSNLLLQYGSFCTQLNRALTGIAVEQDKNTQEVFAQVKQIYKTPPIKDCGGFNFSQILPDPSKPSKRSFIEDLLFNKVTLADAGFIKQYGDCLGDIAARDLICAQKFNGLTVLPPLLTDEMIAQYTSALLAGTITSGWWFGAGAALQIPFAMQMAYRFNGIGVTQNVLYENQKLIANQFNSAIGKIQDSLSSTASALGKLQDVVNQNAQALNTLVKQLSSNFGAISSVLNDILSRLDPPEAEVQIDRLITGRLQSLQTYVTQQLIRAAEIRWSANLAATKMSECVLGQSKRVDFCGKGYHLMSFPQSAPHGVVFLHVTYVPAQEKNFTTAPAICHDGKAHFPREGVFVSNGTHWFVTQRNFYEPQIITTDNTFVSGNCDVVIGIVNNTVYDPLQPELDSGGGGSDIIKLLNEQVNKEMQSSNLYMSMSSWCYTHSLDGAGLFLFDHAAEEYEHAKKLIIFLNENNVPVQLTSISAPEHKFEGLTQIFQKAYEHEQHISESINNIVDHAIKSKDHATFNFLQWYVAEQHEEEVLFKDILDKIELIGNENHGLYLADQYVKGIAKSRKS

SEQ ID NO: 8797 - protein, 1315 aa, Artificial Sequence
  SARS-CoV-2/Tianmen/HBCDC-HB-07/2020__EPI_ISL_412983 spike protein (1-1147)(K986P_V987P_T887W_A1020W) Ferritin construct
MFVFLVLLPLVSSQCVNLTTRTQLPPAYTNSFTRGVYYPDKVFRSSVLHSTQDLFLPFFSNVTWFHAIHVSGTNGTKRFDNPVLPFNDGVYFASTEKSNIIRGWIFGTTLDSKTQSLLIVNNATNVVIKVCEFQFCNDPFLGVYYHKNNKSWMESEFRVYSSANNCTFEYVSQPFLMDLEGKQGNFKNLREFVFKNIDGYFKIYSKHTPINLVRDLPQGFSALEPLVDLPIGINITRFQTLLALHRSYLTPGDSSSGWTAGAAAYYVGYLQPRTFLLKYNENGTITDAVDCALDPLSETKCTLKSFTVEKGIYQTSNFRVQPTESIVRFPNITNLCPFGEVFNATRFASVYAWNRKRISNCVADYSVLYNSASFSTFKCYGVSPTKLNDLCFTNVYADSFVIRGDEVRQIAPGQTGKIADYNYKLPDDFTGCVIAWNSNNLDSKVGGNYNYLYRLFRKSNLKPFERDISTEIYQAGSTPCNGVEGFNCYFPLQSYGFQPTNGVGYQPYRVVVLSFELLHAPATVCGPKKSTNLVKNKCVNFNFNGLTGTGVLTESNKKFLPFQQFGRDIADTTDAVRDPQTLEILDITPCSFGGVSVITPGTNTSNQVAVLYQDLNCTEVPVAIHADQLTPTWRVYSTGSNVFQTRAGCLIGAEHVNNSYECDIPIGAGICASYQTQTNSPRRARSVASQSIIAYTMSLGAENSVAYSNNSIAIPTNFTISVTTEILPVSMTKTSVDCTMYICGDSTECSNLLLQYGSFCTQLNRALTGIAVEQDKNTQEVFAQVKQIYKTPPIKDFGGFNFSQILPDPSKPSKRSFIEDLLFNKVTLADAGFIKQYGDCLGDIAARDLICAQKFNGLTVLPPLLTDEMIAQYTSALLAGTITSGWWFGAGAALQIPFAMQMAYRFNGIGVTQNVLYENQKLIANQFNSAIGKIQDSLSSTASALGKLQDVVNQNAQALNTLVKQLSSNFGAISSVLNDILSRLDPPEAEVQIDRLITGRLQSLQTYVTQQLIRAAEIRWSANLAATKMSECVLGQSKRVDFCGKGYHLMSFPQSAPHGVVFLHVTYVPAQEKNFTTAPAICHDGKAHFPREGVFVSNGTHWFVTQRNFYEPQIITTDNTFVSGNCDVVIGIVNNTVYDPLQPELDSGGGGSDIIKLLNEQVNKEMQSSNLYMSMSSWCYTHSLDGAGLFLFDHAAEEYEHAKKLIIFLNENNVPVQLTSISAPEHKFEGLTQIFQKAYEHEQHISESINNIVDHAIKSKDHATFNFLQWYVAEQHEEEVLFKDILDKIELIGNENHGLYLADQYVKGIAKSRKS

SEQ ID NO: 8798 - protein, 1315 aa, Artificial Sequence
  SARS-CoV-2/Hong Kong/case42_VM20002493/2020__EPI_ISL_414527 spike protein (1-1147)(K986P_V987P_T887W_A1020W) Ferritin construct
MFVFLVLLPLVSSQCVNLTTRTQLPPAYTNSFTRGVYYPDKVFRSSVLHSTQDLFLPFFSNVTWFHAIHVSGTNGTKRFDNPVLPFNDGVYFASTEKSNIIRGWIFGTTLDSKTQSLLIVNNATNVVIKVCEFQFCNDPFLGVYYHKNNKSWMESEFRVYSSANNCTFEYVSQPFLMDLEGKQGNFKNLREFVFKNIDGYFKIYSKHTPINLVRDLPQGFSALEPLVDLPIGINITRFQTLLALHRSYLTPGDSSSGWTAGAAAYYVGYLQPRTFLLKYNENGTITDAVDCALDPLSETKCTLKSFTVEKGIYQTSNFRVQPTESIVRFPNITNLCPFGEVFNATRFASVYAWNRKRISNCVADYSVLYNSASFSTFKCYGVSPTKLNDLCFTNVYADSFVIRGDEVRQIAPGQTGKIADYNYKLPDDFTGCVIAWNSNNLDSKVGGNYNYLYRLFRKSNLKPFERDISTEIYQAGSTPCNGVEGFNCYFPLQSYGFQPTNGVGYQPYRVVVLSFELLHAPATVCGPKKSTNLVKNKCVNFNFNGLTGTGVLTESNKKFLPFQQFGRDIADTTDAVRDPQTLEILDITPCSFGGVSVITPGTNTSNQVAVLYQDVNCTEVPVAIHADQLTPTWRVYSTGSNVFQTRAGCLIGAEHVNNSYECDIPIGAGICASYQTQTNSPRRARSVASQSIIAYTMSLGAENSVAYSNNSIAIPTNFAISVTTEILPVSMTKTSVDCTMYICGDSTECSNLLLQYGSFCTQLNRALTGIAVEQDKNTQEVFAQVKQIYKTPPIKDFGGFNFSQILPDPSKPSKRSFIEDLLFNKVTLADAGFIKQYGDCLGDIAARDLICAQKFNGLTVLPPLLTDEMIAQYTSALLAGTITSGWWFGAGAALQIPFAMQMAYRFNGIGVTQNVLYENQKLIANQFNSAIGKIQDSLSSTASALGKLQDVVNQNAQALNTLVKQLSSNFGAISSVLNDILSRLDPPEAEVQIDRLITGRLQSLQTYVTQQLIRAAEIRWSANLAATKMSECVLGQSKRVDFCGKGYHLMSFPQSAPHGVVFLHVTYVPAQEKNFTTAPAICHDGKAHFPREGVFVSNGTHWFVTQRNFYEPQIITTDNTFVSGNCDVVIGIVNNTVYDPLQPELDSGGGGSDIIKLLNEQVNKEMQSSNLYMSMSSWCYTHSLDGAGLFLFDHAAEEYEHAKKLIIFLNENNVPVQLTSISAPEHKFEGLTQIFQKAYEHEQHISESINNIVDHAIKSKDHATFNFLQWYVAEQHEEEVLFKDILDKIELIGNENHGLYLADQYVKGIAKSRKS

SEQ ID NO: 8799 - protein, 1315 aa, Artificial Sequence
  SARS-CoV-2/USA/CruiseA-23/2020__EPI_ISL_414482 spike protein (1-1147)(K986P_V987P_T887W_A1020W) Ferritin construct
MFVFLVLLPLVSSQCVNLTTRTQLPPAYTNSFTRGVYYPDKVFRSSVLHSTQDLFLPFFSNVTWFHAIHVSGTNGTKRFDNPVLPFNDGVYFASTEKSNIIRGWIFGTTLDSKTQSLLIVNNATNVVIKVCEFQFCNDPFLGVYYHKNNKSWMESEFRVYSSANNCTFEYVSQPFLMDLEVKQGNFKNLREFVFKNIDGYFKIYSKHTPINLVRDLPQGFSALEPLVDLPIGINITRFQTLLALHRSYLTPGDSSSGWTAGAAAYYVGYLQPRTFLLKYNENGTITDAVDCALDPLSETKCTLKSFTVEKGIYQTSNFRVQPTESIVRFPNITNLCPFGEVFNATRFASVYAWNRKRISNCVADYSVLYNSASFSTFKCYGVSPTKLNDLCFTNVYADSFVIRGDEVRQIAPGQTGKIADYNYKLPDDFTGCVIAWNSNNLDSKVGGNYNYLYRLFRKSNLKPFERDISTEIYQAGSTPCNGVEGFNCYFPLQSYGFQPTNGVGYQPYRVVVLSFELLHAPATVCGPKKSTNLVKNKCVNFNFNGLTGTGVLTESNKKFLPFQQFGRDIADTTDAVRDPQTLEILDITPCSFGGVSVITPGTNTSNQVAVLYQDVNCTEVPVAIHADQLTPTWRVYSTGSNVFQTRAGCLIGAEHVNNSYECDIPIGAGICASYQTQTNSPRRARSVASQSIIAYTMSLGAENSVAYSNNSIAIPTNFTISVTTEILPVSMTKTSVDCTMYICGDSTECSNLLLQYGSFCTQLNRALTGIAVEQDKNTQEVFAQVKQIYKTPPIKDFGGFNFSQILPDPSKPSKRSFIEDLLFNKVTLADAGFIKQYGDCLGDIAARDLICAQKFNGLTVLPPLLTDEMIAQYTSALLAGTITSGWWFGAGAALQIPFAMQMAYRFNGIGVTQNVLYENQKLIANQFNSAIGKIQDSLSSTASALGKLQDVVNQNAQALNTLVKQLSSNFGAISSVLNDILSRLDPPEAEVQIDRLITGRLQSLQTYVTQQLIRAAEIRWSANLAATKMSECVLGQSKRVDFCGKGYHLMSFPQSAPHGVVFLHVTYVPAQEKNFTTAPAICHDGKAHFPREGVFVSNGTHWFVTQRNFYEPQIITTDNTFVSGNCDVVIGIVNNTVYDPLQPELDSGGGGSDIIKLLNEQVNKEMQSSNLYMSMSSWCYTHSLDGAGLFLFDHAAEEYEHAKKLIIFLNENNVPVQLTSISAPEHKFEGLTQIFQKAYEHEQHISESINNIVDHAIKSKDHATFNFLQWYVAEQHEEEVLFKDILDKIELIGNENHGLYLADQYVKGIAKSRKS

SEQ ID NO: 8800 - protein, 1315 aa, Artificial Sequence
  SARS-CoV-2/Hong Kong/case85_VM20002868/2020__EPI_ISL_414519 spike protein (1-1147)(K986P_V987P_T887W_A1020W) Ferritin construct
MFVFLVLVPLVSSQCVNLTTRTQLPPAYTNSFTRGVYYPDKVFRSSVLHSTQDLFLPFFSNVTWFHAIHVSGTNGTKRFDNPVLPFNDGVYFASTEKSNIIRGWIFGTTLDSKTQSLLIVNNATNVVIKVCEFQFCNDPFLGVYYHKNNKSWMESEFRVYSSANNCTFEYVSQPFLMDLEGKQGNFKNLREFVFKNIDGYFKIYSKHTPINLVRDLPQGFSALEPLVDLPIGINITRFQTLLALHRSYLTPGDSSSGWTAGAAAYYVGYLQPRTFLLKYNENGTITDAVDCALDPLSETKCTLKSFTVEKGIYQTSNFRVQPTESIVRFPNITNLCPFGEVFNATRFASVYAWNRKRISNCVADYSVLYNSASFSTFKCYGVSPTKLNDLCFTNVYADSFVIRGDEVRQIAPGQTGKIADYNYKLPDDFTGCVIAWNSNNLDSKVGGNYNYLYRLFRKSNLKPFERDISTEIYQAGSTPCNGVEGFNCYFPLQSYGFQPTNGVGYQPYRVVVLSFELLHAPATVCGPKKSTNLVKNKCVNFNFNGLTGTGVLTESNKKFLPFQQFGRDIADTTDAVRDPQTLEILDITPCSFGGVSVITPGTNTSNQVAVLYQDVNCTEVPVAIHADQLTPTWRVYSTGSNVFQTRAGCLIGAEHVNNSYECDIPIGAGICASYQTQTNSPRRARSVASQSIIAYTMSLGAENSVAYSNNSIAIPTNFTISVTTEILPVSMTKTSVDCTMYICGDSTECSNLLLQYGSFCTQLNRALTGIAVEQDKNTQEVFAQVKQIYKTPPIKDFGGFNFSQILPDPSKPSKRSFIEDLLFNKVTLADAGFIKQYGDCLGDIAARDLICAQKFNGLTVLPPLLTDEMIAQYTSALLAGTITSGWWFGAGAALQIPFAMQMAYRFNGIGVTQNVLYENQKLIANQFNSAIGKIQDSLSSTASALGKLQDVVNQNAQALNTLVKQLSSNFGAISSVLNDILSRLDPPEAEVQIDRLITGRLQSLQTYVTQQLIRAAEIRWSANLAATKMSECVLGQSKRVDFCGKGYHLMSFPQSAPHGVVFLHVTYVPAQEKNFTTAPAICHDGKAHFPREGVFVSNGTHWFVTQRNFYEPQIITTDNTFVSGNCDVVIGIVNNTVYDPLQPELDSGGGGSDIIKLLNEQVNKEMQSSNLYMSMSSWCYTHSLDGAGLFLFDHAAEEYEHAKKLIIFLNENNVPVQLTSISAPEHKFEGLTQIFQKAYEHEQHISESINNIVDHAIKSKDHATFNFLQWYVAEQHEEEVLFKDILDKIELIGNENHGLYLADQYVKGIAKSRKS

SEQ ID NO: 8801 - protein, 1315 aa, Artificial Sequence; identical to SEQ ID NO: 8791
  SARS-CoV-2/England/200990660/2020__EPI_ISL_414523 spike protein (1-1147)(K986P_V987P_T887W_A1020W) Ferritin construct

SEQ ID NO: 8802 - protein, 1315 aa, Artificial Sequence
  SARS-CoV-2/Australia/NSW09/2020__EPI_ISL_413595 spike protein (1-1147)(K986P_V987P_T887W_A1020W) Ferritin construct
MFVFLVLLPLVSSQCVNLTTRTQLPPAYTNSFTRGVYYPDKVFRSSVLHSTQDLFLPFFSNVTWFHAIHVSGTNGTKRFDNPVLPFNDGVYFASTEKSNIIRGWIFGTTLDSKTQSLLIVNNATNVVIKVCEFQFCNDPFLGVYYHKNNKSWMESEFRVYSSANNCTFEYVSQPFLMDLEGKQGNFKNLREFVFKNIDGYFKIYSKHTPINLVRDLPQGFSALEPLVDLPIGINITRFQTLLALHRSYLTPGDSSSGWTAGAAAYYVGYLQPRTFLLKYNENGTITDAVDCALDPLSETKCTLKSFTVEKGIYQTSNFRVQPTESIVRFPNITNLCPFGEVFNATRFASVYAWNRKRISNCVADYSVLYNSASFSTFKCYGVSPTKLNDLCFTNVYADSFVIRGDEVRQIAPGQTGKIADYNYKLPDDFTGCVIAWNSNNLDSKVGGNYNYLYRLFRKSNLKPFERDISTEIYQAGSTPCNGVEGFNCYFPLQSYGFQPTNGVGYQPYRVVVLSFELLHAPATVCGPKKSTNLVKNKCVNFNFNGLTGTGVLTESNKKFLPFQQFGRDIADTTDAVRDPQTLEILDITPCSFGGVSVITPGTNTSNQVAVLYQDVNCTEVPVAIHADQLTPTWRVYSTGSNVFQTRAGCLIGAEHVNNSYECDIPIGAGICASYQTQTNSPRRARSVASQSIIAYTMSLGAENSVAYSNNSIAIPTNFTISVTTEILPVSMTKTSVDCTMYICGDSTECSNLLLQYGSFCTQLNRALTGIAVEQDKNTQEVFAQVKQIYKTPPIKDFGGFNFSQILPDPSKPSKRSFIEDLLFNKVTLADAGFIKQYGDCLGDIAARDLICAQKFNGLTVLPPLLTDEMIAQYTSALLAGTITSGWWFGAGAALQIPFAMQMAYRFNGIGVTQNVLYENQKLIANQFNSAIGKIQDSLSFTASALGKLQDVVNQNAQALNTLVKQLSSNFGAISSVLNDILSRLDPPEAEVQIDRLITGRLQSLQTYVTQQLIRAAEIRWSANLAATKMSECVLGQSKRVDFCGKGYHLMSFPQSAPHGVVFLHVTYVPAQEKNFTTAPAICHDGKAHFPREGVFVSNGTHWFVTQRNFYEPQIITTDNTFVSGNCDVVIGIVNNTVYDPLQPELDSGGGGSDIIKLLNEQVNKEMQSSNLYMSMSSWCYTHSLDGAGLFLFDHAAEEYEHAKKLIIFLNENNVPVQLTSISAPEHKFEGLTQIFQKAYEHEQHISESINNIVDHAIKSKDHATFNFLQWYVAEQHEEEVLFKDILDKIELIGNENHGLYLADQYVKGIAKSRKS

SEQ ID NO: 8803 - protein, 1315 aa, Artificial Sequence; identical to SEQ ID NO: 8783
  SARS-CoV-2/Australia/NSW10/2020__EPI_ISL_413596 spike protein (1-1147)(K986P_V987P_T887W_A1020W) Ferritin construct

SEQ ID NO: 8804 - protein, 1315 aa, Artificial Sequence
  SARS-CoV-2/Switzerland/1000477797/2020__EPI_ISL_413023 spike protein (1-1147)(K986P_V987P_T887W_A1020W) Ferritin construct
MFVFLVLLPLVSSQCVNLTTRTQLPPAYTNSFTRGVYYPDKVFRSSVLHSTQDLFLPFFSNVTWFHAIHVSGTNGTKRFDNPVLPFNDGVYFASTEKSNIIRGWIFGTTLDSKTQSLLIVNNATNVVIKVCEFQFCNDPFLGVYYHKNNKSWMESEFRVYSSANNCTFEYVSQPFLMDLEGKQGNFKNLREFVFKNIDGYFNIYSKHTPINLVRDLPQGFSALEPLVDLPIGINITRFQTLLALHRSYLTPGDSSSGWTAGAAAYYVGYLQPRTFLLKYNENGTITDAVDCALDPLSETKCTLKSFTVEKGIYQTSNFRVQPTESIVRFPNITNLCPFGEVFNATRFASVYAWNRKRISNCVADYSVLYNSASFSTFKCYGVSPTKLNDLCFTNVYADSFVIRGDEVRQIAPGQTGKIADYNYKLPDDFTGCVIAWNSNNLDSKVGGNYNYLYRLFRKSNLKPFERDISTEIYQAGSTPCNGVEGFNCYFPLQSYGFQPTNGVGYQPYRVVVLSFELLHAPATVCGPKKSTNLVKNKCVNFNFNGLTGTGVLTESNKKFLPFQQFGRDIADTTDAVRDPQTLEILDITPCSFGGVSVITPGTNTSNQVAVLYQGVNCTEVPVAIHADQLTPTWRVYSTGSNVFQTRAGCLIGAEHVNNSYECDIPIGAGICASYQTQTNSPRRARSVASQSIIAYTMSLGAENSVAYSNNSIAIPTNFTISVTTEILPVSMTKTSVDCTMYICGDSTECSNLLLQYGSFCTQLNRALTGIAVEQDKNTQEVFAQVKQIYKTPPIKDFGGFNFSQILPDPSKPSKRSFIEDLLFNKVTLADAGFIKQYGDCLGDIAARDLICAQKFNGLTVLPPLLTDEMIAQYTSALLAGTITSGWWFGAGAALQIPFAMQMAYRFNGIGVTQNVLYENQKLIANQFNSAIGKIQDSLSSTASALGKLQDVVNQNAQALNTLVKQLSSNFGAISSVLNDILSRLDPPEAEVQIDRLITGRLQSLQTYVTQQLIRAAEIRWSANLAATKMSECVLGQSKRVDFCGKGYHLMSFPQSAPHGVVFLHVTYVPAQEKNFTTAPAICHDGKAHFPREGVFVSNGTHWFVTQRNFYEPQIITTDNTFVSGNCDVVIGIVNNTVYDPLQPELDSGGGGSDIIKLLNEQVNKEMQSSNLYMSMSSWCYTHSLDGAGLFLFDHAAEEYEHAKKLIIFLNENNVPVQLTSISAPEHKFEGLTQIFQKAYEHEQHISESINNIVDHAIKSKDHATFNFLQWYVAEQHEEEVLFKDILDKIELIGNENHGLYLADQYVKGIAKSRKS

SEQ ID NO: 8805 - protein, 1315 aa, Artificial Sequence
  SARS-CoV-2/Belgium/BA-02291/2020__EPI_ISL_415159 spike protein (1-1147)(K986P_V987P_T887W_A1020W) Ferritin construct
MFVFLVLLPLVSSQCVNLTTRTQLPPAYTNSFTRGVYYPDKVFRSSVLHSTQDLFLPFFSNVTWFHAIHVSGTNGTKRFDNPVLPFNDGVYFASTEKSNIIRGWIFGTTLDSKTQSLLIVNNATNVVIKVCEFQFCNDPFLGVYYHKNNKSWMESEFRVYSSANNCTFEYVSQPFLMDLEGKQGNFKNLREFVFKNIDGYFKIYSKHTPINLVRDLPQGFSALEPLVDLPIGINITRFQTLLALHRSYLTPGDSSSGWTAGAAAYYVGYLQPRTFLLKYNENGTITDAVDCALDPLSETKCTLKSFTVEKGIYQTSNFRVQPTESIVRFPNITNLCPFGEVFNATRFASVYAWNRKRISNCVADYSVLYNSASFSTFKCYGVSPTKLNDLCFTNVYADSFVIRGDEVRQIAPGQTGKIADYNYKLPDDFTGCVIAWNSNNLDSKVGGNYNYLYRLFRRSNLKPFERDISTEIYQAGSTPCNGVEGFNCYFPLQSYGFQPTNGVGYQPYRVVVLSFELLPAPATVCGPKKSTNLVKNKCVNFNFNGLTGTGVLTESNKKFLPFQQFGRDIADTTDAVRDPQTLEILDITPCSFGGVSVITPGTNTSNQVAVLYQGVNCTEVPVAIHADQLTPTWRVYSTGSNVFQTRAGCLIGAEHVNNSYECDIPIGAGICASYQTQTNSPRRARSVASQSIIAYTMSLGAENSVAYSNNSIAIPTNFTISVTTEILPVSMTKTSVDCTMYICGDSTECSNLLLQYGSFCTQLNRALTGIAVEQDKNTQEVFAQVKQIYKTPPIKDFGGFNFSQILPDPSKPSKRSFIEDLLFNKVTLADAGFIKQYGDCLGDIAARDLICAQKFNGLTVLPPLLTDEMIAQYTSALLAGTITSGWWFGAGAALQIPFAMQMAYRFNGIGVTQNVLYENQKLIANQFNSAIGKIQDSLSSAAPALGKLQDVVNQNAQALNTLVKQLSSNFGAISSVLNDILSRLDPPEAEVQIDRLITGRLQSLQTYVTQQLIRAAEIRWSANLAATKMSECVLGQSKRVDFCGKGYHLMSFPQSAPHGVVFLHVTYVPAQEKNFTTAPAICHDGKAHFPREGVFVSNGTHWFVTQRNFYEPQIITTDNTFVSGNCDVVIGIVNNTVYDPLQPELDSGGGGSDIIKLLNEQVNKEMQSSNLYMSMSSWCYTHSLDGAGLFLFDHAAEEYEHAKKLIIFLNENNVPVQLTSISAPEHKFEGLTQIFQKAYEHEQHISESINNIVDHAIKSKDHATFNFLQWYVAEQHEEEVLFKDILDKIELIGNENHGLYLADQYVKGIAKSRKS

SEQ ID NO: 8806 - protein, 1315 aa, Artificial Sequence
  SARS-CoV-2/USA/WA8-UW5/2020__EPI_ISL_413486 spike protein (1-1147)(K986P_V987P_T887W_A1020W) Ferritin construct
MFVFLVLLPLVSSQCVNLTTRTQLPPAYTNSFTRGVYYPDKVFRSSVLHSTQDLFLPFFSNVTWFHAIHVSGTNGTKRFDNPVLPFNDGVYFASTEKSNIIRGWIFGTTLDSKTQSLLIVNNATNVVIKVCEFQFCNDPFLGVYYHKNNKSWMESEFRVYSSANNCTFEYVSQPFLMDLEGKQGNFKNLREFVFKNIDGYFKIYSKHTPINLVRDLPQGFSALEPLVDLPIGINITRFQTLLALHRSYLTPGDSSSGWTAGAAAYYVGYLQPRTFLLKYNENGTITDAVDCALDPLSETKCTLKSFTVEKGIYQTSNFRVQPTESIVRFPNITNLCPFGEVFNATRFASVYAWNRKRISNCVADYSVLYNSASFSTFKCYGVSPTKLNDLCFTNVYADSFVIRGDEVRQIAPGQTGKIADYNYKLPDDFTGCVIAWNSNNLDSKVGGNYNYLYRLFRKSNLKPFERDISTEIYQAGSTPCNGVEGFNCYFPLQSYGFQPTNGVGYQPYRVVVLSFELLHAPATVCGPKKSTNLVKNKCVNFNFNGLTGTGVLTESNKKFLPFQQFGRDIADTTDAVRDPQTLEILDITPCSFGGVSVITPGTNTSNQVAVLYQDVNCTEVPVAIHADQLTPTWRVYSTGSNVFQTRAGCLIGAEYVNNSYECDIPIGAGICASYQTQTNSPRRARSVASQSIIAYTMSLGAENSVAYSNNSIAIPTNFTISVTTEILPVSMTKTSVDCTMYICGDSTECSNLLLQYGSFCTQLNRALTGIAVEQDKNTQEVFAQVKQIYKTPPIKDFGGFNFSQILPDPSKPSKRSFIEDLLFNKVTLADAGFIKQYGDCLGDIAARDLICAQKFNGLTVLPPLLTDEMIAQYTSALLAGTITSGWWFGAGAALQIPFAMQMAYRFNGIGVTQNVLYENQKLIANQFNSAIGKIQDSLSSTASALGKLQDVVNQNAQALNTLVKQLSSNFGAISSVLNDILSRLDPPEAEVQIDRLITGRLQSLQTYVTQQLIRAAEIRWSANLAATKMSECVLGQSKRVDFCGKGYHLMSFPQSAPHGVVFLHVTYVPAQEKNFTTAPAICHDGKAHFPREGVFVSNGTHWFVTQRNFYEPQIITTDNTFVSGNCDVVIGIVNNTVYDPLQPELDSGGGGSDIIKLLNEQVNKEMQSSNLYMSMSSWCYTHSLDGAGLFLFDHAAEEYEHAKKLIIFLNENNVPVQLTSISAPEHKFEGLTQIFQKAYEHEQHISESINNIVDHAIKSKDHATFNFLQWYVAEQHEEEVLFKDILDKIELIGNENHGLYLADQYVKGIAKSRKS

SEQ ID NO: 8807 - protein, 1315 aa, Artificial Sequence
  SARS-CoV-2/England/20102000506/2020__EPI_ISL_415147 spike protein (1-1147)(K986P_V987P_T887W_A1020W) Ferritin construct
MFVFLVLLPLVSSQCVNLTTRTQLPPAYTNSFTRGVYYPDKVFRSSVLHSTQDLFLPFFSNVTWFHAIHVSGTNGTKRFDNPVLPFNDGVYFASTEKSNIIRGWIFGTTLDSKTQSLLIVNNATNVVIKVCEFQFCNDPFLGVYYHKNNKSWMESEFRVYSSANNCTFEYVSQPFLMDLEGKQGNFKNLREFVFKNIDGYFKIYSKHTPINLVRDLPQGFSALEPLVDLPIGINITRFQTLLALHRSYLTPGDSSSGWTAGAAAYYVGYLQPRTFLLKYNENGTITDAVDCALDPLSETKCTLKSFTVEKGIYQTSNFRVQPTESIVRFPNITNLCPFGEVFNATRFASVYAWNRKRISNCVADYSVLYNSASFSTFKCYGVSPTKLNDLCFTNVYADSFVIRGDEVRQIAPGQTGKIADYNYKLPDDFTGCVIAWNSNNLDSKVGGNYNYLYRLFRKSNLKPFERDISTEIYQAGSTPCNGVEGFNCYFPLQSYGFQPTNGVGYQPYRVVVLSFELLHAPATVCGPKKSTNLVKNKCVNFNFNGLTGTGVLTESNKKFLPFQQFGRDIADTTDAVRDPQTLEILDITPCSFGGVSVITPGTNTSNQVAVLYQGVNCTEVPVAIHADQLTPTWRVYSTGSNVFQTRAGCLIGAEHVNNSYECDIPIGAGICASYQTQTNSPRRARSVASQSIIAYTMSLGAENSVAYSNNSIAIPTNFTISVTTEILPVSMTKTSVDCTMYICGDSTECSNLLLQYGSFCTQLNRALTGIAVEQDKNTQEVFAQVKQIYKTPPIKDFGGFNFSQILPDPSKPSKRSFIEDLLFNKVTLADAGFIKQYGYCLGDIAARDLICAQKFNGLTVLPPLLTDEMIAQYTSALLAGTITSGWWFGAGAALQIPFAMQMAYRFNGIGVTQNVLYENQKLIANQFNSAIGKIQDSLSSTASALGKLQDVVNQNAQALNTLVKQLSSNFGAISSVLNDILSRLDPPEAEVQIDRLITGRLQSLQTYVTQQLIRAAEIRWSANLAATKMSECVLGQSKRVDFCGKGYHLMSFPQSAPHGVVFLHVTYVPAQEKNFTTAPAICHDGKAHFPREGVFVSNGTHWFVTQRNFYEPQIITTDNTFVSGNCDVVIGIVNNTVYDPLQPELDSGGGGSDIIKLLNEQVNKEMQSSNLYMSMSSWCYTHSLDGAGLFLFDHAAEEYEHAKKLIIFLNENNVPVQLTSISAPEHKFEGLTQIFQKAYEHEQHISESINNIVDHAIKSKDHATFNFLQWYVAEQHEEEVLFKDILDKIELIGNENHGLYLADQYVKGIAKSRKS

SEQ ID NO: 8808 - protein, 1315 aa, Artificial Sequence
  SARS-CoV-2/Belgium/VAG-03013/2020__EPI_ISL_415155 spike protein (1-1147)(K986P_V987P_T887W_A1020W) Ferritin construct
MFVFLVLLPLVSSQCVNLTTRTQLPPAYTNSFTRGVYYPDKVFRSSVLHSTQDLFLPFFSNVTWFHAIHVSGTNGTKRFDNPVLPFNDGVYFASTEKSNIIRGWIFGTTLDSKTQSLLIVNNATNVVIKVCEFQFCNDPFLGVYYHKNNKSWMESEFRVYSSANNCTFEYVSQPFLMDLEGKQGNFKNLREFVFKNIDGYFKIYSKHTPINLVRDLPQGFSALEPLVDLPIGINITRFQTLLALHRSYLTPGDSSSGWTAGAAAYYVGYLQPRTFLLKYNENGTITDAVDCALDPLSETKCTLKSFTVEKGIYQTSNFRVQPTESIVRFPNITNLCPFGEVFNATRFASVYAWNRKRISNCVADYSVLYNSASFSTFKCYGVSPTKLNDLCFTNVYADSFVIRGDEVRQIAPGQTGKIADYNYKLPDDFTGCVIAWNSNNLDSKVGGNYNYLYRLFRKSNLKPFERDISTEIYQAGSTPCNGVEGFNCYFPLQSYGFQPTNGVGYQPYRVVVLSFELLHAPATVCGPKKSTNLVKNKCVNFNFNGLTGTGVLTESNKKFLPFQQFGRDIADTTDAVRDPQTLEILDITPCSFGGVSVITPGTNTSNQVAVLYQGVNCTEVPVAIHADQLTPTWRVYSTGSNVFQTRAGCLIGAEHVNNSYECDIPIGAGICASYQTQTNSPRRARSVASQSIIAYTMSLGAENSVAYSNNSIAIPTNFTISVTTEILPVSMTKTSVDCTMYICGDSTECSNLLLQYGSFCTQLNRALTGIAVEQDKNTQEVFAQVKQIYKTPPIKDFGGFNFSQILPDPSKPSKRSFIEDLLFNKVTLADAGFIKQYGDCLGDIAARDLICAQKFNGLTVLPPLLTDEMIAQYTSALLAGTITSGWWFGAGAALQIPFAMQMAYRFNGIGVTQNVLYENQKLIANQFNSAIGKIQDSLSSTATALGKLQDVVNQNAQALNTLVKQLSSNFGAISSVLNDILSRLDPPEAEVQIDRLITGRLQSLQTYVTQQLIRAAEIRWSANLAATKMSECVLGQSKRVDFCGKGYHLMSFPQSAPHGVVFLHVTYVPAQEKNFTTAPAICHDGKAHFPREGVFVSNGTHWFVTQRNFYEPQIITTDNTFVSGNCDVVIGIVNNTVYDPLQPELDSGGGGSDIIKLLNEQVNKEMQSSNLYMSMSSWCYTHSLDGAGLFLFDHAAEEYEHAKKLIIFLNENNVPVQLTSISAPEHKFEGLTQIFQKAYEHEQHISESINNIVDHAIKSKDHATFNFLQWYVAEQHEEEVLFKDILDKIELIGNENHGLYLADQYVKGIAKSRKS

SEQ ID NO: 8809 - protein, 1315 aa, Artificial Sequence
  SARS-CoV-2/Belgium/BC-03016/2020__EPI_ISL_415157 spike protein (1-1147)(K986P_V987P_T887W_A1020W) Ferritin construct
MFVFLVLLPLVSSQCVNLTTRTQLPPAYTNSFTRGVYYPDKVFRSSVLHSTQDLFLPFFSNVTWFHAIHVSGTNGTKRFDNPVLPFNDGVYFASTEKSNIIRGWIFGTTLDSKTQSLLIVNNATNVVIKVCEFQFCNDPFLGVYYHKNNKSWMESEFRVYSSANNCTFEYVSQPFLMDLEGKQGNFKNLREFVFKNIDGYFKIYSKHTPINLVRDLPQGFSALEPLVDLPIGINITRFQTLLALHRSYLTPGDSSSGWTAGAAAYYVGYLQPRTFLLKYNENGTITDAVDCALDPLSETKCTLKSFTVEKGIYQTSNFRVQPTESIVRFPNITNLCPFGEVFNATRFASVYAWNRKRISNCVADYSVLYNSASFSTFKCYGVSPTKLNDLCFTNVYADSFVIRGDEVRQIAPGQTGKIADYNYKLPDDFTGCVIAWNSNNLDSKVGGNYNYLYRLFRKSNLKPFERDISTEIYQAGSTPCNGVEGFNCYFPLQSYGFQPTNGVGYQPYRVVVLSFELLHAPATVCGPKKSTNLVKNKCVNFNFNGLTGTGVLTESNKKFLPFQQFGRDIADTTDAVRDPQTLEILDITPCSFGGVSVITPGTNTSNQVAVLYQGVNCTEVPVAIHADQLTPTWRVYSTGSNVFQTRAGCLIGAEHVNNSYECDIPIGAGICASYQTQTNSPRRARSVASQSIIAYTMSLGAENSVAYSNNSIAIPTNFTISVTTEILPVSMTKTSVDCTMYICGDSTECSNLLLQYGSFCTQLNRALTGIAVEQDKNTQEVFAQVKQIYKTPPIKDFGGFNFSQILPDPSKPSKRSFIEDLLFNKVTLADAGFIKQYGDCLGDIAARDLICAQKFNGLTVLPPLLTDEMIAQYTSALLAGTITSGWWFGAGAALQIPFAMQMAYRFNGIGVTQNVLYENQKLIANQFNSAIGKIQDSLSSTAPALGKLQDVVNQNAQALNTLVKQLSSNFGAISSVLNDILSRLDPPEAEVQIDRLITGRLQSLQTYVTQQLIRAAEIRWSANLAATKMSECVLGQSKRVDFCGKGYHLMSFPQSAPHGVVFLHVTYVPAQEKNFTTAPAICHDGKAHFPREGVFVSNGTHWFVTQRNFYEPQIITTDNTFVSGNCDVVIGIVNNTVYDPLQPELDSGGGGSDIIKLLNEQVNKEMQSSNLYMSMSSWCYTHSLDGAGLFLFDHAAEEYEHAKKLIIFLNENNVPVQLTSISAPEHKFEGLTQIFQKAYEHEQHISESINNIVDHAIKSKDHATFNFLQWYVAEQHEEEVLFKDILDKIELIGNENHGLYLADQYVKGIAKSRKS

SEQ ID NO: 8810 - protein, 1315 aa, Artificial Sequence
  SARS-CoV-2/Germany/BavPat3/2020__EPI_ISL_414521 spike protein (1-1147)(K986P_V987P_T887W_A1020W) Ferritin construct
MFVFLVLLPLVSSQCVNLTTRTQLPPAYTNSFTRGVYYPDKVFRSSVLHSTQDLFLPFFSNVTWFHAIHVSGTNGTKRFDNPVLPFNDGVYFASTEKSNIIRGWIFGTTLDSKTQSLLIVNNATNVVIKVCEFQFCNDPFLGVYYHKNNKSWMESEFRVYSSANNCTFEYVSQPFLMDLEGKQGNFKNLREFVFKNIDGYFKIYSKHTPINLVRDLPQGFSALEPLVDLPIGINITRFQTLLALHRSYLTPGDSSSGWTAGAAAYYVGYLQPRTFLLKYNENGTITDAVDCALDPLSETKCTLKSFTVEKGIYQTSNFRVQPTESIVRFPNITNLCPFGEVFNATRFASVYAWNRKRISNCVADYSVLYNSASFSTFKCYGVSPTKLNDLCFTNVYADSFVIRGDEVRQIAPGQTGKIADYNYKLPDDFTGCVIAWNSNNLDSKVGGNYNYLYRLFRKSNLKPFERDISTEIYQAGSTPCNGVEGFNCYFPLQSYGFQPTNGVGYQPYRVVVLSFELLHAPATVCGPKKSTNLVKNKCVNFNFNGLTGTGVLTESNKKFLPFQQFGRDIADTTDAVRDPQTLEILDITPCSFGGVSVITPGTNTSNQVAVLYQDVNCTEVPVAIHADQLTPTWRVYSTGSNVFQTRAGCLIGAEHVNNSYECDIPIGAGICASYQTQTNSPRRARSVASQSIIAYTMSLGAENSVAYSNNSIAIPTNFTISVTTEILPVSMTKTSVDCTMYICGDSTECSNLLLQYGSFCTQLNRALTGIAVEQDKNTQQVFAQVKQIYKTPPIKDFGGFNFSQILPDPSKPSKRSFIEDLLFNKVTLADAGFIKQYGDCLGDIAARDLICAQKFNGLTVLPPLLTDEMIAQYTSALLAGTITSGWWFGAGAALQIPFAMQMAYRFNGIGVTQNVLYENQKLIANQFNSAIGKIQDSLSSTASALGKLQDVVNQNAQALNTLVKQLSSNFGAISSVLNDILSRLDPPEAEVQIDRLITGRLQSLQTYVTQQLIRAAEIRWSANLAATKMSECVLGQSKRVDFCGKGYHLMSFPQSAPHGVVFLHVTYVPAQEKNFTTAPAICHDGKAHFPREGVFVSNGTHWFVTQRNFYEPQIITTDNTFVSGNCDVVIGIVNNTVYDPLQPELDSGGGGSDIIKLLNEQVNKEMQSSNLYMSMSSWCYTHSLDGAGLFLFDHAAEEYEHAKKLIIFLNENNVPVQLTSISAPEHKFEGLTQIFQKAYEHEQHISESINNIVDHAIKSKDHATFNFLQWYVAEQHEEEVLFKDILDKIELIGNENHGLYLADQYVKGIAKSRKS

SEQ ID NO: 8811 - protein, 1315 aa, Artificial Sequence
  SARS-CoV-2/France/HF1805/2020__EPI_ISL_414628 spike protein (1-1147)(K986P_V987P_T887W_A1020W) Ferritin construct
MFVFLVLLPLVSSQCVNLTTRTQLPPAYTNSFTRGVYYPDKVFRSSVLHSTQDLFLPFFSNVTWFHAIHVSGTNGTKRFDNPVLPFNDGVYFASTEKSNIIRGWIFGTTLDSKTQSLLIVNNATNVVIKVCEFQFCNDPFLGVYYHKNNKSWMESEFRVYSSANNCTFEYVSQPFLMDLEGKQGNFKNLREFVFKNIDGYFKIYSKHTPINLVRDLPQGFSALEPLVDLPIGINITRFQTLLALHRSYLTPGDSSSGWTAGAAAYYVGYLQPRTFLLKYNENGTITDAVDCALDPLSETKCTLKSFTVEKGIYQTSNFRVQPTESIVRFPNITNLCPFGEVFNATRFASVYAWNRKRISNCVADYSVLYNSASFSTFKCYGVSPTKLNDLCFTNVYADSFVIRGDEVRQIAPGQTGKIADYNYKLPDDFTGCVIAWNSNNLDSKVGGNYNYLYRLFRKSNLKPFERDISTEIYQAGSTPCNGVEGFNCYFPLQSYGFQPTNGVGYQPYRVVVLSFELLHAPATVCGPKKSTNLVKNKCVNFNFNGLTGTGVLTESNKKFLPFQQFGRDIADTTDAVRDPQTLEILDITPCSFGGVSVITPGTNTSNQVAVLYQGVNCTEVPVAIHADQLTPTWRVYSTGSNVFQTRAGCLIGAEHVNNSYECDIPIGAGICASYQTQTNSPRRARSVASQSIIAYTMSLGAENSVAYSNNSIAIPTNFTISVTTEILPVSMTKTSVDCTMYICGDSTECSNLLLQYGSFCTQLNRALTGIAVEQDKNTQEVFAQVKQIYKTPPIKDFGGFNFSQILPDPSKPSKRSFIEDLLFNKVTLADAGFIKQYGDCLGDIAARDLICAQKFNGLTVLPPLLTDEMIAQYTSALLAGTITSGWWFGAGAALQIPFAMQMAYRFNGIGVTQNVLYENQKLIANQFNSAIGKIQDSLSSTASALGKLQDVVNQNAQALNTLVKQLSSNFGAISSVLNDILSRLDPPEAEVQIDRLITGRLQSLQTYVTQQLIRAAEIRWSANLAATKMSECVLGQSKRVDFCGKGYHLMSFPQSAPHGVVFLHVTYVPAQEKNFTTAPAICHDGKAHFPREGVFVSNGTHWFVTQRNFYEPQIITTDNTFVSGNCDVVIGVVNNTVYDPLQPELDSGGGGSDIIKLLNEQVNKEMQSSNLYMSMSSWCYTHSLDGAGLFLFDHAAEEYEHAKKLIIFLNENNVPVQLTSISAPEHKFEGLTQIFQKAYEHEQHISESINNIVDHAIKSKDHATFNFLQWYVAEQHEEEVLFKDILDKIELIGNENHGLYLADQYVKGIAKSRKS

SEQ ID NO: 8812 - protein, 1315 aa, Artificial Sequence
  SARS-CoV-2/Netherlands/ZuidHolland_9/2020__EPI_ISL_414445 spike protein (1-1147)(K986P_V987P_T887W_A1020W) Ferritin construct
MFVFLVLLPLVSSQCVNLTTRTQLPPAYTNSFTRGVYYPDKVFRSSVLHSTQDLFLPFFSNVTWFHAIHVSGTNGTKRFDNPVLPFNDGVYFASTEKSNIIRGWIFGTTLDSKTQSLLIVNNATNVVIKVCEFQFCNDPFLGVYYHKNNKSWMESEFRVYSSANNCTFEYVSQPFLMDLEGKQGNFKNLREFVFKNIDGYFKIYSKHTPINLVRDLPQGFSALEPLVDLPIGINITRFQTLLALHRSYLTPGDSSSGWTAGAAAYYVGYLQPRTFLLKYNENGTITDAVDCALDPLSETKCTLKSFTVEKGIYQTSNFRVQPTESIVRFPNITNLCPFGEVFNATRFASVYAWNRKRISNCVADYSVLYNSASFSTFKCYGVSPTKLNDLCFTNVYADSFVIRGDEVRQIAPGQTGKIADYNYKLPDDFTGCVIAWNSNNLDSKVGGNYNYLYRLFRKSNLKPFERDISTEIYQAGSTPCNGVEGFNCYFPLQSYGFQPTNGVGYQPYRVVVLSFELLHAPATVCGPKKSTNLVKNKCVNFNFNGLTGTGVLTESNKKFLPFQQFGRDIADTTDAVRDPQTLEILDITPCSFGGVSVITPGTNTSNQVAVLYQGVNCTEVPVAIHADQLTPTWRVYSTGSNVFQTRAGCLIGAEHVNNSYECDIPIGAGICASYQTQTNSPRRARSVASQSIIAYTMSLGAENSVAYSNNSIAIPTNFTISVTTEILPVSMTKTSVDCTMYICGDSTECSNLLLQYGSFCTQLNRALTGIAVEQDKNTQEVFAQVKQIYKTPPIKDFGGFNFSQILPDPSKPSKRSFIEDLLFNKVTLADAGFIKQYGDCLGDIAARDLICVQKFNGLTVLPPLLTDEMIAQYTSALLAGTITSGWWFGAGAALQIPFAMQMAYRFNGIGVTQNVLYENQKLIANQFNSAIGKIQDSLSSTASALGKLQDVVNQNAQALNTLVKQLSSNFGAISSVLNDILSRLDPPEAEVQIDRLITGRLQSLQTYVTQQLIRAAEIRWSANLAATKMSECVLGQSKRVDFCGKGYHLMSFPQSAPHGVVFLHVTYVPAQEKNFTTAPAICHDGKAHFPREGVFVSNGTHWFVTQRNFYEPQIITTDNTFVSGNCDVVIGIVNNTVYDPLQPELDSGGGGSDIIKLLNEQVNKEMQSSNLYMSMSSWCYTHSLDGAGLFLFDHAAEEYEHAKKLIIFLNENNVPVQLTSISAPEHKFEGLTQIFQKAYEHEQHISESINNIVDHAIKSKDHATFNFLQWYVAEQHEEEVLFKDILDKIELIGNENHGLYLADQYVKGIAKSRKS

SEQ ID NO: 8813 - protein, 1315 aa, Artificial Sequence
  SARS-CoV-2/Finland/FIN03032020A/2020__EPI_ISL_413602 spike protein (1-1147)(K986P_V987P_T887W_A1020W) Ferritin construct
MFVFLVLLPLVSSQCVNLTTRTQLPPAYTNSFTRGVYYPDKVFRSSVLHSTQDLFLPFFSNVTWFHAIHVSGTNGTKRFDNPVLPFNDGVYFASTEKSNIIRGWIFGTTLDSKTQSLLIVNNATNVVIKVCEFQFCNDPFLGVYYHKNNKSWMESEFRVYSSANNCTFEYVSQPFLMDLEGKQGNFKNLREFVFKNIDGYFKIYSKHTPINLVRDLPQGFSALEPLVDLPIGINITRFQTLLALHRSYLTPGDSSSGWTAGAAAYYVGYLQPRTFLLKYNENGTITDAVDCALDPLSETKCTLKSFTVEKGIYQTSNFRVQPTESIVRFPNITNLCPFGEVFNATRFASVYAWNRKRISNCVADYSVLYNSASFSTFKCYGVSPTKLNDLCFTNVYADSFVIRGDEVRQIAPGQTGKIADYNYKLPDDFTGCVISWNSNNLDSKVGGNYNYLYRLFRKSNLKPFERDISTEIYQAGSTPCNGVEGFNCYFPLQSYGFQPTNGVGYQPYRVVVLSFELLHAPATVCGPKKSTNLVKNKCVNFNFNGLTGTGVLTESNKKFLPFQQFGRDIADTTDAVRDPQTLEILDITPCSFGGVSVITPGTNTSNQVAVLYQGVNCTEVPVAIHADQLTPTWRVYSTGSNVFQTRAGCLIGAEHVNNSYECDIPIGAGICASYQTQTNSPRRARSVASQSIIAYTMSLGAENSVAYSNNSIAIPTNFTISVTTEILPVSMTKTSVDCTMYICGDSTECSNLLLQYGSFCTQLNRALTGIAVEQDKNTQEVFAQVKQIYKTPPIKDFGGFNFSQILPDPSKPSKRSFIEDLLFNKVTLADAGFIKQYGDCLGDIAARDLICAQKFNGLTVLPPLLTDEMIAQYTSALLAGTITSGWWFGAGAALQIPFAMQMAYRFNGIGVTQNVLYENQKLIANQFNSAIGKIQDSLSSTASALGKLQDVVNQNAQALNTLVKQLSSNFGAISSVLNDILSRLDPPEAEVQIDRLITGRLQSLQTYVTQQLIRAAEIRWSANLAATKMSECVLGQSKRVDFCGKGYHLMSFPQSAPHGVVFLHVTYVPAQEKNFTTAPAICHDGKAHFPREGVFVSNGTHWFVTQRNFYEPQIITTDNTFVSGNCDVVIGIVNNTVYDPLQPELDSGGGGSDIIKLLNEQVNKEMQSSNLYMSMSSWCYTHSLDGAGLFLFDHAAEEYEHAKKLIIFLNENNVPVQLTSISAPEHKFEGLTQIFQKAYEHEQHISESINNIVDHAIKSKDHATFNFLQWYVAEQHEEEVLFKDILDKIELIGNENHGLYLADQYVKGIAKSRKS

SEQ ID NO: 8814 - protein, 1315 aa, Artificial Sequence
  SARS-CoV-2/France/GE1977/2020__EPI_ISL_414632 spike protein (1-1147)(K986P_V987P_T887W_A1020W) Ferritin construct
MFVFLVLLPLVSSQCVNLTTRTQLPPAYTNSFTRGVYYPDKVFRSSVLHSTQDLFLPFFSNVTWFHAIHVSGTNGTKRFDNPVLPFNDGVYFASTEKSNIIRGWIFGTTLDSKTQSLLIVNNATNVVIKVCEFQFCNDPFLGVYYHKNNKSWMESEFRVYSSANNCTFEYVSQPFLMDLEGKQGNFKNLREFVFKNIDGYFKIYSKHTPINLVRDLPQGFSALEPLVDLPIGINITRFQTLLALHRSYLTPGDSSSGWTAGAAAYYVGYLQPRTFLLKYNENGTITDAVDCALDPLSETKCTLKSFTVEKGIYQTSNFRVQPTESIVRFPNITNLCPFGEVFNATRFASVYAWNRKRISNCVADYSVLYNSASFSTFKCYGVSPTKLNDLCFTNVYADSFVIRGDEVRQIAPGQTGKIADYNYKLPDDFTGCVIAWNSNNLDSKVGGNYNYLYRLFRKSNLKPFERDISTEIYQAGSTPCNGVEGFNCYFPLQSYGFQPTNGVGYQPYRVVVLSFELLHAPATVCGPKKSTNLVKNKCVNFNFNGLTGTGVLTESNKKFLPFQQFGRDIADTTDAVRDPQTLEILDITPCSFGGVSVITPGTNTSNQVAVLYQGVNCTEVPVAIHADQLTPTWRVYSTGSNVFQTRAGCLIGAEHVNNSYECDIPIGAGICASYQTQTNSPRRARSVASQSIIAYTMSLGAENSVAYSNNSIAIPTNFTISVTTEILPVSMTKTSVDCTMYICGDSTECSNLLLQYGSFCTQLNRALTGIAVEQDKNTQEVFAQVKQIYKTPPIKDFGGFNFSQILPDPSKPSKRSFIEDLLFNKVTLADAGFIKQYGDCLGDIAARDLICAQKFNGLTVLPPLLTDEMIAQYTSALLAGTITSGWWFGAGAALQIPFAMQMAYRFNGIGVTQNVLYENQKLIANQFNSAIGKIQDSLFSTASALGKLQDVVNQNAQALNTLVKQLSSNFGAISSVLNDILSRLDPPEAEVQIDRLITGRLQSLQTYVTQQLIRAAEIRWSANLAATKMSECVLGQSKRVDFCGKGYHLMSFPQSAPHGVVFLHVTYVPAQEKNFTTAPAICHDGKAHFPREGVFVSNGTHWFVTQRNFYEPQIITTDNTFVSGNCDVVIGIVNNTVYDPLQPELDSGGGGSDIIKLLNEQVNKEMQSSNLYMSMSSWCYTHSLDGAGLFLFDHAAEEYEHAKKLIIFLNENNVPVQLTSISAPEHKFEGLTQIFQKAYEHEQHISESINNIVDHAIKSKDHATFNFLQWYVAEQHEEEVLFKDILDKIELIGNENHGLYLADQYVKGIAKSRKS

SEQ ID NO: 8815 - protein, 1315 aa, Artificial Sequence
  SARS-CoV-2/Finland/FIN-313/2020__EPI_ISL_414641 spike protein (1-1147)(K986P_V987P_T887W_A1020W) Ferritin construct
MFVFLVLLPLVSSQCVNLTTRTQLPPAYTNSFTRGVYYPDKVFRSSVLHSTQDLFLPFFSNVTWFHAIHVSGTNGTKRFDNPVLPFNDGVYFASTEKSNIIRGWIFGTTLDSKTQSLLIVNNATNVVIKVCEFQFCNDPFLGVYYHKNNKSWMESEFRVYSSANNCTFEYVSQPFLMDLEGKQGNFKNLREFVFKNIDGYFKIYSKHTPINLVRDLPQGFSALEPLVDLPIGINITRFKTLLALHRSYLTPGDSSSGWTAGAAAYYVGYLQPRTFLLKYNENGTITDAVDCALDPLSETKCTLKSFTVEKGIYQTSNFRVQPTESIVRFPNITNLCPFGEVFNATRFASVYAWNRKRISNCVADYSVLYNSASFSTFKCYGVSPTKLNDLCFTNVYADSFVIRGDEVRQIAPGQTGKIADYNYKLPDDFTGCVIAWNSNNLDSKVGGNYNYLYRLFRKSNLKPFERDISTEIYQAGSTPCNGVEGFNCYFPLQSYGFQPTNGVGYQPYRVVVLSFELLHAPATVCGPKKSTNLVKNKCVNFNFNGLTGTGVLTESNKKFLPFQQFGRDIADTTDAVRDPQTLEILDITPCSFGGVSVITPGTNTSNQVAVLYQGVNCTEVPVAIHADQLTPTWRVYSTGSNVFQTRAGCLIGAEHVNNSYECDIPIGAGICASYQTQTNSPRRARSVASQSIIAYTMSLGAENSVAYSNNSIAIPTNFTISVTTEILPVSMTKTSVDCTMYICGDSTECSNLLLQYGSFCTQLNRALTGIAVEQDKNTQEVFAQVKQIYKTPPIKDFGGFNFSQILPDPSKPSKRSFIEDLLFNKVTLADAGFIKQYGDCLGDIAARDLICAQKFNGLTVLPPLLTDEMIAQYTSALLAGTITSGWWFGAGAALQIPFAMQMAYRFNGIGVTQNVLYENQKLIANQFNSAIGKIQDSLSSTASALGKLQDVVNQNAQALNTLVKQLSSNFGAISSVLNDILSRLDPPEAEVQIDRLITGRLQSLQTYVTQQLIRAAEIRWSANLAATKMSECVLGQSKRVDFCGKGYHLMSFPQSAPHGVVFLHVTYVPAQEKNFTTAPAICHDGKAHFPREGVFVSNGTHWFVTQRNFYEPQIITTDNTFVSGNCDVVIGIVNNTVYDPLQPELDSGGGGSDIIKLLNEQVNKEMQSSNLYMSMSSWCYTHSLDGAGLFLFDHAAEEYEHAKKLIIFLNENNVPVQLTSISAPEHKFEGLTQIFQKAYEHEQHISESINNIVDHAIKSKDHATFNFLQWYVAEQHEEEVLFKDILDKIELIGNENHGLYLADQYVKGIAKSRKS

SEQ ID NO: 8816 - protein, 1315 aa, Artificial Sequence
  SARS-CoV-2/Netherlands/ZuidHolland_2/2020__EPI_ISL_414556 spike protein (1-1147)(K986P_V987P_T887W_A1020W) Ferritin construct
MFVFLVLLPLVSSQCVNLTTRTQLPPAYTNSFTRGVYYPDKVFRSSVLHSTQDLFLPFFSNVTWFHAIHVSGTNGTKRFDNPVLPFNDGVYFASTEKSNIIRGWIFGTTLDSKTQSLLIVNNATNVVIKVCEFQFCNDPFLGVYYHKNNKSWMESEFRVYSSANNCTFEYVSQPFLMDLEGKQGNFKNLREFVFKNIDGYFKIYSKHTPINLVRDLPQGFSALEPLVDLPIGINITRFQTLLALHRSYLTPGDSSSGWTAGAAAYYVGYLQPRTFLLKYNENGTITDAVDCALDPLSETKCTLKSFTVEKGIYQTSNFRVQPTESIVRFPNITNLCPFGEVFNATRFASVYAWNRKRISNCVADYSVLYNSASFSTFKCYGVSPTKLNDLCFTNVYADSFVIRGDEVRQIAPGQTGKIADYNYKLPDDFTGCVIAWNSNNLDSKVGGNYNYLYRLFRKSNLKPFERDISTEIYQAGSTPCNGVEGFNCYFPLQSYGFQPTNGVGYQPYRVVVLSFELLHAPATVCGPKKSTNLVKNKCVNFNFNGLTGTGVLTESNKKFLPFQQFGRDIADTTDAVRDPQTLEILDITPCSFGGVSVITPGTNTSNQVAVLYQGVNCTEVPVAIHADQLTPTWRVYSTGSNVFQTRAGCLIGAEHVNNSYECDIPIGAGICASYQTQTNSPRRARSVASQSIIAYTMSLGAENSVAYSNNSIAIPTNFTISVTTEILPVSMTKTSVDCTMYICGDSTECSNLLLQYGSFCTQLNRALTGIALEQDKNTQEVFAQVKQIYKTPPIKDFGGFNFSQILPDPSKPSKRSFIEDLLFNKVTLADAGFIKQYGDCLGDIAARDLICAQKFNGLTVLPPLLTDEMIAQYTSALLAGTITSGWWFGAGAALQIPFAMQMAYRFNGIGVTQNVLYENQKLIANQFNSAIGKIQDSLSSTASALGKLQDVVNQNAQALNTLVKQLSSNFGAISSVLNDILSRLDPPEAEVQIDRLITGRLQSLQTYVTQQLIRAAEIRWSANLAATKMSECVLGQSKRVDFCGKGYHLMSFPQSAPHGVVFLHVTYVPAQEKNFTTAPAICHDGKAHFPREGVFVSNGTHWFVTQRNFYEPQIITTDNTFVSGNCDVVIGIVNNTVYDPLQPELDSGGGGSDIIKLLNEQVNKEMQSSNLYMSMSSWCYTHSLDGAGLFLFDHAAEEYEHAKKLIIFLNENNVPVQLTSISAPEHKFEGLTQIFQKAYEHEQHISESINNIVDHAIKSKDHATFNFLQWYVAEQHEEEVLFKDILDKIELIGNENHGLYLADQYVKGIAKSRKS

SEQ ID NO: 8817 - protein, 1315 aa, Artificial Sequence
  SARS-CoV-2/USA/WA-UW31/2020__EPI_ISL_414618 spike protein (1-1147)(K986P_V987P_T887W_A1020W) Ferritin construct
MFVFLVLLPLVSSQCVNLTTRTQLPPAYTNSFTRGVYYPDKVFRSSVLHSTQDLFLPFFSNVTWFHAIHVSGTNGTKRFDNPVLPFNDGVYFASTEKSNIIRGWIFGTTLDSKTQSLLIVNNATNVVIKVCEFQFCNDPFLGVYYHKNNKSWMESEFRVYSSANNCTFEYVSQPFLMDLEGKQGNFKNLREFVFKNIDGYFKIYSKHTPINLVRDLPQGFSALEPLVDLPIGINITRFQTLLALHRSYLTPGDSSSGWTAGAAAYYVGYLQPRTFLLKYNENGTITDAVDCALDPLSETKCTLKSFTVEKGIYQTSNFRVQPTESIVRFPNITNLCPFGEVFNATRFASVYAWNRKRISNCVADYSVLYNSASFSTFKCYGVSPTKLNDLCFTNVYADSFVIRGDEVRQIAPGQTGKIADYNYKLPDDFTGCVIAWNSNNLDSKVGGNYNYLYRLFRKSNLKPFERDISTEIYQAGSTPCNGAEGFNCYFPLQSYGFQPTNGVGYQPYRVVVLSFELLHAPATVCGPKKSTNLVKNKCVNFNFNGLTGTGVLTESNKKFLPFQQFGRDIADTTDAVRDPQTLEILDITPCSFGGVSVITPGTNTSNQVAVLYQDVNCTEVPVAIHADQLTPTWRVYSTGSNVFQTRAGCLIGAEHVNNSYECDIPIGAGICASYQTQTNSPRRARSVASQSIIAYTMSLGAENSVAYSNNSIAIPTNFTISVTTEILPVSMTKTSVDCTMYICGDSTECSNLLLQYGSFCTQLNRALTGIAVEQDKNTQEVFAQVKQIYKTPPIKDFGGFNFSQILPDPSKPSKRSFIEDLLFNKVTLADAGFIKQYGDCLGDIAARDLICAQKFNGLTVLPPLLTDEMIAQYTSALLAGTITSGWWFGAGAALQIPFAMQMAYRFNGIGVTQNVLYENQKLIANQFNSAIGKIQDSLSSTASALGKLQDVVNQNAQALNTLVKQLSSNFGAISSVLNDILSRLDPPEAEVQIDRLITGRLQSLQTYVTQQLIRAAEIRWSANLAATKMSECVLGQSKRVDFCGKGYHLMSFPQSAPHGVVFLHVTYVPAQEKNFTTAPAICHDGKAHFPREGVFVSNGTHWFVTQRNFYEPQIITTDNTFVSGNCDVVIGIVNNTVYDPLQPELDSGGGGSDIIKLLNEQVNKEMQSSNLYMSMSSWCYTHSLDGAGLFLFDHAAEEYEHAKKLIIFLNENNVPVQLTSISAPEHKFEGLTQIFQKAYEHEQHISESINNIVDHAIKSKDHATFNFLQWYVAEQHEEEVLFKDILDKIELIGNENHGLYLADQYVKGIAKSRKS

SEQ ID NO: 8818 - protein, 1315 aa, Artificial Sequence
  SARS-CoV-2/South Korea/SNU01/2020__EPI_ISL_411929 spike protein (1-1147)(K986P_V987P_T887W_A1020W) Ferritin construct
MFVFLVLLPLVSSQCVNLTTRTQLPPAYTNSFTRGVYYPDKVFRSSVLHSTQDLFLPFFSNVTWFHAIHVSGTNGTKRFDNPVLPFNDGVYFASTEKSNIIRGWIFGTTLDSKTQSLLIVNNATNVVIKVCEFQFCNDPFLGVYYHKNNKSWMESEFRVYSSANNCTFEYVSQPFLMDLEGKQGNFKNLREFVFKNIDGYFKIYSKHTPINLVRDLPQGFWALEPLVDLPIGINITRFQTLLALHRSYLTPGDSSSGWTAGAAAYYVGYLQPRTFLLKYNENGTITDAVDCALDPLSETKCTLKSFTVEKGIYQTSNFRVQPTESIVRFPNITNLCPFGEVFNATRFASVYAWNRKRISNCVADYSVLYNSASFSTFKCYGVSPTKLNDLCFTNVYADSFVIRGDEVRQIAPGQTGKIADYNYKLPDDFTGCVIAWNSNNLDSKVGGNYNYLYRLFRKSNLKPFERDISTEIYQAGSTPCNGVEGFNCYFPLQSYGFQPTNGVGYQPYRVVVLSFELLHAPATVCGPKKSTNLVKNKCVNFNFNGLTGTGVLTESNKKFLPFQQFGRDIADTTDAVRDPQTLEILDITPCSFGGVSVITPGTNTSNQVAVLYQDVNCTEVPVAIHADQLTPTWRVYSTGSNVFQTRAGCLIGAEHVNNSYECDIPIGAGICASYQTQTNSPRRARSVASQSIIAYTMSLGAENSVAYSNNSIAIPTNFTISVTTEILPVSMTKTSVDCTMYICGDSTECSNLLLQYGSFCTQLNRALTGIAVEQDKNTQEVFAQVKQIYKTPPIKDFGGFNFSQILPDPSKPSKRSFIEDLLFNKVTLADAGFIKQYGDCLGDIAARDLICAQKFNGLTVLPPLLTDEMIAQYTSALLAGTITSGWWFGAGAALQIPFAMQMAYRFNGIGVTQNVLYENQKLIANQFNSAIGKIQDSLSSTASALGKLQDVVNQNAQALNTLVKQLSSNFGAISSVLNDILSRLDPPEAEVQIDRLITGRLQSLQTYVTQQLIRAAEIRWSANLAATKMSECVLGQSKRVDFCGKGYHLMSFPQSAPHGVVFLHVTYVPAQEKNFTTAPAICHDGKAHFPREGVFVSNGTHWFVTQRNFYEPQIITTDNTFVSGNCDVVIGIVNNTVYDPLQPELDSGGGGSDIIKLLNEQVNKEMQSSNLYMSMSSWCYTHSLDGAGLFLFDHAAEEYEHAKKLIIFLNENNVPVQLTSISAPEHKFEGLTQIFQKAYEHEQHISESINNIVDHAIKSKDHATFNFLQWYVAEQHEEEVLFKDILDKIELIGNENHGLYLADQYVKGIAKSRKS

SEQ ID NO: 8819 - protein, 1315 aa, Artificial Sequence
  SARS-CoV-2/China/WF0004/2020__EPI_ISL_413694 spike protein (1-1147)(K986P_V987P_T887W_A1020W) Ferritin construct
MFVFLVLLPLVSSQCVNLTTRTQLPPAYTNSFTRGVYYPDKVFRSSVLHSTQDLFLPFFSNVTWFHAIHVSGTNGTKRFDNPVLPFNDGVYFASTEKSNIIRGWIFGTTLDSKTQSLLIVNNATNVVIKVCEFQFCNDPFLGVYYHKNNKSWTESEFRVYSSANNCTFEYVSQPFLMDLEGKQGNFKNLREFVFKNIDGYFKIYSKHTPINLVRDLPQGFSALEPLVDLPIGINITRFQTLLALHRSYLTPGDSSSGWTAGAAAYYVGYLQPRTFLLKYNENGTITDAVDCALDPLSETKCTLKSFTVEKGIYQTSNFRVQPTESIVRFPNITNLCPFGEVFNATRFASVYAWNRKRISNCVADYSVLYNSASFSTFKCYGVSPTKLNDLCFTNVYADSFVIRGDEVRQIAPGQTGKIADYNYKLPDDFTGCVIAWNSNNLDSKVGGNYNYLYRLFRKSNLKPFERDISTEIYQAGSTPCNGVEGFNCYFPLQSYGFQPTNGVGYQPYRVVVLSFELLHAPATVCGPKKSTNLVKNKCVNFNFNGLTGTGVLTESNKKFLPFQQFGRDIADTTDAVRDPQTLEILDITPCSFGGVSVITPGTNTSNQVAVLYQDVNCTEVPVAIHADQLTPTWRVYSTGSNVFQTRAGCLIGAEHVNNSYECDIPIGAGICASYQTQTNSPRRARSVASQSIIAYTMSLGAENSVAYSNNSIAIPTNFTISVTTEILPVSMTKTSVDCTMYICGDSTECSNLLLQYGSFCTQLNRALTGIAVEQDKNTQEVFAQVKQIYKTPPIKDFGGFNFSQILPDPSKPSKRSFIEDLLFNKVTLADAGFIKQYGDCLGDIAARDLICAQKFNGLTVLPPLLTDEMIAQYTSALLAGTITSGWWFGAGAALQIPFAMQMAYRFNGIGVTQNVLYENQKLIANQFNSAIGKIQDSLSSTASALGKLQDVVNQNAQALNTLVKQLSSNFGAISSVLNDILSRLDPPEAEVQIDRLITGRLQSLQTYVTQQLIRAAEIRWSANLAATKMSECVLGQSKRFDFCGKGYHLMSFPQSAPHGVVFLHVTYVPAQEKNFTTAPAICHDGKAHFPREGVFVSNGTHWFVTQRNFYEPQIITTDNTFVSGNCDVVIGIVNNTVYDPLQPELDSGGGGSDIIKLLNEQVNKEMQSSNLYMSMSSWCYTHSLDGAGLFLFDHAAEEYEHAKKLIIFLNENNVPVQLTSISAPEHKFEGLTQIFQKAYEHEQHISESINNIVDHAIKSKDHATFNFLQWYVAEQHEEEVLFKDILDKIELIGNENHGLYLADQYVKGIAKSRKS

SEQ ID NO: 8820 - protein, 1315 aa, Artificial Sequence
  SARS-CoV-2/China/WF0028/2020__EPI_ISL_413791 spike protein (1-1147)(K986P_V987P_T887W_A1020W) Ferritin construct
MFVFLVLLPLVSSQCVNLTTRTQLPPAYTNSFTRGVYYPDKVFRSSVLHSTQDLFLPFFSNVTWFHAIHVSGTNGTKRFDNPVLPFNDGVYFASTEKSNIIRGWIFGTTLDSKTQSLLIVNNATNVVIKVCEFQFCNDPFLGVYYHKNNKSWMESEFRVYSSANNCTFEYVSQPFLMDLEGKQGNFKNLREFVFKNIDGYFKIYSKHTPINLVRDLPQGFSALEPLVDLPIGINITRFQTLLALHRSYLTPGDSSSGWTAGAAAYYVGYLQPRTFLLKYNENGTITDAVDCALDPLSETKCTLKSFTVEKGIYQTSNFRVQPTESIVRFPNITNLCPFGEVFNATRFASVYAWNRKRISNCVADYSVLYNSASFSTFKCYGVSPTKLNDLCFTNVYADSFVIRGDEVRQIAPGQTGKIADYNYKLPDDFTGCVIAWNSNNLDSKVGGNYNYLYRLFRKSNLKPFERDISTEIYQAGSTPCNGVEGFNCYFPLQSYGFQPTNGVGYQPYRVVVLSFELLHAPATVCGPKKSTNLVKNKCVNFNFNGLTGTGVLTESNKKFLPFQQFGRDIADTTDAVRDPQTLEILDITPCSFGGVSVITPGTNTSNQVAVLYQDVNCTEVPVAIHADQLTPTWRVYSTGSNVFQTRAGCLIGAEHVNNSYECDIPIGAGICASYQTQTNSPRRARSVASQSIIAYTMSLGAENSVAYSNNSIAIPTNFTISVTTEILPVSMTKTSVDCTMYICGDSTECSNLLLQYGSFCTQLNRALTGIAVEQDKNTQEVFAQVKQIYKTPPIKDFGGFNFSQILPDPSKPSKRSFIEDLLFNKVTLADAGFIKQYGDCLGDIAARDLICAQKFNGLTVLPPLLTDEMIAQYTSALLAGTITSGWWFGAGAALQIPFAMQMAYRFNGIGVTQNVLYENQKLIANQFNSAIGKIQDSLSSTASALGKLQDVVNQNAQALNTLVKQLSSNFGAISSVLNDILSRLDPPEAEVQIDRLITGRLQSLQTYVTQQLIRAAEIRWSANLAATKMSECVLGQSKRVDFCGKGYHLMSFPQSAPHGVVFLHVTYVPAQEKNFTTAPAICHDGKAHFPREGVFVSNGTHWFVTQRNFYEPQIITTDNTFVSGNCDVVIGIVNNTVYDPLQPELESGGGGSDIIKLLNEQVNKEMQSSNLYMSMSSWCYTHSLDGAGLFLFDHAAEEYEHAKKLIIFLNENNVPVQLTSISAPEHKFEGLTQIFQKAYEHEQHISESINNIVDHAIKSKDHATFNFLQWYVAEQHEEEVLFKDILDKIELIGNENHGLYLADQYVKGIAKSRKS

SEQ ID NO: 8821 - protein, 1315 aa, Artificial Sequence
  SARS-CoV-2/2019-nCoV/USA-CruiseA-18/2020__MT159716.1 spike protein (1-1147)(K986P_V987P_T887W_A1020W) Ferritin construct
MFVFLVLLPLVSSQCVNLTTRTQLPPAYTNSFTRGVYYPDKVFRSSVLHSTQDLFLPFFSNVTWFHAIHVSGTNGTKRFDNPVLPFNDGVYFASTEKSNIIRGWIFGTTLDSKTQSLLIVNNATNVVIKVCEFQFCNDPFLGVYYHKNNKSWMESELRVYSSANNCTFEYVSQPFLMDLEGKQGNFKNLREFVFKNIDGYFKIYSKHTPINLVRDLPQGFSALEPLVDLPIGINITRFQTLLALHRSYLTPGDSSSGWTAGAAAYYVGYLQPRTFLLKYNENGTITDAVDCALDPLSETKCTLKSFTVEKGIYQTSNFRVQPTESIVRFPNITNLCPFGEVFNATRFASVYAWNRKRISNCVADYSVLYNSASFSTFKCYGVSPTKLNDLCFTNVYADSFVIRGDEVRQIAPGQTGKIADYNYKLPDDFTGCVIAWNSNNLDSKVGGNYNYLYRLFRKSNLKPFERDISTEIYQAGSTPCNGVEGFNCYFPLQSYGFQPTNGVGYQPYRVVVLSFELLHAPATVCGPKKSTNLVKNKCVNFNFNGLTGTGVLTESNKKFLPFQQFGRDIADTTDAVRDPQTLEILDITPCSFGGVSVITPGTNTSNQVAVLYQDVNCTEVPVAIHADQLTPTWRVYSTGSNVFQTRAGCLIGAEHVNNSYECDIPIGAGICASYQTQTNSPRRARSVASQSIIAYTMSLGAENSVAYSNNSIAIPTNFTISVTTEILPVSMTKTSVDCTMYICGDSTECSNLLLQYGSFCTQLNRALTGIAVEQDKNTQEVFAQVKQIYKTPPIKDFGGFNFSQILPDPSKPSKRSFIEDLLFNKVTLADAGFIKQYGDCLGDIAARDLICAQKFNGLTVLPPLLTDEMIAQYTSALLAGTITSGWWFGAGAALQIPFAMQMAYRFNGIGVTQNVLYENQKLIANQFNSAIGKIQDSLSSTASALGKLQDVVNQNAQALNTLVKQLSSNFGAISSVLNDILSRLDPPEAEVQIDRLITGRLQSLQTYVTQQLIRAAEIRWSANLAATKMSECVLGQSKRVDFCGKGYHLMSFPQSAPHGVVFLHVTYVPAQEKNFTTAPAICHDGKAHFPREGVFVSNGTHWFVTQRNFYEPQIITTDNTFVSGNCDVVIGIVNNTVYDPLQPELDSGGGGSDIIKLLNEQVNKEMQSSNLYMSMSSWCYTHSLDGAGLFLFDHAAEEYEHAKKLIIFLNENNVPVQLTSISAPEHKFEGLTQIFQKAYEHEQHISESINNIVDHAIKSKDHATFNFLQWYVAEQHEEEVLFKDILDKIELIGNENHGLYLADQYVKGIAKSRKS

SEQ ID NO: 8822 - protein, 1315 aa, Artificial Sequence
  SARS-CoV-2/SARS-CoV-2/Yunnan-01/human/2020/CHN__MT049951.1 spike protein (1-1147)(K986P_V987P_T887W_A1020W) Ferritin construct
MFVFLVLLPLVSSQCVNLTTRTQLPPANTNSFTRGVYYPDKVFRSSVLHSTQDLFLPFFSNVTWFHAIHVSGTNGTKRFDNPVLPFNDGVYFASTEKSNIIRGWIFGTTLDSKTQSLLIVNNATNVVIKVCEFQFCNDPFLGVYYHKNNKSWMESEFRVYSSANNCTFEYVSQPFLMDLEGKQGNFKNLREFVFKNIDGYFKIYSKHTPINLVRDLPQGFSALEPLVDLPIGINITRFQTLLALHRSYLTPGDSSSGWTAGAAAYYVGYLQPRTFLLKYNENGTITDAVDCALDPLSETKCTLKSFTVEKGIYQTSNFRVQPTESIVRFPNITNLCPFGEVFNATRFASVYAWNRKRISNCVADYSVLYNSASFSTFKCYGVSPTKLNDLCFTNVYADSFVIRGDEVRQIAPGQTGKIADYNYKLPDDFTGCVIAWNSNNLDSKVGGNYNYLYRLFRKSNLKPFERDISTEIYQAGSTPCNGVEGFNCYFPLQSYGFQPTNGVGYQPYRVVVLSFELLHAPATVCGPKKSTNLVKNKCVNFNFNGLTGTGVLTESNKKFLPFQQFGRDIADTTDAVRDPQTLEILDITPCSFGGVSVITPGTNTSNQVAVLYQDVNCTEVPVAIHADQLTPTWRVYSTGSNVFQTRAGCLIGAEHVNNSYECDIPIGAGICASYQTQTNSPRRARSVASQSIIAYTMSLGAENSVAYSNNSIAIPTNFTISVTTEILPVSMTKTSVDCTMYICGDSTECSNLLLQYGSFCTQLNRALTGIAVEQDKNTQEVFAQVKQIYKTPPIKDFGGFNFSQILPDPSKPSKRSFIEDLLFNKVTLADAGFIKQYGDCLGDIAARDLICAQKFNGLTVLPPLLTDEMIAQYTSALLAGTITSGWWFGAGAALQIPFAMQMAYRFNGIGVTQNVLYENQKLIANQFNSAIGKIQDSLSSTASALGKLQDVVNQNAQALNTLVKQLSSNFGAISSVLNDILSRLDPPEAEVQIDRLITGRLQSLQTYVTQQLIRAAEIRWSANLAATKMSECVLGQSKRVDFCGKGYHLMSFPQSAPHGVVFLHVTYVPAQEKNFTTAPAICHDGKAHFPREGVFVSNGTHWFVTQRNFYEPQIITTDNTFVSGNCDVVIGIVNNTVYDPLQPELDSGGGGSDIIKLLNEQVNKEMQSSNLYMSMSSWCYTHSLDGAGLFLFDHAAEEYEHAKKLIIFLNENNVPVQLTSISAPEHKFEGLTQIFQKAYEHEQHISESINNIVDHAIKSKDHATFNFLQWYVAEQHEEEVLFKDILDKIELIGNENHGLYLADQYVKGIAKSRKS

SEQ ID NO: 8823 - protein, 1315 aa, Artificial Sequence
  SARS-CoV-2/USA/WA-UW292/2020__EPI_ISL_418077 spike protein (1-1147)(K986P_V987P_T887W_A1020W) Ferritin construct
MFVFLVLLPLVSSQCVNLTTRTQLPPAYTNSFTRGVYYPDKVFRSSVLHSTQDLFLPFFSNVTWFHAIHVSGTNGTKRFDNPVLPFNDGVYFASTEKSNIIRGWIFGTTLDSKTQSLLIVNNATNVVIKVCEFQFCNDPFLGVYYHKNNKSWMESEFRVYSSANNCTFEYVSQPFLMDLEGKQGNFKNLREFVFKNIDGYFKIYSKHTPINLVRDLPQGFSALEPLVDLPIGINITRFQTLLALHRSYLTPGDSSSGWTAGAAAYYVGYLQPRTFLLKYNENGTITDAVDCALDPLSETKCTLKSFTVEKGIYQTSNFRVQPTESIVRFPNITNLCPFGEVFNATRFASVYAWNRKRISNCVADYSVLYNSASFSTFKCYGVSPTKLNDLCFTNVYADSFVIRGDEVRQIAPGQTGKIADYNYKLPDDFTGCVIAWNSNNLDSKVGGNYNYLYRLFRKSNLKPFERDISTEIYQASSTPCNGVEGFNCYFPLQSYGFQPTNGVGYQPYRVVVLSFELLHAPATVCGPKKSTNLVKNKCVNFNFNGLTGTGVLTESNKKFLPFQQFGRDIADTTDAVRDPQTLEILDITPCSFGGVSVITPGTNTSNQVAVLYQDVNCTEVPVAIHADQLTPTWRVYSTGSNVFQTRAGCLIGAEHVNNSYECDIPIGAGICASYQTQTNSPRRARSVASQSIIAYTMSLGAENSVAYSNNSIAIPTNFTISVTTEILPVSMTKTSVDCTMYICGDSTECSNLLLQYGSFCTQLNRALTGIAVEQDKNTQEVFAQVKQIYKTPPIKDFGGFNFSQILPDPSKPSKRSFIEDLLFNKVTLADAGFIKQYGDCLGDIAARDLICAQKFNGLTVLPPLLTDEMIAQYTSALLAGTITSGWWFGAGAALQIPFAMQMAYRFNGIGVTQNVLYENQKLIANQFNSAIGKIQDSLSSTASALGKLQDVVNQNAQALNTLVKQLSSNFGAISSVLNDILSRLDPPEAEVQIDRLITGRLQSLQTYVTQQLIRAAEIRWSANLAATKMSECVLGQSKRVDFCGKGYHLMSFPQSAPHGVVFLHVTYVPAQEKNFTTAPAICHDGKAHFPREGVFVSNGTHWFVTQRNFYEPQIITTDNTFVSGNCDVVIGIVNNTVYDPLQPELDSGGGGSDIIKLLNEQVNKEMQSSNLYMSMSSWCYTHSLDGAGLFLFDHAAEEYEHAKKLIIFLNENNVPVQLTSISAPEHKFEGLTQIFQKAYEHEQHISESINNIVDHAIKSKDHATFNFLQWYVAEQHEEEVLFKDILDKIELIGNENHGLYLADQYVKGIAKSRKS

SEQ ID NO: 8824 - protein, 1315 aa, Artificial Sequence
  SARS-CoV-2/Iceland/192/2020__EPI_ISL_417819 spike protein (1-1147)(K986P_V987P_T887W_A1020W) Ferritin construct
MFVFFVLLPLVSSQCVNLTTRTQLPPAYTNSFTRGVYYPDKVFRSSVLHSTQDLFLPFFSNVTWFHAIHVSGTNGTKRFDNPVLPFNDGVYFASTEKSNIIRGWIFGTTLDSKTQSLLIVNNATNVVIKVCEFQFCNDPFLGVYYHKNNKSWMESEFRVYSSANNCTFEYVSQPFLMDLEGKQGNFKNLREFVFKNIDGYFKIYSKHTPINLVRDLPQGFSALEPLVDLPIGINITRFQTLLALHRSYLTPGDSSSGWTAGAAAYYVGYLQPRTFLLKYNENGTITDAVDCALDPLSETKCTLKSFTVEKGIYQTSNFRVQPTESIVRFPNITNLCPFGEVFNATRFASVYAWNRKRISNCVADYSVLYNSASFSTFKCYGVSPTKLNDLCFTNVYADSFVIRGDEVRQIAPGQTGKIADYNYKLPDDFTGCVIAWNSNNLDSKVGGNYNYLYRLFRKSNLKPFERDISTEIYQAGSTPCNGVEGFNCYFPLQSYGFQPTNGVGYQPYRVVVLSFELLHAPATVCGPKKSTNLVKNKCVNFNFNGLTGTGVLTESNKKFLPFQQFGRDIADTTDAVRDPQTLEILDITPCSFGGVSVITPGTNTSNQVAVLYQGVNCTEVPVAIHADQLTPTWRVYSTGSNVFQTRAGCLIGAEHVNNSYECDIPIGAGICASYQTQTNSPRRARSVASQSIIAYTMSLGAENSVAYSNNSIAIPTNFTISVTTEILPVSMTKTSVDCTMYICGDSTECSNLLLQYGSFCTQLNRALTGIAVEQDKNTQEVFAQVKQIYKTPPIKDFGGFNFSQILPDPSKPSKRSFIEDLLFNKVTLADAGFIKQYGDCLGDIAARDLICAQKFNGLTVLPPLLTDEMIAQYTSALLAGTITSGWWFGAGAALQIPFAMQMAYRFNGIGVTQNVLYENQKLIANQFNSAIGKIQDSLSSTASALGKLQDVVNQNAQALNTLVKQLSSNFGAISSVLNDILSRLDPPEAEVQIDRLITGRLQSLQTYVTQQLIRAAEIRWSANLAATKMSECVLGQSKRVDFCGKGYHLMSFPQSAPHGVVFLHVTYVPAQEKNFTTAPAICHDGKAHFPREGVFVSNGTHWFVTQRNFYEPQIITTDNTFVSGNCDVVIGIVNNTVYDPLQPELDSGGGGSDIIKLLNEQVNKEMQSSNLYMSMSSWCYTHSLDGAGLFLFDHAAEEYEHAKKLIIFLNENNVPVQLTSISAPEHKFEGLTQIFQKAYEHEQHISESINNIVDHAIKSKDHATFNFLQWYVAEQHEEEVLFKDILDKIELIGNENHGLYLADQYVKGIAKSRKS

SEQ ID NO: 8825 - protein, 1315 aa, Artificial Sequence
  SARS-CoV-2/Belgium/ULG-6939/2020__EPI_ISL_417020 spike protein (1-1147)(K986P_V987P_T887W_A1020W) Ferritin construct
MFVFLVLLPLVSSQCVNLTTRTQLPPAYTNSFTRGVYYPDKVFRSSVLHSTQDLFLPFFSNVTWFHAIHVSGTNGTKRFDNPVLPFNDGVYFASTEKSNIIRGWIFGTTLDSKTQSLLIVNNATNVVIKVCEFQFCNDPFLGVYYHKNNKSWMESEFRVYSSANNCTFEYVSQPFLMDLEGKQGNFKNLREFVFKNIDGYFKIYSKHTPINLVRDLPQGFSALEPLVDLPIGINITRFQTLLALHRSYLTPGDSSSGWTAGAAAYYVGYLQPRTFLLKYNENGTITDAVDCALDPLSETKCTLKSFTVEKGIYQTSNFRVQPTESIVRFPNITNLCPFGEVFNATRFASVYAWNRKRISNCVADYSVLYNSASFSTFKCYGVSPTKLNDLCFTNVYADSFVIRGDEVRQIAPGQTGKIADYNYKLPDDFTGCVIAWNSNNLDSKVGGNYNYLYRLFRKSNLKPFERDISTEIYQAGSTPCNGVEGFNCYFPLQSYGFQPTNGVGYQPYRVVVLSFELLHAPATVCGPKKSTNLVKNKCVNFNFNGLTGTGVLTESNKKFLPFQQFGRDIADTTDAVRDPQTLEILDITPCSFGGVSVITPGTNTSNQVAVLYQGVNCTEVPVAIHADQLTPTWRVYSTGSNVFQTRAGCLIGAEHVNNSYECDIPIGAGICASYQTQTNSPRRARSVASQSIIAYTMSLGAENSVVYSNNSIAIPTNFTISVTTEILPVSMTKTSVDCTMYICGDSTECSNLLLQYGSFCTQLNRALTGIAVEQDKNTQEVFAQVKQIYKTPPIKDFGGFNFSQILPDPSKPSKRSFIEDLLFNKVTLADAGFIKQYGDCLGDIAARDLICAQKFNGLTVLPPLLTDEMIAQYTSALLAGTITSGWWFGAGAALQIPFAMQMAYRFNGIGVTQNVLYENQKLIANQFNSAIGKIQDSLSSTASALGKLQDVVNQNAQALNTLVKQLSSNFGAISSVLNDILSRLDPPEAEVQIDRLITGRLQSLQTYVTQQLIRAAEIRWSANLAATKMSECVLGQSKRVDFCGKGYHLMSFPQSAPHGVVFLHVTYVPAQEKNFTTAPAICHDGKAHFPREGVFVSNGTHWFVTQRNFYEPQIITTDNTFVSGNCDVVIGIVNNTVYDPLQPELDSGGGGSDIIKLLNEQVNKEMQSSNLYMSMSSWCYTHSLDGAGLFLFDHAAEEYEHAKKLIIFLNENNVPVQLTSISAPEHKFEGLTQIFQKAYEHEQHISESINNIVDHAIKSKDHATFNFLQWYVAEQHEEEVLFKDILDKIELIGNENHGLYLADQYVKGIAKSRKS

SEQ ID NO: 8826 - protein, 1315 aa, Artificial Sequence
  SARS-CoV-2/France/HF2496/2020__EPI_ISL_418231 spike protein (1-1147)(K986P_V987P_T887W_A1020W) Ferritin construct
MFVFLVLLPLVSSQCVNLTTRTQLPPAYTNSFTRGVYYPDKVFRSSVLHSTQDLFLPFFSNVTWFHAIHVSGTNGTKRFDNPVLPFNDGVYFASTEKSNIIRGWIFGTTLDSKTQSLLIVNNATNVVIKVCEFQFCNDPFLGVYYHKNNKSWMESEFRVYSSANNCTFEYVSQPFLMDLEGKQGNFKNLREFVFKNIDGYFKIYSKHTPINLVRDLPQGFSALEPLVDLPIGINITRFQTLLALHRSYLTPGDSSSGWTAGAAAYYVGYLQPRTFLLKYNENGTITDAVDCALDPLSETKCTLKSFTVEKGIYQTSNFRVQPTESIVRFPNITNLCPFGEVFNATRFASVYAWNRKRISNCVADYSVLYNSASFSTFKCYGVSPTKLNDLCFTNVYADSFVIRGDEVRQIAPGQTGKIADYNYKLPDDFTGCVIAWNSNNLDSKVGGNYNYLYRLFRKSNLKPFERDISTEIYQAGSTPCNGVEGFNCYFPLQSYGFQPTNGVGYQPYRVVVLSFELLHAPATVCGPKKSTNLVKNKCVNFNFNGLTGTGVLTESNKKFLPFQQFGRDIADTTDAVRDPQTLEILDITPCSFGGVSVITPGTNTSNQVAVLYQGVNCTEVPVAIHADQLTPTWRVYSTGSNVFQTRAGCLIGAEHVNNSYECDIPIGAGICASYQTQTNSPRRARSVASQSIIAYTMSLGAENSVAYSNNSIAIPTNFTISVTTEILPVSMTKTSVDCTMYICGDSTECSNLLLQYGSFCTQLNRALTGIAVEQDKNTQEVFAQVKQIYKTPPIKDFGGFNFSQILPDPSKPSKRSFIEDLLFNKVTLADAGFIKQYGDCLGDIVARDLICAQKFNGLTVLPPLLTDEMIAQYTSALLAGTITSGWWFGAGAALQIPFAMQMAYRFNGIGVTQNVLYENQKLIANQFNSAIGKIQDSLSSTASALGKLQDVVNQNAQALNTLVKQLSSNFGAISSVLNDILSRLDPPEAEVQIDRLITGRLQSLQTYVTQQLIRAAEIRWSANLAATKMSECVLGQSKRVDFCGKGYHLMSFPQSAPHGVVFLHVTYVPAQEKNFTTAPAICHDGKAHFPREGVFVSNGTHWFVTQRNFYEPQIITTDNTFVSGNCDVVIGIVNNTVYDPLQPELDSGGGGSDIIKLLNEQVNKEMQSSNLYMSMSSWCYTHSLDGAGLFLFDHAAEEYEHAKKLIIFLNENNVPVQLTSISAPEHKFEGLTQIFQKAYEHEQHISESINNIVDHAIKSKDHATFNFLQWYVAEQHEEEVLFKDILDKIELIGNENHGLYLADQYVKGIAKSRKS

SEQ ID NO: 8827 - protein, 1315 aa, Artificial Sequence
  SARS-CoV-2/USA/WA-UW291/2020__EPI_ISL_418076 spike protein (1-1147)(K986P_V987P_T887W_A1020W) Ferritin construct
MFVFLVLLPLVSSQCVNLTTRTQLPPAYTNSFTRGVYYPDKVFRSSVLHSTQDLFLPFFSNVTWFHAIHVSGTNGTKRFDNPVLPFNDGVYFASTEKSNIIRGWIFGTTLDSKTQSLLIVNNATNVVIKVCEFQFCNDPFLGVYYHKNNKSWMESEFRVYSSANNCTFEYVSQPFLMDLEGKQGNFKNLREFVFKNIDGYFKIYSKHTPINLVRDLPQGFSALEPLVDLPIGINITRFQTLLALHRSYLTPGDSSSGWTAGAAAYYVGYLQPRTFLLKYNENGTITDAVDCALDPLSETKCTLKSFTVEKGIYQTSNFRVQPTESIVRFPNITNLCPFGEVFNATRFASVYAWNRKRISNCVADYSVLYNSASFSTFKCYGVSPTKLNDLCFTNVYADSFVIRGDEVRQIAPGQTGKIADYNYKLPDDFTGCVIAWNSNNLDSKVGGNYNYLYRLFRKSNLKPFERDISTEIYQAGSTPCNGVEGFNCYFPLQSYGFQPTNGVGYQPYRVVVLSFELLHAPATVCGPKKSTNLVKNKCVNFNFNGLTGTGVLTESNKKFLPFQQFGRDIADTTDAVRDPQTLEILDITPCSFGGVSVITPGTNTSNQVAVLYQGVNCTEVPVAIHADQLTPTWRVYSTGSNVFQTRAGCLIGAEHVNNSYECDIPIGAGICASYQTQTNSPRRARSVASQSIIAYTMSLGAENSVAYSNNSIAIPTNFTISVTTEILPVSMTKTSVDCTMYICGDSTECSNLLLQYGSFCTQLNRALTGIAVEQDKNTQEVFAQVKQIYKTPPIKDFGGFNFSQILPDPSKPSKRSFIEDLLFNKVTLADAGFIKQYGDCLGDIAARDLICAQKFNGLTVLPPLLTDEMIAQYTSALLAGTITSGWWFGAGAALQIPFAMQMAYRFNGIGVTQNVLYENQKLIANQFNSAIGKIQYSLSSTASALGKLQDVVNQNAQALNTLVKQLSSNFGAISSVLNDILSRLDPPEAEVQIDRLITGRLQSLQTYVTQQLIRAAEIRWSANLAATKMSECVLGQSKRVDFCGKGYHLMSFPQSAPHGVVFLHVTYVPAQEKNFTTAPAICHDGKAHFPREGVFVSNGTHWFVTQRNFYEPQIITTDNTFVSGNCDVVIGIVNNTVYDPLQPELDSGGGGSDIIKLLNEQVNKEMQSSNLYMSMSSWCYTHSLDGAGLFLFDHAAEEYEHAKKLIIFLNENNVPVQLTSISAPEHKFEGLTQIFQKAYEHEQHISESINNIVDHAIKSKDHATFNFLQWYVAEQHEEEVLFKDILDKIELIGNENHGLYLADQYVKGIAKSRKS

SEQ ID NO: 8828 - protein, 1315 aa, Artificial Sequence; identical to SEQ ID NO: 8791
  SARS-CoV-2/Portugal/PT0034/2020__EPI_ISL_418019 spike protein (1-1147)(K986P_V987P_T887W_A1020W) Ferritin construct

SEQ ID NO: 8829 - protein, 1315 aa, Artificial Sequence; identical to SEQ ID NO: 8783
  SARS-CoV-2/Iceland/202/2020__EPI_ISL_417750 spike protein (1-1147)(K986P_V987P_T887W_A1020W) Ferritin construct

SEQ ID NO: 8830 - protein, 1315 aa, Artificial Sequence
  SARS-CoV-2/USA/WA-UW261/2020__EPI_ISL_418046 spike protein (1-1147)(K986P_V987P_T887W_A1020W) Ferritin construct
MFVFLVLLPLVSSQCVNLTTRTQLPPAYTNSFTRGVYYPDKVFRSSVLHSTQDLFLPFFSNVTWFHAIHVSGTNGTKRFDNPVLPFNDGVYFASTEKSNIIRGWIFGTTLDSKTQSLLIVNNATNVVIKVCEFQFCNDPFLGVYYHKNNKSWMESEFRVYSSANNCTFEYVSQPFLMDLEGKQGNFKNLREFVFKNIDGYFKIYSKHTPINLVRDLPQGFSALEPLVDLPIGINITRFQTLLALHRSYLTPGDSSSGWTAGAAAYYVGYLQPRTFLLKYNENGTITDAVDCALDPLSETKCTLKSFTVEKGIYQTSNFRVQPTESIVRFPNITNLCPFGEVFNATRFTSVYAWNRKRISNCVADYSVLYNSASFSTFKCYGVSPTKLNDLCFTNVYADSFVIRGDEVRQIAPGQTGKIADYNYKLPDDFTGCVIAWNSNNLDSKVGGNYNYLYRLFRKSNLKPFERDISTEIYQAGSTPCNGVEGFNCYFPLQSYGFQPTNGVGYQPYRVVVLSFELLHAPATVCGPKKSTNLVKNKCVNFNFNGLTGTGVLTESNKKFLPFQQFGRDIADTTDAVRDPQTLEILDITPCSFGGVSVITPGTNTSNQVAVLYQDVNCTEVPVAIHADQLTPTWRVYSTGSNVFQTRAGCLIGAEHVNNSYECDIPIGAGICASYQTQTNSPRRARSVASQSIIAYTMSLGAENSVAYSNNSIAIPTNFTISVTTEILPVSMTKTSVDCTMYICGDSTECSNLLLQYGSFCTQLNRALTGIAVEQDKNTQEVFAQVKQIYKTPPIKDFGGFNFSQILPDPSKPSKRSFIEDLLFNKVTLADAGFIKQYGDCLGDIAARDLICAQKFNGLTVLPPLLTDEMIAQYTSALLAGTITSGWWFGAGAALQIPFAMQMAYRFNGIGVTQNVLYENQKLIANQFNSAIGKIQDSLSSTASALGKLQDVVNQNAQALNTLVKQLSSNFGAISSVLNDILSRLDPPEAEVQIDRLITGRLQSLQTYVTQQLIRAAEIRWSANLAATKMSECVLGQSKRVDFCGKGYHLMSFPQSAPHGVVFLHVTYVPAQEKNFTTAPAICHDGKAHFPREGVFVSNGTHWFVTQRNFYEPQIITTDNTFVSGNCDVVIGIVNNTVYDPLQPELDSGGGGSDIIKLLNEQVNKEMQSSNLYMSMSSWCYTHSLDGAGLFLFDHAAEEYEHAKKLIIFLNENNVPVQLTSISAPEHKFEGLTQIFQKAYEHEQHISESINNIVDHAIKSKDHATFNFLQWYVAEQHEEEVLFKDILDKIELIGNENHGLYLADQYVKGIAKSRKS

SEQ ID NO: 8831 - protein, 1315 aa, Artificial Sequence
  SARS-CoV-2/Portugal/PT0035/2020__EPI_ISL_418020 spike protein (1-1147)(K986P_V987P_T887W_A1020W) Ferritin construct
MFVFLVLLPLVSSQCVNLTTRTQLPPAYTNSFTRGVYYPDKVFRSSVLHSTQDLFLPFFSNVTWFHAIHVSGTNGTKRFDNPVLPFNDGVYFASTEKSNIIRGWIFGTTLDSKTQSLLIVNNATNVVIKVCEFQFCNDPFLGVYYHKNNKSWMESEFRVYSSANNCTFEYVSQPFLMDLEGKQGNFKNLREFVFKNIDGYFKIYSKHTPINLVRDLPQGFSALEPLVDLPIGINITRFQTLLALHRSYLTPGDSSSGWTAGAAAYYVGYLQPRTFLLKYNENGTITDAVDCALDPLSETKCTLKSFTVEKGIYQTSNFRVQPTESIVRFPNITNLCPFGEVFNATRFASVYAWNRKRISNCVADYSVLYNSASFSTFKCYGVSPTKLNDLCFTNVYADSFVIRGDEVRQIAPGQTGKIADYNYKLPDDFTGCVIAWNSNNLDSKVGGNYNYLYRLFRKSNLKPFERDISTEIYQAGSTPCNGVEGFNCYFPLQSYGFQPTNGVGYQPYRVVVLSFELLHAPATVCGPKKSTNLVKNKCVNFNFNGLTGTGVLTESNKKFLPFQQFGRDIADTTDAVRDPQTLEILDITPCSFGGVSVITPGTNTSNQVAVLYQDVNCTEVPVAIHADQLTPTWRVYSTGSNVFQTRAGCLIGAEHVNNSYECDIPIGAGICASYQTQTNSPRRARSVASQSIIAYTMSLGAENSVAYSNNSIAIPTNFTISVTTEILPVSMTKTSVDCTMYICGDSTECSNLLLQYGSFCTQLNRALTGIAVEQDKNTQEVFAQVKQIYKTPPIKDFGGFNFSQILPDPSKPSKRSFIEDLLFNKVTLADAGFIKQYGDCLGDISARDLICAQKFNGLTVLPPLLTDEMIAQYTSALLAGTITSGWWFGAGAALQIPFAMQMAYRFNGIGVTQNVLYENQKLIANQFNSAIGKIQDSLSSTASALGKLQDVVNQNAQALNTLVKQLSSNFGAISSVLNDILSRLDPPEAEVQIDRLITGRLQSLQTYVTQQLIRAAEIRWSANLAATKMSECVLGQSKRVDFCGKGYHLMSFPQSAPHGVVFLHVTYVPAQEKNFTTAPAICHDGKAHFPREGVFVSNGTHWFVTQRNFYEPQIITTDNTFVSGNCDVVIGIVNNTVYDPLQPELDSGGGGSDIIKLLNEQVNKEMQSSNLYMSMSSWCYTHSLDGAGLFLFDHAAEEYEHAKKLIIFLNENNVPVQLTSISAPEHKFEGLTQIFQKAYEHEQHISESINNIVDHAIKSKDHATFNFLQWYVAEQHEEEVLFKDILDKIELIGNENHGLYLADQYVKGIAKSRKS

SEQ ID NO: 8832 - protein, 1315 aa, Artificial Sequence
  SARS-CoV-2/USA/NY-NYUMC7/2020__EPI_ISL_418192 spike protein (1-1147)(K986P_V987P_T887W_A1020W) Ferritin construct
MFVFLVLLPLVSSQCVNLTTRTQLPPAYTNSFTRGVYYPDKVFRSSVLHSTQDLFLPFFSNVTWFHAIHVSGTNGTKRFDNPVLPFNDGVYFASTEKSNIIRGWIFGTTLDSKTQSLLIVNNATNVVIKVCEFQFCNDPFLGVYHHKNNKSWMESEFRVYSSANNCTFEYVSQPFLMDLEGKQGNFKNLREFVFKNIDGYFKIYSKHTPINLVRDLPQGFSALEPLVDLPIGINITRFQTLLALHRSYLTPGDSSSGWTAGAAAYYVGYLQPRTFLLKYNENGTITDAVDCALDPLSETKCTLKSFTVEKGIYQTSNFRVQPTESIVRFPNITNLCPFGEVFNATRFASVYAWNRKRISNCVADYSVLYNSASFSTFKCYGVSPTKLNDLCFTNVYADSFVIRGDEVRQIAPGQTGKIADYNYKLPDDFTGCVIAWNSNNLDSKVGGNYNYLYRLFRKSNLKPFERDISTEIYQAGSTPCNGVEGFNCYFPLQSYGFQPTNGVGYQPYRVVVLSFELLHAPATVCGPKKSTNLVKNKCVNFNFNGLTGTGVLTESNKKFLPFQQFGRDIADTTDAVRDPQTLEILDITPCSFGGVSVITPGTNTSNQVAVLYQGVNCTEVPVAIHADQLTPTWRVYSTGSNVFQTRAGCLIGAEHVNNSYECDIPIGAGICASYQTQTNSPRRARSVASQSIIAYTMSLGAENSVAYSNNSIAIPTNFTISVTTEILPVSMTKTSVDCTMYICGDSTECSNLLLQYGSFCTQLNRALTGIAVEQDKNTQEVFAQVKQIYKTPPIKDFGGFNFSQILPDPSKPSKRSFIEDLLFNKVTLADAGFIKQYGDCLGDIAARDLICAQKFNGLTVLPPLLTDEMIAQYTSALLAGTITSGWWFGAGAALQIPFAMQMAYRFNGIGVTQNVLYENQKLIANQFNSAIGKIQDSLSSTASALGKLQDVVNQNAQALNTLVKQLSSNFGAISSVLNDILSRLDPPEAEVQIDRLITGRLQSLQTYVTQQLIRAAEIRWSANLAATKMSECVLGQSKRVDFCGKGYHLMSFPQSAPHGVVFLHVTYVPAQEKNFTTAPAICHDGKAHFPREGVFVSNGTHWFVTQRNFYEPQIITTDNTFVSGNCDVVIGIVNNTVYDPLQPELDSGGGGSDIIKLLNEQVNKEMQSSNLYMSMSSWCYTHSLDGAGLFLFDHAAEEYEHAKKLIIFLNENNVPVQLTSISAPEHKFEGLTQIFQKAYEHEQHISESINNIVDHAIKSKDHATFNFLQWYVAEQHEEEVLFKDILDKIELIGNENHGLYLADQYVKGIAKSRKS

SEQ ID NO: 8833 - protein, 1315 aa, Artificial Sequence
  SARS-CoV-2/Iceland/189/2020__EPI_ISL_417709 spike protein (1-1147)(K986P_V987P_T887W_A1020W) Ferritin construct
MFVFLVLLPLVSSQCVNLTTRTQLPPAYTNSFTRGVYYPDKVFRSSVLHSTQDLFLPFFSNVTWFHAIHVSGTNGTKRFDNPVLPFNDGVYFASTEKSNIIRGWIFGTTLDSKTQSLLIVNNATNVVIKVCEFQFCNDPFLGVYYHKNNKSWMESEFRVYSSANNCTFEYVSQPFLMDLEGKQGNFKNLREFVFKNIDGYFKIYSKHTPINLVRDLPQGFSALEPLVDLPIGINITRFQTLLALHRSYLTPGDSSSGWTAGAAAYYVGYLQPRTFLLKYNENGTITDAVDCALDPLSETKCTLKSFTVEKGIYQTSNFRVQPTESIVRFPNITNLCPFGEVFNATRFASVYAWNRKRISNCVADYSVLYNSASFSTFKCYGVSPTKLNDLCFTNVYADSFVIRGDEVRQIAPGQTGKIADYNYKLPDDFTGCVIAWNSNNLDSKVGGNYNYLYRLFRKSNLKPFERDISTEIYQAGSTPCNGVEGFNCYFPLQSYGFQPTNGVGYQPYRVVVLSFELLHAPATVCGPKKSTNLVKNKCVNFNFNGLTGTGVLTESNKKFLPFQQFGRDIADTTDAVRDPQTLEILDITPCSFGGVSVITPGTNTSNQVAVLYQGVNCTEVPVAIHADQLTPTWRVYSTGSNVFQTRAGCLIGAEHVNNSYECDIPIGAGICASYQTQTNSPRRARSVASQSIIAYTMSLGAENSVAYSNNSIAIPTNFTISVTTEILPVSMTKTSVDCTMYICGDSTECSNLLLQYGSFCTQLNRALTGIAVEQDKNTQEVFAQVKQIYKTPPIKDFGGFNFSQILPDPSKPSKRSFIEDLLFNKVTLADAGFTKQYGDCLGDIAARDLICAQKFNGLTVLPPLLTDEMIAQYTSALLAGTITSGWWFGAGAALQIPFAMQMAYRFNGIGVTQNVLYENQKLIANQFNSAIGKIQDSLSSTASALGKLQDVVNQNAQALNTLVKQLSSNFGAISSVLNDILSRLDPPEAEVQIDRLITGRLQSLQTYVTQQLIRAAEIRWSANLAATKMSECVLGQSKRVDFCGKGYHLMSFPQSAPHGVVFLHVTYVPAQEKNFTTAPAICHDGKAHFPREGVFVSNGTHWFVTQRNFYEPQIITTDNTFVSGNCDVVIGIVNNTVYDPLQPELDSGGGGSDIIKLLNEQVNKEMQSSNLYMSMSSWCYTHSLDGAGLFLFDHAAEEYEHAKKLIIFLNENNVPVQLTSISAPEHKFEGLTQIFQKAYEHEQHISESINNIVDHAIKSKDHATFNFLQWYVAEQHEEEVLFKDILDKIELIGNENHGLYLADQYVKGIAKSRKS

SEQ ID NO: 8834 - protein, 1315 aa, Artificial Sequence
  SARS-CoV-2/Australia/NSW56/2020__EPI_ISL_417408 spike protein (1-1147)(K986P_V987P_T887W_A1020W) Ferritin construct
MFVFLVLLPLVSSQCVNLTTRTQLPPAYTNSFTRGVYYPDKVFRSSVLHSTQDLFLPFFSNVTWFHAIHVSGTNGTKRFDNPVLPFNDGVYFASTEKSNIIRGWIFGTTLDSKTQSLLIVNNATNVVIKVCEFQFCNDPFLGVYYHKNNKSWMESEFRVYSSANNCTFEYVSQPFLMDLEGKQGNFKNLREFVFKNIDGYFKIYSKHTPINLVRDLPQGFSALEPLVDLPIGINITRFQTLLALHRSYLTPGDSSSGWTAGAAAYYVGYLQPRTFLLKYNENGTITDAVDCALDPLSETKCTLKSFTVEKGIYQTSNFRVQPTESIVRFPNITNLCPFGEVFNATRFASVYAWNRKRISNCVADYSVLYNSASFSTFKCYGVSPTKLNDLCFTNVYADSFVIRGDEVRQIAPGQTGKIADYNYKLPDDFTGCVIAWNSNNLDSKVGGNYNYLYRLFRKSNLKPFERDISTEIYQAGSTPCNGVEGFNCYFPLQSYGFQPTNGVGYQPYRVVVLSFELLHAPATVCGPKKSTNLVKNKCVNFNFNGLTGTGVLTESNKKFLPFQQFGRDIADTTDAVRDPQTLEILDITPCSFGGVSVITPGTNTSNQVAVLYQDVNCTEVPVAIHADQLTPTWRVYSTGSNVFQTRAGCLIGAEHVNNSYECDIPIGAGICASYQTQTNSPRRARSVASQSIIAYTMSLGAENSVAYSNNSIAIPTNFTISVTTEILPVSMTKTSVDCTMYICGDSTECSNLLLQYGSFCTQLNRALTGIAVEQDKNTQEVFAQVKQIYKTPPIKDFGGFNFSQILPDSSKPSKRSFIEDLLFNKVTLADAGFIKQYGDCLGDIAARDLICAQKFNGLTVLPPLLTDEMIAQYTSALLAGTITSGWWFGAGAALQIPFAMQMAYRFNGIGVTQNVLYENQKLIANQFNSAIGKIQDSLSSTASALGKLQDVVNQNAQALNTLVKQLSSNFGAISSVLNDILSRLDPPEAEVQIDRLITGRLQSLQTYVTQQLIRAAEIRWSANLAATKMSECVLGQSKRVDFCGKGYHLMSFPQSAPHGVVFLHVTYVPAQEKNFTTAPAICHDGKAHFPREGVFVSNGTHWFVTQRNFYEPQIITTDNTFVSGNCDVVIGIVNNTVYDPLQPELDSGGGGSDIIKLLNEQVNKEMQSSNLYMSMSSWCYTHSLDGAGLFLFDHAAEEYEHAKKLIIFLNENNVPVQLTSISAPEHKFEGLTQIFQKAYEHEQHISESINNIVDHAIKSKDHATFNFLQWYVAEQHEEEVLFKDILDKIELIGNENHGLYLADQYVKGIAKSRKS

SEQ ID NO: 8835 - protein, 1315 aa, Artificial Sequence
  SARS-CoV-2/Iceland/280/2020__EPI_ISL_417608 spike protein (1-1147)(K986P_V987P_T887W_A1020W) Ferritin construct
MFVFLVLLPLVSSQCVNLTTRTQLPPAYTNSFTRGVYYPDKVFRSSVLHSTQDLFLPFFSNVTWFHAIHVSGTNGTKRFDNPVLPFNDGVYFASTEKSNIIRGWIFGTTLDSKTQSLLIVNNATNVVIKVCEFQFCNDPFLGVYYHKNNKSWMESEFRVYSSANNCTFEYVSQPFLMDLEGKQGNFKNLREFVFKNIDGYFKIYSKHTPINLVRDLPQGFSALEPLVDLPIGINITRFQTLLALHRSYLTPGDSSSGWTAGAAAYYVGYLQPRTFLLKYNENGTITDAVDCALDPLSETKCTLKSFTVEKGIYQTSNFRVQPTESIVRFPNITNLCPFGEVFNATRFASVYAWNRKRISNCVADYSVLYNSASFSTFKCYGVSPTKLNDLCFTNVYADSFVIRGDEVRQIAPGQTGKIADYNYKLPDDFTGCVIAWNSNNLDSKVGGNYNYLYRLFRKSNLKPFERDISTEIYQAGSTPCNGVEGFNCYFPLQSYGFQPTNGVGYQPYRVVVLSFELLHAPATVCGPKKSTNLVKNKCVNFNFNGLTGTGVLTESNKKFLPFQQFGRDIADTTDAVRDPQTLEILDITPCSFGGVSVITPGTNTSNQVAVLYQGVNCTEVPVAIHADQLTPTWRVYSTGSNVFQTRAGCLIGAEHVNNSYECDIPIGAGICASYHTQTNSPRRARSVASQSIIAYTMSLGAENSVAYSNNSIAIPTNFTISVTTEILPVSMTKTSVDCTMYICGDSTECSNLLLQYGSFCTQLNRALTGIAVEQDKNTQEVFAQVKQIYKTPPIKDFGGFNFSQILPDPSKPSKRSFIEDLLFNKVTLADAGFIKQYGDCLGDIAARDLICAQKFNGLTVLPPLLTDEMIAQYTSALLAGTITSGWWFGAGAALQIPFAMQMAYRFNGIGVTQNVLYENQKLIANQFNSAIGKIQDSLSSTASALGKLQDVVNQNAQALNTLVKQLSSNFGAISSVLNDILSRLDPPEAEVQIDRLITGRLQSLQTYVTQQLIRAAEIRWSANLAATKMSECVLGQSKRVDFCGKGYHLMSFPQSAPHGVVFLHVTYVPAQEKNFTTAPAICHDGKAHFPREGVFVSNGTHWFVTQRNFYEPQIITTDNTFVSGNCDVVIGIVNNTVYDPLQPELDSGGGGSDIIKLLNEQVNKEMQSSNLYMSMSSWCYTHSLDGAGLFLFDHAAEEYEHAKKLIIFLNENNVPVQLTSISAPEHKFEGLTQIFQKAYEHEQHISESINNIVDHAIKSKDHATFNFLQWYVAEQHEEEVLFKDILDKIELIGNENHGLYLADQYVKGIAKSRKS

SEQ ID NO: 8836 - protein, 1315 aa, Artificial Sequence; identical to SEQ ID NO: 8791
  SARS-CoV-2/Iceland/247/2020__EPI_ISL_417575 spike protein (1-1147)(K986P_V987P_T887W_A1020W) Ferritin construct

SEQ ID NO: 8837 - protein, 1315 aa, Artificial Sequence
  SARS-CoV-2/Iceland/238/2020__EPI_ISL_417566 spike protein (1-1147)(K986P_V987P_T887W_A1020W) Ferritin construct
MFVFLVLLPLVSSQCVNLTTRTQLPPAYTNSFTRGVYYPDKVFRSSVLHSTQDLFLPFFSNVTWFHAIHVSGTNGTKRFDNPVLPFNDGVYFASTEKSNIIRGWIFGTTLDSKTQSLLIVNNATNVVIKVCEFQFCNDPFLGVYYHKNNKSWMESEFRVYSSANNCTFEYVSQPFLMDLEGKQGNFKNLREFVFKNIDGYFKIYSKHTPINLVRDLPQGFSALEPLVDLPIGINITRFQTLLALHRSYLTPGDSSSGWTAGAAAYYVGYLQPRTFLLKYNENGTITDAVDCALDPLSETKCTLKSFTVEKGIYQTSNFRVQPTESIVRFPNITNLCPFGEVFNATRFASVYAWNRKRISNCVADYSVLYNSASFSTFKCYGVSPTKLNDLCFTNVYADSFVIRGDEVRQIAPGQTGKIADYNYKLPDDFTGCVIAWNSNNLDSKVGGNYNYLYRLFRKSNLKPFERDISTEIYQAGSTPCNGVEGFNCYFPLQSYGFQPTNGVGYQPYRVVVLSFELLHAPATVCGPKKSTNLVKNKCVNFNFNGLTGTGVLTESNKKFLPFQQFGRDIADTTDAVRDPQTLEILDITPCSFGGVSVITPGTNTSNQVAVLYQGVNCTEVPVAIHADQLTPTWRVYSTGSNVFQTRAGCLIGAEHVNNSYECDIPIGAGICASYQTQTNSPRRARSVASQSIIAYTMSLGAENSVAYSNNSIAIPTNFTISVTTEILPVSMTKTSVDCTMYICGDSTECSNLLLQYGSFCTQLNRALTGIAVEQDKNTQEVFAQVKQIYKTPPIKDFGGFNFSQILPDPSKPSKRSFIEDLLFNKVTLADVGFIKQYGDCLGDIAARDLICAQKFNGLTVLPPLLTDEMIAQYTSALLAGTITSGWWFGAGAALQIPFAMQMAYRFNGIGVTQNVLYENQKLIANQFNSAIGKIQDSLSSTASALGKLQDVVNQNAQALNTLVKQLSSNFGAISSVLNDILSRLDPPEAEVQIDRLITGRLQSLQTYVTQQLIRAAEIRWSANLAATKMSECVLGQSKRVDFCGKGYHLMSFPQSAPHGVVFLHVTYVPAQEKNFTTAPAICHDGKAHFPREGVFVSNGTHWFVTQRNFYEPQIITTDNTFVSGNCDVVIGIVNNTVYDPLQPELDSGGGGSDIIKLLNEQVNKEMQSSNLYMSMSSWCYTHSLDGAGLFLFDHAAEEYEHAKKLIIFLNENNVPVQLTSISAPEHKFEGLTQIFQKAYEHEQHISESINNIVDHAIKSKDHATFNFLQWYVAEQHEEEVLFKDILDKIELIGNENHGLYLADQYVKGIAKSRKS

SEQ ID NO: 8838 - protein, 1315 aa, Artificial Sequence
  SARS-CoV-2/Greece/16/2020__EPI_ISL_418265 spike protein (1-1147)(K986P_V987P_T887W_A1020W) Ferritin construct
MFVFLVLLPLVSSQCVNLTTRTQLPPAYTNSFTRGVYYPDKVFRSSVLHSTQDLFLPFFSNVTWFHAIHVSGTNGTKRFDNPVLPFNDGVYFASTEKSNIIRGWIFGTTLDSKTQSLLIVNNATNVVIKVCEFQFCNDPFLGVYYHKNNKSWMESEFRVYSSANNCTFEYVSQPFLMDLEGKQGNFKNLREFVFKNVDGYFKIYSKHTPINLVRDLPQGFSALEPLVDLPIGINITRFQTLLALHRSYLTPGDSSSGWTAGAAAYYVGYLQPRTFLLKYNENGTITDAVDCALDPLSETKCTLKSFTVEKGIYQTSNFRVQPTESIVRFPNITNLCPFGEVFNATRFASVYAWNRKRISNCVADYSVLYNSASFSTFKCYGVSPTKLNDLCFTNVYADSFVIRGDEVRQIAPGQTGKIADYNYKLPDDFTGCVIAWNSNNLDSKVGGNYNYLYRLFRKSNLKPFERDISTEIYQAGSTPCNGVEGFNCYFPLQSYGFQPTNGVGYQPYRVVVLSFELLHAPATVCGPKKSTNLVKNKCVNFNFNGLTGTGVLTESNKKFLPFQQFGRDIADTTDAVRDPQTLEILDITPCSFGGVSVITPGTNTSNQVAVLYQDVNCTEVPVAIHADQLTPTWRVYSTGSNVFQTRAGCLIGAEHVNNSYECDIPIGAGICASYQTQTNSPRRARSVASQSIIAYTMSLGAENSVAYSNNSIAIPTNFTISVTTEILPVSMTKTSVDCTMYICGDSTECSNLLLQYGSFCTQLNRALTGIAVEQDKNTQEVFAQVKQIYKTPPIKDFGGFNFSQILPDPSKPSKRSFIEDLLFNKVTLADAGFIKQYGDCLGDIAARDLICAQKFNGLTVLPPLLTDEMIAQYTSALLAGTITSGWWFGAGAALQIPFAMQMAYRFNGIGVTQNVLYENQKLIANQFNSAIGKIQDSLSSTASALGKLQDVVNQNAQALNTLVKQLSSNFGAISSVLNDILSRLDPPEAEVQIDRLITGRLQSLQTYVTQQLIRAAEIRWSANLAATKMSECVLGQSKRVDFCGKGYHLMSFPQSAPHGVVFLHVTYVPAQEKNFTTAPAICHDGKAHFPREGVFVSNGTHWFVTQRNFYEPQIITTDNTFVSGNCDVVIGIVNNTVYDPLQPELDSGGGGSDIIKLLNEQVNKEMQSSNLYMSMSSWCYTHSLDGAGLFLFDHAAEEYEHAKKLIIFLNENNVPVQLTSISAPEHKFEGLTQIFQKAYEHEQHISESINNIVDHAIKSKDHATFNFLQWYVAEQHEEEVLFKDILDKIELIGNENHGLYLADQYVKGIAKSRKS

SEQ ID NO: 8839 - protein, 1315 aa, Artificial Sequence
  SARS-CoV-2/Iceland/319/2020__EPI_ISL_417648 spike protein (1-1147)(K986P_V987P_T887W_A1020W) Ferritin construct
MFVFLVLLPLVSSQCVNLTTRTQLPPAYTNSFTRGVYYPDKVFRSSVLHSTQDLFLPFFSNVTWFHAIHVSGTNGTKRFDNPVLPFNDGVYFASTEKSNIIRGWIFGTTLDSKTQSLLIVNNATNVVIKVCEFQFCNDPFLGVYYHKNNKSWMESEFRVYSSANNCTFEYVSQPFLIDLEGKQGNFKNLREFVFKNIDGYFKIYSKHTPINLVRDLPQGFSALEPLVDLPIGINITRFQTLLALHRSYLTPGDSSSGWTAGAAAYYVGYLQPRTFLLKYNENGTITDAVDCALDPLSETKCTLKSFTVEKGIYQTSNFRVQPTESIVRFPNITNLCPFGEVFNATRFASVYAWNRKRISNCVADYSVLYNSASFSTFKCYGVSPTKLNDLCFTNVYADSFVIRGDEVRQIAPGQTGKIADYNYKLPDDFTGCVIAWNSNNLDSKVGGNYNYLYRLFRKSNLKPFERDISTEIYQAGSTPCNGVEGFNCYFPLQSYGFQPTNGVGYQPYRVVVLSFELLHAPATVCGPKKSTNLVKNKCVNFNFNGLTGTGVLTESNKKFLPFQQFGRDIADTTDAVRDPQTLEILDITPCSFGGVSVITPGTNTSNQVAVLYQGVNCTEVPVAIHADQLTPTWRVYSTGSNVFQTRAGCLIGAEHVNNSYECDIPIGAGICASYQTQTNSPRRARSVASQSIIAYTMSLGAENSVAYSNNSIAIPTNFTISVTTEILPVSMTKTSVDCTMYICGDSTECSNLLLQYGSFCTQLNRALTGIAVEQDKNTQEVFAQVKQIYKTPPIKDFGGFNFSQILPDPSKPSKRSFIEDLLFNKVTLADAGFIKQYGDCLGDIAARDLICAQKFNGLTVLPPLLTDEMIAQYTSALLAGTITSGWWFGAGAALQIPFAMQMAYRFNGIGVTQNVLYENQKLIANQFNSAIGKIQDSLSSTASALGKLQDVVNQNAQALNTLVKQLSSNFGAISSVLNDILSRLDPPEAEVQIDRLITGRLQSLQTYVTQQLIRAAEIRWSANLAATKMSECVLGQSKRVDFCGKGYHLMSFPQSAPHGVVFLHVTYVPAQEKNFTTAPAICHDGKAHFPREGVFVSNGTHWFVTQRNFYEPQIITTDNTFVSGNCDVVIGIVNNTVYDPLQPELDSGGGGSDIIKLLNEQVNKEMQSSNLYMSMSSWCYTHSLDGAGLFLFDHAAEEYEHAKKLIIFLNENNVPVQLTSISAPEHKFEGLTQIFQKAYEHEQHISESINNIVDHAIKSKDHATFNFLQWYVAEQHEEEVLFKDILDKIELIGNENHGLYLADQYVKGIAKSRKS

SEQ ID NO: 8840 - protein, 1315 aa, Artificial Sequence
  SARS-CoV-2/Congo/94/2020__EPI_ISL_417947 spike protein (1-1147)(K986P_V987P_T887W_A1020W) Ferritin construct
MFVFLVLLPLVSSQCVNLTTRTQLPPAYTNSFTRGVYYPDKVFRSSVLHSTQDLFLPFFSNVTWFHAIHVSGTNGTKRFDNPVLPFNDGVYFASTEKSNIIRGWIFGTTLDSKTQSLLIVNNATNVVIKVCEFQFCNDPFLGVYYHKNNKSWMESEFRVYSSANNCTFEYVSQPFLMDLEGKQGNFKNLREFVFKNIDGYFKIYSKHTPINLVRDLPQGFSALEPLVDLPIGINITRFQTLLALHRSYLTPGDSSSGWTAGAAAYYVGYLQPRTFLLKYNENGTITDAVDCALDPLSETKCTLKSFTVEKGIYQTSNFRVQPTESIVRFPNITNLCPFGEVFNATRFASVYAWNRKRISNCVADYSVLYNSASFSTFKCYGVSPTKLNDLCFTNVYADSFVIRGDEVRQIAPGQTGKIADYNYKLPDDFTGCVIAWNSNNLDSKVGGNYNYLYRLFRKSNLKPFERDISTEIYQAGSTPCNGVEGFNCYFPLQSYGFQPTNGVGYQPYRVVVLSFELLHAPATVCGPKKSTNLVKNKCVNFNFNGLTGTGVLTESNKKFLPFQQFGRDIADTTDAVRDPQTLEILDITPCSFGGVSVITPGTNTSNQVAVLYQGVNCTEVPVAIHADQLTPTWRVYSTGSNVFQTRAGCLIGAEHVNNSYECDIPIGAGICASYQTQTNSPRRARSVASQSIIAYTMSLGAENSVAYSNNSIAIPTNFTISVTTEILPVSMTKTSVDCTMYICGDSTECSNLLLQYGSFCTQLNRALTGIAVEQDKNTQEVFAQVKQIYKTPPIKDFGGFNFSQILPDPSKPSKRSFIEDILFNKVTLADAGFIKQYGDCLGDIAARDLICAQKFNGLTVLPPLLTDEMIAQYTSALLAGTITSGWWFGAGAALQIPFAMQMAYRFNGIGVTQNVLYENQKLIANQFNSAIGKIQDSLSSTASALGKLQDVVNQNAQALNTLVKQLSSNFGAISSVLNDILSRLDPPEAEVQIDRLITGRLQSLQTYVTQQLIRAAEIRWSANLAATKMSECVLGQSKRVDFCGKGYHLMSFPQSAPHGVVFLHVTYVPAQEKNFTTAPAICHDGKAHFPREGVFVSNGTHWFVTQRNFYEPQIITTDNTFVSGNCDVVIGIVNNTVYDPLQPELDSGGGGSDIIKLLNEQVNKEMQSSNLYMSMSSWCYTHSLDGAGLFLFDHAAEEYEHAKKLIIFLNENNVPVQLTSISAPEHKFEGLTQIFQKAYEHEQHISESINNIVDHAIKSKDHATFNFLQWYVAEQHEEEVLFKDILDKIELIGNENHGLYLADQYVKGIAKSRKS

SEQ ID NO: 8841 - protein, 1315 aa, Artificial Sequence
  SARS-CoV-2/Congo/158/2020__EPI_ISL_417950 spike protein (1-1147)(K986P_V987P_T887W_A1020W) Ferritin construct
MFVFLVLLPLVSSQCVNLTTRTQLPPAYTNSFTRGVYYPDKVFRSSVLHSTQDLFLPFFSNVTWFHAIHVSGTNGTKRFDNPVLPFNDGVYFASTEKSNIIRGWIFGTTLDSKTQSLLIVNNATNVVIKVCEFQFCNDPFLGVYYHKNNKSWMESEFRVYSSANNCTFEYVSQPFLMDLEGKQGNFKNLREFVFKNIDGYFKIYSKHTPINLVRDLPQGFSALEPLVDLPIGINITRFQTLLALHRSYLTPGDSSSGWTAGAAAYYVGYLQPRTFLLKYNENGTITDAVDCALDPLSETKCTLKSFTVEKGIYQTSNFRVQPTESIVRFPNITNLCPFGEVFNATRFASVYAWNRKRISNCVADYSVLYNSASFSTFKCYGVSPTKLNDLCFTNVYADSFVIRGDEVRQIAPGQTGKIADYNYKLPDDFTGCVIAWNSNNLDSKVGGNYNYLYRLFRKSNLKPFERDISTEIYQAGSTPCNGVEGFNCYFPLQSYGFQPTNGVGYQPYRVVVLSFELLHAPATVCGPKKSTNLVKNKCVNFNFNGLTGTGVLTESNKKFLPFQQFGRDIADTTDAVRDPQTLEILDITPCSFGGVSVITPGTNTSNQVAVLYQDVNCTEVPVAIHADQLTPTWRVYSTGSNVFQTRAGCLIGAEHVNNSYECDIPIGAGICASYQTQTNSPRRARSVASQSIIAYTMSLGAENSVAYSNNSIAIPTNFTISVTTEILPVSMTKTSVDCTMYICGDSTECSNLLLQYGSFCTQLNRALTGIAVEQDKNTQEVFAQVKQIYKTPPIKDFGGFNFSQILPDPSKPSKRSFIEDLLFNKVTLADAGFIKQYGDCLGDIAARDLICAQKFNGLTVLPPLLTDEMIAQYTSALLAGTITSGWWFGAGAALQIPFAMQMAYRFNGIGVTQNVLYENQKLIANQFNSAIGKIQDSLSSTASALGKLQDVVNQNAQALNTLVKQLSSNFGAISSVLNDILSRLDPPEAEVQIDRLITGRLQSLQTYVTQQLIRAAEIRWSANLAATKMSECVLGQSKRVDFCGKGYHLMSFPQSAPHGVVFLHVTYVPAQEKNFTTAPAICHDGKAHFPREGVFVSNGTHWFVTQRNFYEPQIITTDNTFLSGNCDVVIGIVNNTVYDPLQPELDSGGGGSDIIKLLNEQVNKEMQSSNLYMSMSSWCYTHSLDGAGLFLFDHAAEEYEHAKKLIIFLNENNVPVQLTSISAPEHKFEGLTQIFQKAYEHEQHISESINNIVDHAIKSKDHATFNFLQWYVAEQHEEEVLFKDILDKIELIGNENHGLYLADQYVKGIAKSRKS

SEQ ID NO: 8842 - protein, 1315 aa, Artificial Sequence
  SARS-CoV-2/USA/UT-00034/2020__EPI_ISL_417977 spike protein (1-1147)(K986P_V987P_T887W_A1020W) Ferritin construct
MFVFLVLLPLVSSQCVNLTTRTQLPPAYTNSFTRGVYYPDKVFRSSVLHSTQDLFLPFFSNVTWFHAIHVSGTNGTKRFDNPVLPFNDGVYFASTEKSNIIRGWIFGTTLDSKTQSLLIVNNATNVVIKVCEFQFCNDPFLGVYYYKNNKSWMESEFRVYSSANNCTFEYVSQPFLMDLEGKQGNFKNLREFVFKNIDGYFKIYSKHTPINLVRDLPQGFSALEPLVDLPIGINITRFQTLLALHRSYLTPGDSSSGWTAGAAAYYVGYLQPRTFLLKYNENGTITDAVDCALDPLSETKCTLKSFTVEKGIYQTSNFRVQPTESIVRFPNITNLCPFGEVFNATRFASVYAWNRKRISNCVADYSVLYNSASFSTFKCYGVSPTKLNDLCFTNVYADSFVIRGDEVRQIAPGQTGKIADYNYKLPDDFTGCVIAWNSNNLDSKVGGNYNYLYRLFRKSNLKPFERDISTEIYQAGSTPCNGVEGFNCYFPLQSYGFQPTNGVGYQPYRVVVLSFELLHAPATVCGPKKSTNLVKNKCVNFNFNGLTGTGVLTESNKKFLPFQQFGRDIADTTDAVRDPQTLEILDITPCSFGGVSVITPGTNTSNQVAVLYQGVNCTEVPVAIHADQLTPTWRVYSTGSNVFQTRAGCLIGAEHVNNSYECDIPIGAGICASYQTQTNSPRRARSVASQSIIAYTMSLGAENSVAYSNNSIAIPTNFTISVTTEILPVSMTKTSVDCTMYICGDSTECSNLLLQYGSFCTQLNRALTGIAVEQDKNTQEVFAQVKQIYKTPPIKDFGGFNFSQILPDPSKPSKRSFIEDLLFNKVTLADAGFIKQYGDCLGDIAARDLICAQKFNGLTVLPPLLTDEMIAQYTSALLAGTITSGWWFGAGAALQIPFAMQMAYRFNGIGVTQNVLYENQKLIANQFNSAIGKIQDSLSSTASALGKLQDVVNQNAQALNTLVKQLSSNFGAISSVLNDILSRLDPPEAEVQIDRLITGRLQSLQTYVTQQLIRAAEIRWSANLAATKMSECVLGQSKRVDFCGKGYHLMSFPQSAPHGVVFLHVTYVPAQEKNFTTAPAICHDGKAHFPREGVFVSNGTHWFVTQRNFYEPQIITTDNTFVSGNCDVVIGIVNNTVYDPLQPELDSGGGGSDIIKLLNEQVNKEMQSSNLYMSMSSWCYTHSLDGAGLFLFDHAAEEYEHAKKLIIFLNENNVPVQLTSISAPEHKFEGLTQIFQKAYEHEQHISESINNIVDHAIKSKDHATFNFLQWYVAEQHEEEVLFKDILDKIELIGNENHGLYLADQYVKGIAKSRKS

SEQ ID NO: 8843 - protein, 1315 aa, Artificial Sequence
  SARS-CoV-2/USA/UT-00033/2020__EPI_ISL_417976 spike protein (1-1147)(K986P_V987P_T887W_A1020W) Ferritin construct
MFVFLVLLPLVSSQCVNLTTRTQLPPAYTNSFTRGVYYPDKVFRSSVLHSTQDLFLPFFSNVTWFHAIHVSGTNGTKRFDNPVLPFNDGVYFASTEKSNIIRGWIFGTTLDSKTQSLLIVNNATNVVIKVCEFQFCNDPFLGVYYHKNNKSWMESEFRVYSSANNCTFEYVSQPFLMDLEGKQGNFKNLREFVFKNIDGYFKIYSKHTPINLVRDLPQGFSALEPLVDLPIGINITRFQTLLALHRSYLTPGDSSSGLTAGAAAYYVGYLQPRTFLLKYNENGTITDAVDCALDPLSETKCTLKSFTVEKGIYQTSNFRVQPTESIVRFPNITNLCPFGEVFNATRFASVYAWNRKRISNCVADYSVLYNSASFSTFKCYGVSPTKLNDLCFTNVYADSFVIRGDEVRQIAPGQTGKIADYNYKLPDDFTGCVIAWNSNNLDSKVGGNYNYLYRLFRKSNLKPFERDISTEIYQAGSTPCNGVEGFNCYFPLQSYGFQPTNGVGYQPYRVVVLSFELLHAPATVCGPKKSTNLVKNKCVNFNFNGLTGTGVLTESNKKFLPFQQFGRDIADTTDAVRDPQTLEILDITPCSFGGVSVITPGTNTSNQVAVLYQGVNCTEVPVAIHADQLTPTWRVYSTGSNVFQTRAGCLIGAEHVNNSYECDIPIGAGICASYQTQTNSPRRARSVASQSIIAYTMSLGAENSVAYSNNSIAIPTNFTISVTTEILPVSMTKTSVDCTMYICGDSTECSNLLLQYGSFCTQLNRALTGIAVEQDKNTQEVFAQVKQIYKTPPIKDFGGFNFSQILPDPSKPSKRSFIEDLLFNKVTLADAGFIKQYGDCLGDIAARDLICAQKFNGLTVLPPLLTDEMIAQYTSALLAGTITSGWWFGAGAALQIPFAMQMAYRFNGIGVTQNVLYENQKLIANQFNSAIGKIQDSLSSTASALGKLQDVVNQNAQALNTLVKQLSSNFGAISSVLNDILSRLDPPEAEVQIDRLITGRLQSLQTYVTQQLIRAAEIRWSANLAATKMSECVLGQSKRVDFCGKGYHLMSFPQSAPHGVVFLHVTYVPAQEKNFTTAPAICHDGKAHFPREGVFVSNGTHWFVTQRNFYEPQIITTDNTFVSGNCDVVIGIVNNTVYDPLQPELDSGGGGSDIIKLLNEQVNKEMQSSNLYMSMSSWCYTHSLDGAGLFLFDHAAEEYEHAKKLIIFLNENNVPVQLTSISAPEHKFEGLTQIFQKAYEHEQHISESINNIVDHAIKSKDHATFNFLQWYVAEQHEEEVLFKDILDKIELIGNENHGLYLADQYVKGIAKSRKS

SEQ ID NO: 8844 - protein, 1315 aa, Artificial Sequence
  SARS-CoV-2/USA/WI-13/2020__EPI_ISL_417516 spike protein (1-1147)(K986P_V987P_T887W_A1020W) Ferritin construct
MFVFLVLLPLVSSQCVNLTTRTQLPPAYTNSFTRGVYYPDKVFRSSVLHSTQDLFLPFFSNVTWFHAIHVSGTNGTKRFDNPVLPFNDGVYFASTEKSNIIRGWIFGTTLDSKTQSLLIVNNATNVVIKVCEFQFCNDPFLGVYYHKNNKSWMESEFRVYSSANNCTFEYVSQPFLMDLEGKQGNFKNLREFVFKNIDGYFKIYSKHTPINLVRDLPQGFSALEPLVDLPIGINITRFQTLLALHRSYLTPGDSSSGWTAGAAAYYVGYLQPRTFLLKYNENGTITDAVDCALDPLSETKCTLKSFTVEKGIYQTSNFRVLPTESIVRFPNITNLCPFGEVFNATRFASVYAWNRKRISNCVADYSVLYNSASFSTFKCYGVSPTKLNDLCFTNVYADSFVIRGDEVRQIAPGQTGKIADYNYKLPDDFTGCVIAWNSNNLDSKVGGNYNYLYRLFRKSNLKPFERDISTEIYQAGSTPCNGVEGFNCYFPLQSYGFQPTNGVGYQPYRVVVLSFELLHAPATVCGPKKSTNLVKNKCVNFNFNGLTGTGVLTESNKKFLPFQQFGRDIADTTDAVRDPQTLEILDITPCSFGGVSVITPGTNTSNQVAVLYQGVNCTEVPVAIHADQLTPTWRVYSTGSNVFQTRAGCLIGAEHVNNSYECDIPIGAGICASYQTQTNSPRRARSVASQSIIAYTMSLGAENSVAYSNNSIAIPTNFTISVTTEILPVSMTKTSVDCTMYICGDSTECSNLLLQYGSFCTQLNRALTGIAVEQDKNTQEVFAQVKQIYKTPPIKDFGGFNFSQILPDPSKPSKRSFIEDLLFNKVTLADAGFIKQYGDCLGDIAARDLICAQKFNGLTVLPPLLTDEMIAQYTSALLAGTITSGWWFGAGAALQIPFAMQMAYRFNGIGVTQNVLYENQKLIANQFNSAIGKIQDSLSSTASALGKLQDVVNQNAQALNTLVKQLSSNFGAISSVLNDILSRLDPPEAEVQIDRLITGRLQSLQTYVTQQLIRAAEIRWSANLAATKMSECVLGQSKRVDFCGKGYHLMSFPQSAPHGVVFLHVTYVPAQEKNFTTAPAICHDGKAHFPREGVFVSNGTHWFVTQRNFYEPQIITTDNTFVSGNCDVVIGIVNNTVYDPLQPELDSGGGGSDIIKLLNEQVNKEMQSSNLYMSMSSWCYTHSLDGAGLFLFDHAAEEYEHAKKLIIFLNENNVPVQLTSISAPEHKFEGLTQIFQKAYEHEQHISESINNIVDHAIKSKDHATFNFLQWYVAEQHEEEVLFKDILDKIELIGNENHGLYLADQYVKGIAKSRKS

SEQ ID NO: 8845 - protein, 1314 aa, Artificial Sequence
  SARS-CoV-2/India/1-27/2020__EPI_ISL_413522 spike protein (1-1146)(K985P_V986P_T886W_A1019W) Ferritin construct
MFVFLVLLPLVSSQCVNLTTRTQLPPAYTNSFTRGVYYPDKVFRSSVLHSTQDLFLPFFSNVTWFHAIHVSGTNGTKRFDNPVLPFNDGVYFASTEKSNIIRGWIFGTTLDSKTQSLLIVNNATNVVIKVCEFQFCNDPFLGVYHKNNKSWMESEFRVYSSANNCTFEYVSQPFLMDLEGKQGNFKNLREFVFKNIDGYFKIYSKHTPINLVRDLPQGFSALEPLVDLPIGINITRFQTLLALHRSYLTPGDSSSGWTAGAAAYYVGYLQPRTFLLKYNENGTITDAVDCALDPLSETKCTLKSFTVEKGIYQTSNFRVQPTESIVRFPNITNLCPFGEVFNATRFASVYAWNRKRISNCVADYSVLYNSASFSTFKCYGVSPTKLNDLCFTNVYADSFVIRGDEVIQIAPGQTGKIADYNYKLPDDFTGCVIAWNSNNLDSKVGGNYNYLYRLFRKSNLKPFERDISTEIYQAGSTPCNGVEGFNCYFPLQSYGFQPTNGVGYQPYRVVVLSFELLHAPATVCGPKKSTNLVKNKCVNFNFNGLTGTGVLTESNKKFLPFQQFGRDIADTTDAVRDPQTLEILDITPCSFGGVSVITPGTNTSNQVAVLYQDVNCTEVPVAIHADQLTPTWRVYSTGSNVFQTRAGCLIGAEHVNNSYECDIPIGAGICASYQTQTNSPRRARSVASQSIIAYTMSLGAENSVAYSNNSIAIPTNFTISVTTEILPVSMTKTSVDCTMYICGDSTECSNLLLQYGSFCTQLNRALTGIAVEQDKNTQEVFAQVKQIYKTPPIKDFGGFNFSQILPDPSKPSKRSFIEDLLFNKVTLADAGFIKQYGDCLGDIAARDLICAQKFNGLTVLPPLLTDEMIAQYTSALLAGTITSGWWFGAGAALQIPFAMQMAYRFNGIGVTQNVLYENQKLIANQFNSAIGKIQDSLSSTASALGKLQDVVNQNAQALNTLVKQLSSNFGAISSVLNDILSRLDPPEAEVQIDRLITGRLQSLQTYVTQQLIRAAEIRWSANLAATKMSECVLGQSKRVDFCGKGYHLMSFPQSAPHGVVFLHVTYVPAQEKNFTTAPAICHDGKAHFPREGVFVSNGTHWFVTQRNFYEPQIITTDNTFVSGNCDVVIGIVNNTVYDPLQPELDSGGGGSDIIKLLNEQVNKEMQSSNLYMSMSSWCYTHSLDGAGLFLFDHAAEEYEHAKKLIIFLNENNVPVQLTSISAPEHKFEGLTQIFQKAYEHEQHISESINNIVDHAIKSKDHATFNFLQWYVAEQHEEEVLFKDILDKIELIGNENHGLYLADQYVKGIAKSRKS

SEQ ID NO: 8846 - protein, 1309 aa, Artificial Sequence
  SARS-CoV-2/pangolin/Guangxi/P4L/2017__EPI_ISL_410538 spike protein (1-1141)(K980P_V981P_T881W_A1014W) Ferritin construct
MFVFLFVLPLVSSQCVNLTTRTGIPPGYTNSSTRGVYYPDKVFRSSILHLTQDLFLPFFSNVTWFNTINYQGGFKKFDNPVLPFNDGVYFASTEKSNIIRGWIFGTTLDARTQSLLIVNNATNVVIKVCEFQFCTDPFLGVYYHNNNKTWVENEFRVYSSANNCTFEYISQPFLMDLEGKQGNFKNLREFVFKNVDGYFKIYSKHTPIDLVRDLPRGFAALEPLVDLPIGINITRFQTLLALHRSYLTPGNLESGWTTGAAAYYVGYLQQRTFLLSYNQNGTITDAVDCSLDPLSETKCTLKSLTVEKGIYQTSNFRVQPTISIVRFPNITNLCPFGEVFNASKFASVYAWNRKRISNCVADYSVLYNSTSFSTFKCYGVSPTKLNDLCFTNVYADSFVVKGDEVRQIAPGQTGVIADYNYKLPDDFTGCVIAWNSVKQDALTGGNYGYLYRLFRKSKLKPFERDISTEIYQAGSTPCNGQVGLNCYYPLERYGFHPTTGVNYQPFRVVVLSFELLNGPATVCGPKLSTTLVKDKCVNFNFNGLTGTGVLTTSKKQFLPFQQFGRDISDTTDAVRDPQTLEILDITPCSFGGVSVITPGTNTSNQVAVLYQDVNCTEVPMAIHAEQLTPAWRVYSAGANVFQTRAGCLVGAEHVNNSYECDIPVGAGICASYHSMSSLRSVNQRSIIAYTMSLGAENSVAYSNNSIAIPTNFTISVTTEILPVSMTKTSVDCTMYICGDSIECSNLLLQYGSFCTQLNRALTGIAVEQDKNTQEVFAQVKQIYKTPPIKDFGGFNFSQILPDPSKPSKRSFIEDLLFNKVTLADAGFIKQYGDCLGDIAARDLICAQKFNGLTVLPPLLTDEMIAQYTSALLAGTITSGWWFGAGAALQIPFAMQMAYRFNGIGVTQNVLYENQKLIANQFNSAIGKIQDSLSSTASALGKLQDVVNQNAQALNTLVKQLSSNFGAISSVLNDILSRLDPPEAEVQIDRLITGRLQSLQTYVTQQLIRAAEIRWSANLAATKMSECVLGQSKRVDFCGKGYHLMSFPQSAPHGVVFLHVTYVPAQEKNFTTAPAICHEGKAHFPREGVFVSNGTHWFITQRNFYEPQIITTDNTFVSGSCDVVIGIVNNTVYDPLQPELDSGGGGSDIIKLLNEQVNKEMQSSNLYMSMSSWCYTHSLDGAGLFLFDHAAEEYEHAKKLIIFLNENNVPVQLTSISAPEHKFEGLTQIFQKAYEHEQHISESINNIVDHAIKSKDHATFNFLQWYVAEQHEEEVLFKDILDKIELIGNENHGLYLADQYVKGIAKSRKS

SEQ ID NO: 8847 - protein, 1309 aa, Artificial Sequence
  SARS-CoV-2/pangolin/Guangxi/P5L/2017__EPI_ISL_410540 spike protein (1-1141)(K980P_V981P_T881W_A1014W) Ferritin construct
MFVFLFVLPLVSSQCVNLTTRTGIPPGYTNSSTRGVYYPDKVFRSSILHLTQDLFLPFFSNVTWFNTINYQGGFKKFDNPVLPFNDGVYFASTEKSNIIRGWIFGTTLDARTQSLLIVNNATNVVIKVCEFQFCTDPFLGVYYHNNNKTWVENEFRVYSSANNCTFEYISQPFLMDLEGKQGNFKNLREFVFKNVDGYFKIYSKHTPIDLVRDLPRGFAALEPLVDLPIGINITRFQTLLALHRSYLTPGKLESGWTTGAAAYYVGYLQQRTFLLSYNQNGTITDAVDCSLDPLSETKCTLKSLTVEKGIYQTSNFRVQPTISIVRFPNITNLCPFGEVFNASKFASVYAWNRKRISNCVADYSVLYNSTSFSTFKCYGVSPTKLNDLCFTNVYADSFVVKGDEVRQIAPGQTGVIADYNYKLPDDFTGCVIAWNSVKQDALTGGNYGYLYRLFRKSKLKPFERDISTEIYQAGSTPCNGQVGLNCYYPLERYGFHPTTGVNYQPFRVVVLSFELLNGPATVCGPKLSTTLVKDKCVNFNFNGLTGTGVLTTSKKQFLPFQQFGRDISDTTDAVRDPQTLEILDITPCSFGGVSVITPGTNTSNQVAVLYQDVNCTEVPMAIHAEQLTPAWRVYSAGANVFQTRAGCLVGAEHVNNSYECDIPVGAGICASYHSMSSFRSVNQRSIIAYTMSLGAENSVAYSNNSIAIPTNFTISVTTEILPVSMTKTSVDCTMYICGDSIECSNLLLQYGSFCTQLNRALTGIAVEQDKNTQEVFAQVKQIYKTPPIKDFGGFNFSQILPDPSKPSKRSFIEDLLFNKVTLADAGFIKQYGDCLGDIAARDLICAQKFNGLTVLPPLLTDEMIAQYTSALLAGTITSGWWFGAGAALQIPFAMQMAYRFNGIGVTQNVLYENQKLIANQFNSAIGKIQDSLSSTASALGKLQDVVNQNAQALNTLVKQLSSNFGAISSVLNDILSRLDPPEAEVQIDRLITGRLQSLQTYVTQQLIRAAEIRWSANLAATKMSECVLGQSKRVDFCGKGYHLMSFPQSAPHGVVFLHVTYVPAQEKNFTTAPAICHEGKAHFPREGVFVSNGTHWFITQRNFYEPQIITTDNTFVSGSCDVVIGIVNNTVYDPLQPELDSGGGGSDIIKLLNEQVNKEMQSSNLYMSMSSWCYTHSLDGAGLFLFDHAAEEYEHAKKLIIFLNENNVPVQLTSISAPEHKFEGLTQIFQKAYEHEQHISESINNIVDHAIKSKDHATFNFLQWYVAEQHEEEVLFKDILDKIELIGNENHGLYLADQYVKGIAKSRKS

SEQ ID NO: 8848 - protein, 1309 aa, Artificial Sequence
  SARS-CoV-2/pangolin/Guangxi/P5E/2017__EPI_ISL_410541 spike protein (1-1141)(K980P_V981P_T881W_A1014W) Ferritin construct
MFVFLFVLPLVSSQCVNLTTRTGIPPGYTNSSTRGVYYPDKVFRSSILHLTQDLFLPFFSNVTWFNTITYQGGSKKFDNPVLPFNDGVYFASTEKSNIIRGWIFGTTLDARTQSLLIVNNATNVVIKVCEFQFCTDPFLGVYYHNNNKTWVENEFRVYSSANNCTFEYISQPFLMDLEGKQGNFKNLREFVFKNVDGYFKIYSKHTPIDLVRDLPRGFAALEPLVDLPIGINITRFQTLLALHRSYLTPGKLESGWTTGAAAYYVGYLQQRTFLLSYNQNGTITDAVDCSLDPLSETKCTLKSLTVEKGIYQTSNFRVQPTISIVRFPNITNLCPFGEVFNASKFASVYAWNRKRISNCVADYSVLYNSTSFSTFKCYGVSPTKLNDLCFTNVYADSFVVKGDEVRQIAPGQTGVIADYNYKLPDDFTGCVIAWNSVKQDALTGDNYGYLYRLFRKSKLKPFERDISTEIYQAGSTPCNGQVGLNCYYPLERYGFHPTTGVNYQPFRVVVLSFELLNGPATVCGPKLSTTLVKDKCVNFNFNGLTGTGVLTTSKKQFLPFQQFGRDISDTTDAVRDPQTLEILDITPCSFGGVSVITPGTNTSNQVAVLYQDVNCTEVPMAIHAEQLTPAWRVYSAGANVFQTRAGCLVGAEHVNNSYECDIPVGAGICASYHSMSSFRSVNQRSIIAYTMSLGAENSVAYSNNSIAIPTNFTISVTTEILPVSMTKTSVDCTMYICGDSIECSNLLLQYGSFCTQLNRALTGIAVEQDKNTQEVFAQVKQIYKTPPIKDFGGFNFSQILPDPSKPSKRSFIEDLLFNKVTLADAGFIKQYGDCLGDIAARDLICAQKFNGLTVLPPLLTDEMIAQYTSALLAGTITSGWWFGAGAALQIPFAMQMAYRFNGIGVTQNVLYENQKLIANQFNSAIGKIQDSLSSTASALGKLQDVVNQNAQALNTLVKQLSSNFGAISSVLNDILSRLDPPEAEVQIDRLITGRLQSLQTYVTQQLIRAAEIRWSANLAATKMSECVLGQSKRVDFCGKGYHLMSFPQSAPHGVVFLHVTYVPAQEKNFTTAPAICHEGKAHFPREGVFVSNGTHWFITQRNFYEPQIITTDNTFVSGSCDVVIGIVNNTVYDPLQPELDSGGGGSDIIKLLNEQVNKEMQSSNLYMSMSSWCYTHSLDGAGLFLFDHAAEEYEHAKKLIIFLNENNVPVQLTSISAPEHKFEGLTQIFQKAYEHEQHISESINNIVDHAIKSKDHATFNFLQWYVAEQHEEEVLFKDILDKIELIGNENHGLYLADQYVKGIAKSRKS

SEQ ID NO: 8849 - protein, 1307 aa, Artificial Sequence
  SARS-CoV-2/pangolin/Guangxi/P1E/2017__EPI_ISL_410539 spike protein (1-1139)(K978P_V979P_T879W_A1012W) Ferritin construct
MFVFLFVLPLVSSQCVNLTTRTGIQPGYTNSSTRGVYYPDKVFRSSILHLTQDLFLPFFSNVTWFNTINYQGGFKKFDNPVLPFNDGVYFASTEKSNIIRGWIFGTTLDARTQSLLIVNNATNVVIKVCEFQFCTDPFLGVYYHNNNKTWVENEFRVYSSANNCTFEYISQPFLMDLEGKQGNFKNLREFVFKNVDGYFKIYSKHTPIDLVRDLPRGFAALEPLVDLPIGINITRFQTLLALHRSYLTPGKLESGWTTGAAAYYVGYLQQRTFLLSYNQNGTITDAVDCSLDPLSETKCTLKSLTVEKGIYQTSNFRVQPTISIVRFPNITNLCPFGEVFNASKFASVYAWNRKRISNCVADYSVLYNSTSFSTFKCYGVSPTKLNDLCFTNVYADSFVVKGDEVRQIAPGQTGVIADYNYKLPDDFTGCVIAWNSVKQDALTGGNYLYRLFRKSKLKPFERDISTEIYQAGSTPCNGQVGLNCYYPLERYGFHPTTGVNYQPFRVVVLSFELLNGPATVCGPKLSTTLVKDKCVNFNFNGLTGTGVLTTSKKQFLPFQQFGRDISDTTDAVRDPQTLEILDITPCSFGGVSVITPGTNTSNQVAVLYQDVNCTEVPMAIHAEQLTPAWRVYSAGANVFQTRAGCLVGAEHVNNSYECDIPVGAGICASYHSMSSLRSVNQRSIIAYTMSLGAENSVAYSNNSIAIPTNFTISVTTEILPVSMTKTSVDCTMYICGDSIECSNLLLQYGSFCTQLNRALTGIAVEQDKNTQEVFAQVKQIYKTPPIKDFGGFNFSQILPDPSKPSKRSFIEDLLFNKVTLADAGFIKQYGDCLGDIAARDLICAQKFNGLTVLPPLLTDEMIAQYTSALLAGTITSGWWFGAGAALQIPFAMQMAYRFNGIGVTQNVLYENQKLIANQFNSAIGKIQDSLSSTASALGKLQDVVNQNAQALNTLVKQLSSNFGAISSVLNDILSRLDPPEAEVQIDRLITGRLQSLQTYVTQQLIRAAEIRWSANLAATKMSECVLGQSKRVDFCGKGYHLMSFPQSAPHGVVFLHVTYVPAQEKNFTTAPAICHEGKAHFPREGVFVSNGTHWFITQRNFYEPQIITTDNTFVSGSCDVVIGIVNNTVYDPLQPELDSGGGGSDIIKLLNEQVNKEMQSSNLYMSMSSWCYTHSLDGAGLFLFDHAAEEYEHAKKLIIFLNENNVPVQLTSISAPEHKFEGLTQIFQKAYEHEQHISESINNIVDHAIKSKDHATFNFLQWYVAEQHEEEVLFKDILDKIELIGNENHGLYLADQYVKGIAKSRKS

SEQ ID NO: 8850 - protein, 1315 aa, Artificial Sequence
  SARS-CoV-2/Wuhan/WIV05/2019__EPI_ISL_402128 spike protein (1-1147)(K986P_V987P_P1069F) Ferritin construct
MFVFLVLLPLVSSQCVNLTTRTQLPPAYTNSFTRGVYYPDKVFRSSVLHSTQDLFLPFFSNVTWFHAIHVSGTNGTKRFDNPVLPFNDGVYFASTEKSNIIRGWIFGTTLDSKTQSLLIVNNATNVVIKVCEFQFCNDPFLGVYYHKNNKSWMESEFRVYSSANNCTFEYVSQPFLMDLEGKQGNFKNLREFVFKNIDGYFKIYSKHTPINLVRDLPQGFSALEPLVDLPIGINITRFQTLLALHRSYLTPGDSSSGWTAGAAAYYVGYLQPRTFLLKYNENGTITDAVDCALDPLSETKCTLKSFTVEKGIYQTSNFRVQPTESIVRFPNITNLCPFGEVFNATRFASVYAWNRKRISNCVADYSVLYNSASFSTFKCYGVSPTKLNDLCFTNVYADSFVIRGDEVRQIAPGQTGKIADYNYKLPDDFTGCVIAWNSNNLDSKVGGNYNYLYRLFRKSNLKPFERDISTEIYQAGSTPCNGVEGFNCYFPLQSYGFQPTNGVGYQPYRVVVLSFELLHAPATVCGPKKSTNLVKNKCVNFNFNGLTGTGVLTESNKKFLPFQQFGRDIADTTDAVRDPQTLEILDITPCSFGGVSVITPGTNTSNQVAVLYQDVNCTEVPVAIHADQLTPTWRVYSTGSNVFQTRAGCLIGAEHVNNSYECDIPIGAGICASYQTQTNSPRRARSVASQSIIAYTMSLGAENSVAYSNNSIAIPTNFTISVTTEILPVSMTKTSVDCTMYICGDSTECSNLLLQYGSFCTQLNRALTGIAVEQDKNTQEVFAQVKQIYKTPPIKDFGGFNFSQILPDPSKPSKRSFIEDLLFNKVTLADAGFIKQYGDCLGDIAARDLICAQKFNGLTVLPPLLTDEMIAQYTSALLAGTITSGWTFGAGAALQIPFAMQMAYRFNGIGVTQNVLYENQKLIANQFNSAIGKIQDSLSSTASALGKLQDVVNQNAQALNTLVKQLSSNFGAISSVLNDILSRLDPPEAEVQIDRLITGRLQSLQTYVTQQLIRAAEIRASANLAATKMSECVLGQSKRVDFCGKGYHLMSFPQSAPHGVVFLHVTYVFAQEKNFTTAPAICHDGKAHFPREGVFVSNGTHWFVTQRNFYEPQIITTDNTFVSGNCDVVIGIVNNTVYDPLQPELDSGGGGSDIIKLLNEQVNKEMQSSNLYMSMSSWCYTHSLDGAGLFLFDHAAEEYEHAKKLIIFLNENNVPVQLTSISAPEHKFEGLTQIFQKAYEHEQHISESINNIVDHAIKSKDHATFNFLQWYVAEQHEEEVLFKDILDKIELIGNENHGLYLADQYVKGIAKSRKS

SEQ ID NO: 8851 - protein, 1311 aa, Artificial Sequence
  SARS-CoV-2/bat/Yunnan/RaTG13/2013__EPI_ISL_402131 spike protein (1-1143)(K982P_V983P_P1065F) Ferritin construct
MFVFLVLLPLVSSQCVNLTTRTQLPPAYTNSSTRGVYYPDKVFRSSVLHLTQDLFLPFFSNVTWFHAIHVSGTNGIKRFDNPVLPFNDGVYFASTEKSNIIRGWIFGTTLDSKTQSLLIVNNATNVVIKVCEFQFCNDPFLGVYYHKNNKSWMESEFRVYSSANNCTFEYVSQPFLMDLEGKQGNFKNLREFVFKNIDGYFKIYSKHTPINLVRDLPPGFSALEPLVDLPIGINITRFQTLLALHRSYLTPGDSSSGWTAGAAAYYVGYLQPRTFLLKYNENGTITDAVDCALDPLSETKCTLKSFTVEKGIYQTSNFRVQPTDSIVRFPNITNLCPFGEVFNATTFASVYAWNRKRISNCVADYSVLYNSTSFSTFKCYGVSPTKLNDLCFTNVYADSFVITGDEVRQIAPGQTGKIADYNYKLPDDFTGCVIAWNSKHIDAKEGGNFNYLYRLFRKANLKPFERDISTEIYQAGSKPCNGQTGLNCYYPLYRYGFYPTDGVGHQPYRVVVLSFELLNAPATVCGPKKSTNLVKNKCVNFNFNGLTGTGVLTESNKKFLPFQQFGRDIADTTDAVRDPQTLEILDITPCSFGGVSVITPGTNASNQVAVLYQDVNCTEVPVAIHADQLTPTWRVYSTGSNVFQTRAGCLIGAEHVNNSYECDIPIGAGICASYQTQTNSRSVASQSIIAYTMSLGAENSVAYSNNSIAIPTNFTISVTTEILPVSMTKTSVDCTMYICGDSTECSNLLLQYGSFCTQLNRALTGIAVEQDKNTQEVFAQVKQIYKTPPIKDFGGFNFSQILPDPSKPSKRSFIEDLLFNKVTLADAGFIKQYGDCLGDIAARDLICAQKFNGLTVLPPLLTDEMIAQYTSALLAGTITSGWTFGAGAALQIPFAMQMAYRFNGIGVTQNVLYENQKLIANQFNSAIGKIQDSLSSTASALGKLQDVVNQNAQALNTLVKQLSSNFGAISSVLNDILSRLDPPEAEVQIDRLITGRLQSLQTYVTQQLIRAAEIRASANLAATKMSECVLGQSKRVDFCGKGYHLMSFPQSAPHGVVFLHVTYVFAQEKNFTTAPAICHDGKAHFPREGVFVSNGTHWFVTQRNFYEPQIITTDNTFVSGSCDVVIGIVNNTVYDPLQPELDSGGGGSDIIKLLNEQVNKEMQSSNLYMSMSSWCYTHSLDGAGLFLFDHAAEEYEHAKKLIIFLNENNVPVQLTSISAPEHKFEGLTQIFQKAYEHEQHISESINNIVDHAIKSKDHATFNFLQWYVAEQHEEEVLFKDILDKIELIGNENHGLYLADQYVKGIAKSRKS

SEQ ID NO: 8852 - protein, 1315 aa, Artificial Sequence
  SARS-CoV-2/Wuhan/HBCDC-HB-01/2019__EPI_ISL_402132 spike protein (1-1147)(K986P_V987P_P1069F) Ferritin construct
MFVFLVLLPLVSSQCVNLTTRTQLPPAYTNSITRGVYYPDKVFRSSVLHSTQDLFLPFFSNVTWFHAIHVSGTNGTKRFDNPVLPFNDGVYFASTEKSNIIRGWIFGTTLDSKTQSLLIVNNATNVVIKVCEFQFCNDPFLGVYYHKNNKSWMESEFRVYSSANNCTFEYVSQPFLMDLEGKQGNFKNLREFVFKNIDGYFKIYSKHTPINLVRDLPQGFSALEPLVDLPIGINITRFQTLLALHRSYLTPGDSSSGWTAGAAAYYVGYLQPRTFLLKYNENGTITDAVDCALDPLSETKCTLKSFTVEKGIYQTSNFRVQPTESIVRFPNITNLCPFGEVFNATRFASVYAWNRKRISNCVADYSVLYNSASFSTFKCYGVSPTKLNDLCFTNVYADSFVIRGDEVRQIAPGQTGKIADYNYKLPDDFTGCVIAWNSNNLDSKVGGNYNYLYRLFRKSNLKPFERDISTEIYQAGSTPCNGVEGFNCYFPLQSYGFQPTNGVGYQPYRVVVLSFELLHAPATVCGPKKSTNLVKNKCVNFNFNGLTGTGVLTESNKKFLPFQQFGRDIADTTDAVRDPQTLEILDITPCSFGGVSVITPGTNTSNQVAVLYQDVNCTEVPVAIHADQLTPTWRVYSTGSNVFQTRAGCLIGAEHVNNSYECDIPIGAGICASYQTQTNSPRRARSVASQSIIAYTMSLGAENSVAYSNNSIAIPTNFTISVTTEILPVSMTKTSVDCTMYICGDSTECSNLLLQYGSFCTQLNRALTGIAVEQDKNTQEVFAQVKQIYKTPPIKDFGGFNFSQILPDPSKPSKRSFIEDLLFNKVTLADAGFIKQYGDCLGDIAARDLICAQKFNGLTVLPPLLTDEMIAQYTSALLAGTITSGWTFGAGAALQIPFAMQMAYRFNGIGVTQNVLYENQKLIANQFNSAIGKIQDSLSSTASALGKLQDVVNQNAQALNTLVKQLSSNFGAISSVLNDILSRLDPPEAEVQIDRLITGRLQSLQTYVTQQLIRAAEIRASANLAATKMSECVLGQSKRVDFCGKGYHLMSFPQSAPHGVVFLHVTYVFAQEKNFTTAPAICHDGKAHFPREGVFVSNGTHWFVTQRNFYEPQIITTDNTFVSGNCDVVIGIVNNTVYDPLQPELDSGGGGSDIIKLLNEQVNKEMQSSNLYMSMSSWCYTHSLDGAGLFLFDHAAEEYEHAKKLIIFLNENNVPVQLTSISAPEHKFEGLTQIFQKAYEHEQHISESINNIVDHAIKSKDHATFNFLQWYVAEQHEEEVLFKDILDKIELIGNENHGLYLADQYVKGIAKSRKS

SEQ ID NO: 8853 - protein, 1315 aa, Artificial Sequence
  SARS-CoV-2/Guangdong/20SF028/2020__EPI_ISL_403936 spike protein (1-1147)(K986P_V987P_P1069F) Ferritin construct
MFVFLVLLPLVSSQCVNLTTRTQLPPAYTNSFTRGVYYPDKVFRSSVLYSTQDLFLPFFSNVTWFHAIHVSGTNGTKRFDNPVLPFNDGVYFASTEKSNIIRGWIFGTTLDSKTQSLLIVNNATNVVIKVCEFQFCNDPFLGVYYHKNNKSWMESEFRVYSSANNCTFEYVSQPFLMDLEGKQGNFKNLREFVFKNIDGYFKIYSKHTPINLVRDLPQGFSALEPLVDLPIGINITRFQTLLALHRSYLTPGDSSSGWTAGAAAYYVGYLQPRTFLLKYNENGTITDAVDCALDPLSETKCTLKSFTVEKGIYQTSNFRVQPTESIVRFPNITNLCPFGEVFNATRFASVYAWNRKRISNCVADYSVLYNSASFSTFKCYGVSPTKLNDLCFTNVYADSFVIRGDEVRQIAPGQTGKIADYNYKLPDDFTGCVIAWNSNNLDSKVGGNYNYLYRLFRKSNLKPFERDISTEIYQAGSTPCNGVEGFNCYFPLQSYGFQPTNGVGYQPYRVVVLSFELLHAPATVCGPKKSTNLVKNKCVNFNFNGLTGTGVLTESNKKFLPFQQFGRDIADTTDAVRDPQTLEILDITPCSFGGVSVITPGTNTSNQVAVLYQDVNCTEVPVAIHADQLTPTWRVYSTGSNVFQTRAGCLIGAEHVNNSYECDIPIGAGICASYQTQTNSPRRARSVASQSIIAYTMSLGAENSVAYSNNSIAIPTNFTISVTTEILPVSMTKTSVDCTMYICGDSTECSNLLLQYGSFCTQLNRALTGIAVEQDKNTQEVFAQVKQIYKTPPIKDFGGFNFSQILPDPSKPSKRSFIEDLLFNKVTLADAGFIKQYGDCLGDIAARDLICAQKFNGLTVLPPLLTDEMIAQYTSALLAGTITSGWTFGAGAALQIPFAMQMAYRFNGIGVTQNVLYENQKLIANQFNSAIGKIQDSLSSTASALGKLQDVVNQNAQALNTLVKQLSSNFGAISSVLNDILSRLDPPEAEVQIDRLITGRLQSLQTYVTQQLIRAAEIRASANLAATKMSECVLGQSKRVDFCGKGYHLMSFPQSAPHGVVFLHVTYVFAQEKNFTTAPAICHDGKAHFPREGVFVSNGTHWFVTQRNFYEPQIITTDNTFVSGNCDVVIGIVNNTVYDPLQPELDSGGGGSDIIKLLNEQVNKEMQSSNLYMSMSSWCYTHSLDGAGLFLFDHAAEEYEHAKKLIIFLNENNVPVQLTSISAPEHKFEGLTQIFQKAYEHEQHISESINNIVDHAIKSKDHATFNFLQWYVAEQHEEEVLFKDILDKIELIGNENHGLYLADQYVKGIAKSRKS

SEQ ID NO: 8854 - protein, 1315 aa, Artificial Sequence
  SARS-CoV-2/Shenzhen/SZTH-001/2020__EPI_ISL_406592 spike protein (1-1147)(K986P_V987P_P1069F) Ferritin construct
MFVFLVLLPLVSSQCVNLTTRTQLPPAYTNSFTRGVYYPDKVFRSSVLHSTQDLFLPFFSNVTWFHAIHVSGTNGTKRFDNPVLPFNDGVYFASTEKSNIIRGWIFGTTLDSKTQSLLIVNNATNVVIKVCEFQFCNDPFLGVYYHKNNKSWMESEFRVYSSANNCTFEYVSQPFLMDLEGKQGNFKNLREFVFKNIDGYFKIYSKHTPINLVRDLPQGFSALEPLVDLPIGINITRFQTLLALHRSYLTPGDSSSGWTAGAAAYYVGYLQPRTFLLKYNENGTITDAVDCALDPLSETKCTLKSFTVEKGIYQTSNFRVQPTESIVRFPNITNLCPFGEVFNATRFASVYAWNRKRISNCVADYSVLYNSASFSTFKCYGVSPTKLNDLCFTNVYADSFVIRGDEVRQIAPGQTGKIADYNYKLPDDFTGCVIAWNSNNLDSKVGGNYNYLYRLFRKSNLKPFERDISTEIYQAGSTPCNGVEGFNCYFPLQSYGFQPTNGVGYQPYRVVVLSFELLHAPATVCGPKKSTNLVKNKCVNFNFNGLTGTGVLTESNKKFLPFQQFGRDIADTTDAVRDPQTLEILDITPCSFGGVSVITPGTNTSNQVAVLYQDVNCTEVPVAIHADQLTPTWRVYSTGSNVFQTRAGCLIGAEHVNNSYECDIPIGAGICASYQTQTNSPRRARSVASQSIIAYTMSLGAENSVAYSNNSIAIPTNFTISVTTEILPVSMTKTSVDCTMYICGDSTECSNLLLQYGSFCTQLNRALTGIAVEQDKNTQEVFAQVKQIYKTPPIKDFGGFNFSQILPDPSKPSKRSFIEDLLFNKVTLADAGFIKQYGDCLGDIAARDLICAQKFNGLTVLPPLLTDEMIAQYTSALLAGTITSGWTFGAGAALQIPFAMQMAYRFNGIGVTQNVLYENQKLIANQFNSAIGKIQDSLSSTASALGKLQDVVNQNAQALNTLVKQLSSNFGAISSVLNDILSRLDPPEAEVQIDRLITGRLQSLQTYVTQQLIRAAEIRASANLAATKMSECVLGQSKRVDFCGKGYHLMSFPQSAPHGVVFLHVTYVFAQEKNFTTAPAICHDGKAHFPREGVFVSNGTHWFVTQRNFYEPQIITTDNTFVSGNCDVLIGIVNNTVYDPLQPELDSGGGGSDIIKLLNEQVNKEMQSSNLYMSMSSWCYTHSLDGAGLFLFDHAAEEYEHAKKLIIFLNENNVPVQLTSISAPEHKFEGLTQIFQKAYEHEQHISESINNIVDHAIKSKDHATFNFLQWYVAEQHEEEVLFKDILDKIELIGNENHGLYLADQYVKGIAKSRKS

SEQ ID NO: 8855 - protein, 1315 aa, Artificial Sequence
  SARS-CoV-2/Shenzhen/SZTH-004/2020__EPI_ISL_406595 spike protein (1-1147)(K986P_V987P_P1069F) Ferritin construct
MFVFLVLLPLVSSQCVNLTTRTQLPPAYTNSFTRGVYYPDKVFRSSVLHSTQDLFLPFFSNVTWFHAIHVSGTNGTKRFDNPVLPFNDGVYFASTEKSNIIRGWIFGTTLDSKTQSLLIVNNATNVVIKVCEFQFCNDPFLGVYYHKNNKSWMESEFRVYSSANNCTFEYVSQPFLMDLEGKQGNFKNLREFVFKNIDGYFKIYSKHTPINLVRDLPQGFSALEPLVDLPIGINITRFQTLLALHRSYLTPGDSSSGWTAGAAAYYVGYLQPRTFLLKYNENGTITDAVDCALDPLSETKCTLKSFTVEKGIYQTSNFRVQPTESIVRFPNITNLCPFGEVFNATRFASVYAWDRKRISNCVAYYSVLYNSASFSTFKCYGVSPTKLNDLCFTNVYADSFVIRGDEVRQIAPGQTGKIADYNYKLPDDFTGCVIAWNSNNLDSKVGGNYNYLYRLFRKSNLKPFERDISTEIYQAGSTPCNGVEGFNCYFPLQSYGFQPTNGVGYQPYRVVVLSFELLHAPATVCGPKKSTNLVKNKCVNFNFNGLTGTGVLTESNKKFLPFQQFGRDIADTTDAVRDPQTLEILDITPCSFGGVSVITPGTNTSNQVAVLYQDVNCTEVPVAIHADQLTPTWRVYSTGSNVFQTRAGCLIGAEHVNNSYECDIPIGAGICASYQTQTNSPRRARSVASQSIIAYTMSLGAENSVAYSNNSIAIPTNFTISVTTEILPVSMTKTSVDCTMYICGDSTECSNLLLQYGSFCTQLNRALTGIAVEQDKNTQEVFAQVKQIYKTPPIKDFGGFNFSQILPDPSKPSKRSFIEDLLFNKVTLADAGFIKQYGDCLGDIAARDLICAQKFNGLTVLPPLLTDEMIAQYTSALLAGTITSGWTFGAGAALQIPFAMQMAYRFNGIGVTQNVLYENQKLIANQFNSAIGKIQDSLSSTASALGKLQDVVNQNAQALNTLVKQLSSNFGAISSVLNDILSRLDPPEAEVQIDRLITGRLQSLQTYVTQQLIRAAEIRASANLAATKMSECVLGQSKRVDFCGKGYHLMSFPQSAPHGVVFLHVTYVFAQEKNFTTAPAICHDGKAHFPREGVFVSNGTHWFVTQRNFYEPQIITTDNTFVSGNCDVVIGIVNNTVYDPLQPELDSGGGGSDIIKLLNEQVNKEMQSSNLYMSMSSWCYTHSLDGAGLFLFDHAAEEYEHAKKLIIFLNENNVPVQLTSISAPEHKFEGLTQIFQKAYEHEQHISESINNIVDHAIKSKDHATFNFLQWYVAEQHEEEVLFKDILDKIELIGNENHGLYLADQYVKGIAKSRKS

SEQ ID NO: 8856 - protein, 1315 aa, Artificial Sequence
  SARS-CoV-2/France/IDF0372/2020__EPI_ISL_406596 spike protein (1-1147)(K986P_V987P_P1069F) Ferritin construct
MFVFLVLLPLVSSQCVNLTTRTQLPPAYTNSFTRGVYYPDKVFRSSVLHSTQDLFLPFFSNVTWFHAIHVSGTNGTKRFDNPVLPFNDGVYFASTEKSNIIRGWIFGTTLDSKTQSLLIVNNATNVVIKVCEFQFCNDPFLGVYYHKNNKSWMESEFRVYSSANNCTFEYVSQPFLMDLEGKQGNFKNLREFVFKNIDGYFKIYSKHTPINLVRDLPQGFSALEPLVDLPIGINITRFQTLLALHRSYLTPGDSSSGWTAGAAAYYVGYLQPRTFLLKYNENGTITDAVDCALDPLSETKCTLKSFTVEKGIYQTSNFRVQPTESIVRFPNITNLCPFGEVFNATRFASVYAWNRKRISNCVADYSFLYNSASFSTFKCYGVSPTKLNDLCFTNVYADSFVIRGDEVRQIAPGQTGKIADYNYKLPDDFTGCVIAWNSNNLDSKVGGNYNYLYRLFRKSNLKPFERDISTEIYQAGSTPCNGVEGFNCYFPLQSYGFQPTNGVGYQPYRVVVLSFELLHAPATVCGPKKSTNLVKNKCVNFNFNGLTGTGVLTESNKKFLPFQQFGRDIADTTDAVRDPQTLEILDITPCSFGGVSVITPGTNTSNQVAVLYQDVNCTEVPVAIHADQLTPTWRVYSTGSNVFQTRAGCLIGAEHVNNSYECDIPIGAGICASYQTQTNSPRRARSVASQSIIAYTMSLGAENSVAYSNNSIAIPTNFTISVTTEILPVSMTKTSVDCTMYICGDSTECSNLLLQYGSFCTQLNRALTGIAVEQDKNTQEVFAQVKQIYKTPPIKDFGGFNFSQILPDPSKPSKRSFIEDLLFNKVTLADAGFIKQYGDCLGDIAARDLICAQKFNGLTVLPPLLTDEMIAQYTSALLAGTITSGWTFGAGAALQIPFAMQMAYRFNGIGVTQNVLYENQKLIANQFNSAIGKIQDSLSSTASALGKLQDVVNQNAQALNTLVKQLSSNFGAISSVLNDILSRLDPPEAEVQIDRLITGRLQSLQTYVTQQLIRAAEIRASANLAATKMSECVLGQSKRVDFCGKGYHLMSFPQSAPHGVVFLHVTYVFAQEKNFTTAPAICHDGKAHFPREGVFVSNGTHWFVTQRNFYEPQIITTDNTFVSGNCDVVIGIVNNTVYDPLQPELDSGGGGSDIIKLLNEQVNKEMQSSNLYMSMSSWCYTHSLDGAGLFLFDHAAEEYEHAKKLIIFLNENNVPVQLTSISAPEHKFEGLTQIFQKAYEHEQHISESINNIVDHAIKSKDHATFNFLQWYVAEQHEEEVLFKDILDKIELIGNENHGLYLADQYVKGIAKSRKS

SEQ ID NO: 8857 - protein, 1315 aa, Artificial Sequence
  SARS-CoV-2/Australia/VIC01/2020__EPI_ISL_406844 spike protein (1-1147)(K986P_V987P_P1069F) Ferritin construct
MFVFLVLLPLVSSQCVNLTTRTQLPPAYTNSFTRGVYYPDKVFRSSVLHSTQDLFLPFFSNVTWFHAIHVSGTNGTKRFDNPVLPFNDGVYFASTEKSNIIRGWIFGTTLDSKTQSLLIVNNATNVVIKVCEFQFCNDPFLGVYYHKNNKSWMESEFRVYSSANNCTFEYVSQPFLMDLEGKQGNFKNLREFVFKNIDGYFKIYSKHTPINLVRDLPQGFSALEPLVDLPIGINITRFQTLLALHRRYLTPGDSSSGWTAGAAAYYVGYLQPRTFLLKYNENGTITDAVDCALDPLSETKCTLKSFTVEKGIYQTSNFRVQPTESIVRFPNITNLCPFGEVFNATRFASVYAWNRKRISNCVADYSVLYNSASFSTFKCYGVSPTKLNDLCFTNVYADSFVIRGDEVRQIAPGQTGKIADYNYKLPDDFTGCVIAWNSNNLDSKVGGNYNYLYRLFRKSNLKPFERDISTEIYQAGSTPCNGVEGFNCYFPLQSYGFQPTNGVGYQPYRVVVLSFELLHAPATVCGPKKSTNLVKNKCVNFNFNGLTGTGVLTESNKKFLPFQQFGRDIADTTDAVRDPQTLEILDITPCSFGGVSVITPGTNTSNQVAVLYQDVNCTEVPVAIHADQLTPTWRVYSTGSNVFQTRAGCLIGAEHVNNSYECDIPIGAGICASYQTQTNSPRRARSVASQSIIAYTMSLGAENSVAYSNNSIAIPTNFTISVTTEILPVSMTKTSVDCTMYICGDSTECSNLLLQYGSFCTQLNRALTGIAVEQDKNTQEVFAQVKQIYKTPPIKDFGGFNFSQILPDPSKPSKRSFIEDLLFNKVTLADAGFIKQYGDCLGDIAARDLICAQKFNGLTVLPPLLTDEMIAQYTSALLAGTITSGWTFGAGAALQIPFAMQMAYRFNGIGVTQNVLYENQKLIANQFNSAIGKIQDSLSSTASALGKLQDVVNQNAQALNTLVKQLSSNFGAISSVLNDILSRLDPPEAEVQIDRLITGRLQSLQTYVTQQLIRAAEIRASANLAATKMSECVLGQSKRVDFCGKGYHLMSFPQSAPHGVVFLHVTYVFAQEKNFTTAPAICHDGKAHFPREGVFVSNGTHWFVTQRNFYEPQIITTDNTFVSGNCDVVIGIVNNTVYDPLQPELDSGGGGSDIIKLLNEQVNKEMQSSNLYMSMSSWCYTHSLDGAGLFLFDHAAEEYEHAKKLIIFLNENNVPVQLTSISAPEHKFEGLTQIFQKAYEHEQHISESINNIVDHAIKSKDHATFNFLQWYVAEQHEEEVLFKDILDKIELIGNENHGLYLADQYVKGIAKSRKS

SEQ ID NO: 8858 - protein, 1315 aa, Artificial Sequence
  SARS-CoV-2/Germany/BavPat1/2020__EPI_ISL_406862 spike protein (1-1147)(K986P_V987P_P1069F) Ferritin construct
MFVFLVLLPLVSSQCVNLTTRTQLPPAYTNSFTRGVYYPDKVFRSSVLHSTQDLFLPFFSNVTWFHAIHVSGTNGTKRFDNPVLPFNDGVYFASTEKSNIIRGWIFGTTLDSKTQSLLIVNNATNVVIKVCEFQFCNDPFLGVYYHKNNKSWMESEFRVYSSANNCTFEYVSQPFLMDLEGKQGNFKNLREFVFKNIDGYFKIYSKHTPINLVRDLPQGFSALEPLVDLPIGINITRFQTLLALHRSYLTPGDSSSGWTAGAAAYYVGYLQPRTFLLKYNENGTITDAVDCALDPLSETKCTLKSFTVEKGIYQTSNFRVQPTESIVRFPNITNLCPFGEVFNATRFASVYAWNRKRISNCVADYSVLYNSASFSTFKCYGVSPTKLNDLCFTNVYADSFVIRGDEVRQIAPGQTGKIADYNYKLPDDFTGCVIAWNSNNLDSKVGGNYNYLYRLFRKSNLKPFERDISTEIYQAGSTPCNGVEGFNCYFPLQSYGFQPTNGVGYQPYRVVVLSFELLHAPATVCGPKKSTNLVKNKCVNFNFNGLTGTGVLTESNKKFLPFQQFGRDIADTTDAVRDPQTLEILDITPCSFGGVSVITPGTNTSNQVAVLYQGVNCTEVPVAIHADQLTPTWRVYSTGSNVFQTRAGCLIGAEHVNNSYECDIPIGAGICASYQTQTNSPRRARSVASQSIIAYTMSLGAENSVAYSNNSIAIPTNFTISVTTEILPVSMTKTSVDCTMYICGDSTECSNLLLQYGSFCTQLNRALTGIAVEQDKNTQEVFAQVKQIYKTPPIKDFGGFNFSQILPDPSKPSKRSFIEDLLFNKVTLADAGFIKQYGDCLGDIAARDLICAQKFNGLTVLPPLLTDEMIAQYTSALLAGTITSGWTFGAGAALQIPFAMQMAYRFNGIGVTQNVLYENQKLIANQFNSAIGKIQDSLSSTASALGKLQDVVNQNAQALNTLVKQLSSNFGAISSVLNDILSRLDPPEAEVQIDRLITGRLQSLQTYVTQQLIRAAEIRASANLAATKMSECVLGQSKRVDFCGKGYHLMSFPQSAPHGVVFLHVTYVFAQEKNFTTAPAICHDGKAHFPREGVFVSNGTHWFVTQRNFYEPQIITTDNTFVSGNCDVVIGIVNNTVYDPLQPELDSGGGGSDIIKLLNEQVNKEMQSSNLYMSMSSWCYTHSLDGAGLFLFDHAAEEYEHAKKLIIFLNENNVPVQLTSISAPEHKFEGLTQIFQKAYEHEQHISESINNIVDHAIKSKDHATFNFLQWYVAEQHEEEVLFKDILDKIELIGNENHGLYLADQYVKGIAKSRKS

SEQ ID NO: 8859 - protein, 1315 aa, Artificial Sequence
  SARS-CoV-2/Wuhan/HBCDC-HB-02/2020__EPI_ISL_412978 spike protein (1-1147)(K986P_V987P_P1069F) Ferritin construct
MFVFLVLLPLVSSQCVNLTTRTQLPPAYTNSFTRGVYYPDKVFRSSVLHSTQDLFLPFFSNVTWFHAIHVSGTNGTKRFDNPVLPFNDGVYFASTEKSNIIRGWIFGTTLDSKTQSLLIVNNATNVVIKVCEFQFCNDPFLGVYYHKNNKSWMESEFRVYSSANNCTFEYVSQPFLMDLEGKQGNFKNLREFVFKNIDGYFKIYSKHTPINLVRDLPQGFSALEPLVDLPIGINITRFQTLLALHRSYLTPGDSSSGWTAGAAAYYVGYLQPRTFLLKYNENGTITDAVDCALDPLSETKCTLKSFTVEKGIYQTSNFRVQPTESIVRFPNITNLCPFGEVFNATRFASVYAWNRKRISNCVADYSVLYNSASFSTFKCYGVSPTKLNDLCFTNVYADSFVIRGDEVRQIAPGQTGKIADYNYKLPDDFTGCVIAWNSNNLDSKVGGNYNYLYRLFRKSNLKPFERDISTEIYQAGSTPCNGVEGFNCYFPLQSYGFQPTNGVGYQPYRVVVLSFELLHAPATVCGPKKSTNLVKNKCVNFNFNGLTGTGVLTESNKKFLPFQQFGRDIADTTDAVRDPQTLEILDITPCSFGGVSVITPGTNTSNQVAVLYQDVNCTEVPVAIHADQLTPTWRVYSTGSNVFQTRAGCLIGAEHVNNSYECDIPIGAGICASYQTQTNSPRRARSVASQSIIAYTMSLGAENSVAYSNNSIAIPTNFTISVTTEILPVSMTKTSVDCTMYICGDSTECSNFLLQYGSFCTQLNRALTGIAVEQDKNTQEVFAQVKQIYKTPPIKDFGGFNFSQILPDPSKPSKRSFIEDLLFNKVTLADAGFIKQYGDCLGDIAARDLICAQKFNGLTVLPPLLTDEMIAQYTSALLAGTITSGWTFGAGAALQIPFAMQMAYRFNGIGVTQNVLYENQKLIANQFNSAIGKIQDSLSSTASALGKLQDVVNQNAQALNTLVKQLSSNFGAISSVLNDILSRLDPPEAEVQIDRLITGRLQSLQTYVTQQLIRAAEIRASANLAATKMSECVLGQSKRVDFCGKGYHLMSFPQSAPHGVVFLHVTYVFAQEKNFTTAPAICHDGKAHFPREGVFVSNGTHWFVTQRNFYEPQIITTDNTFVSGNCDVVIGIVNNTVYDPLQPELDSGGGGSDIIKLLNEQVNKEMQSSNLYMSMSSWCYTHSLDGAGLFLFDHAAEEYEHAKKLIIFLNENNVPVQLTSISAPEHKFEGLTQIFQKAYEHEQHISESINNIVDHAIKSKDHATFNFLQWYVAEQHEEEVLFKDILDKIELIGNENHGLYLADQYVKGIAKSRKS

SEQ ID NO: 8860 - protein, 1315 aa, Artificial Sequence
  SARS-CoV-2/Australia/QLD02/2020__EPI_ISL_407896 spike protein (1-1147)(K986P_V987P_P1069F) Ferritin construct
MFVFLVLLPLVSSQCVNLTTRTQLPPAYTNSFTRGVYYPDKVFRSSVLHSTQDLFLPFFSNVTWFHAIHVSGTNGTKRFDNPVLPFNDGVYFASTEKSNIIRGWIFGTTLDSKTQSLLIVNNATNVVIKVCEFQFCNDPFLGVYYHKNNKSWMESEFRVYSSANNCTFEYVSQPFLMDLEGKQGNFKNLREFVFKNIDGYFKIYSKHTPINLVRDLPQGFSALEPLVDLPIGINITRFQTLLALHRSYLTPGDSSSGWTAGAAAYYVGYLQPRTFLLKYNENGTITDAVDCALDPLSETKCTLKSFTVEKGIYQTSNFRVQPTESIVRFPNITNLCPFGEVFNATRFASVYAWNRKRISNCVADYSVLYNSASFSTFKCYGVSPTKLNDLCFTNVYADSFVIRGDEVRQIAPGQTGKIADYNYKLPDDFTGCVIAWNSNNLDSKVGGNYNYLYRLFRKSNLKPFERDISTEIYQAGSTPCNGVEGFNCYFPLQSYGFQPTNGVGYQPYRVVVLSFELLHAPATVCGPKKSTNLVKNKCVNFNFNGLTGTGVLTESNKKFLPFQQFGRDIADTTDAVRDPQTLEILDITPCSFGGVSVITPGTNTSNQVAVLYQDVNCTEVPVAIHADQLTPTWRVYSTGSNVFQTRAGCLIGAEHVNNSYECDIPIGAGICASYQTQTNSPRRARSVASQSIIAYTMSLGAENSVAYSNNSIAIPTNFTISVTTEILPVSMTKTSVDCTMYICGDSTECSNLLLQYGSFCTQLNRALTGIAVEQDKNTQEVFAQVKQIYKTPPIKDFGGFNFSQILPDPSKPSKRSFIEDLLFNKVTLADAGFIKQYGDCLGDIAARDLICAQKFNGLTVLPPLLTDEMIAQYTSALLAGTITSGWTFGAGAALQIPFAMQMAYRFNGIGVTQNVLYENQKLIANQFNSAIGKIQDSLSSTASALGKLQDVVNQNAQALNTLVKQLSSNFGAISSVLNDILSRLDPPEAEVQIDRLITGRLQSLQTYVTQQLIRAAEIRASANLAATKMSECVLGQSKRVDFCGKGYHLMSFPQSAPHGVVFLHVTYVFAQEKNFTTAPAICHDGKAHFPREGVFVSNGTHWFVTQRNFYEPQIITTDNTFVSGNCDVVIGIVNNTVYDPLQLELDSGGGGSDIIKLLNEQVNKEMQSSNLYMSMSSWCYTHSLDGAGLFLFDHAAEEYEHAKKLIIFLNENNVPVQLTSISAPEHKFEGLTQIFQKAYEHEQHISESINNIVDHAIKSKDHATFNFLQWYVAEQHEEEVLFKDILDKIELIGNENHGLYLADQYVKGIAKSRKS

SEQ ID NO: 8861 - protein, 1315 aa, Artificial Sequence
  SARS-CoV-2/India/1-31/2020__EPI_ISL_413523 spike protein (1-1147)(K986P_V987P_P1069F) Ferritin construct
MFVFLVLLPLVSSQCVNLTTRTQLPPAYTNSFTRGVYYPDKVFRSSVLHSTQDLFLPFFSNVTWFHAIHVSGTNGTKRFDNPVLPFNDGVYFASTEKSNIIRGWIFGTTLDSKTQSLLIVNNATNVVIKVCEFQFCNDPFLGVYYHKNNKSWMESEFRVYSSANNCTFEYVSQPFLMDLEGKQGNFKNLREFVFKNIDGYFKIYSKHTPINLVRDLPQGFSALEPLVDLPIGINITRFQTLLALHRSYLTPGDSSSGWTAGAAAYYVGYLQPRTFLLKYNENGTITDAVDCALDPLSETKCTLKSFTVEKGIYQTSNFRVQPTESIVRFPNITNLCPFGEVFNATRFASVYAWNRKRISNCVADYSVLYNSASFSTFKCYGVSPTKLNDLCFTNVYADSFVIRGDEVRQIAPGQTGKIADYNYKLPDDFTGCVIAWNSNNLDSKVGGNYNYLYRLFRKSNLKPFERDISTEIYQAGSTPCNGVEGFNCYFPLQSYGFQPTNGVGYQPYRVVVLSFELLHAPATVCGPKKSTNLVKNKCVNFNFNGLTGTGVLTESNKKFLPFQQFGRDIADTTDAVRDPQTLEILDITPCSFGGVSVITPGTNTSNQVAVLYQDVNCTEVPVAIHADQLTPTWRVYSTGSNVFQTRAGCLIGAEHVNNSYECDIPIGAGICASYQTQTNSPRRARSVASQSIIAYTMSLGAENSVAYSNNSIAIPTNFTISVTTEILPVSMTKTSVDCTMYICGDSTECSNLLLQYGSFCTQLNRALTGIAVEQDKNTQEVFAQVKQIYKTPPIKDFGGFNFSQILPDPSKPSKRSFIEDLLFNKVTLADAGFIKQYGDCLGDIAARDLICAQKFNGLTVLPPLLTDEMIAQYTSALLAGTITSGWTFGAGAALQIPFAMQMAYRFNGIGVTQNVLYENQKLIANQFNSVIGKIQDSLSSTASALGKLQDVVNQNAQALNTLVKQLSSNFGAISSVLNDILSRLDPPEAEVQIDRLITGRLQSLQTYVTQQLIRAAEIRASANLAATKMSECVLGQSKRVDFCGKGYHLMSFPQSAPHGVVFLHVTYVFAQEKNFTTAPAICHDGKAHFPREGVFVSNGTHWFVTQRNFYEPQIITTDNTFVSGNCDVVIGIVNNTVYDPLQPELDSGGGGSDIIKLLNEQVNKEMQSSNLYMSMSSWCYTHSLDGAGLFLFDHAAEEYEHAKKLIIFLNENNVPVQLTSISAPEHKFEGLTQIFQKAYEHEQHISESINNIVDHAIKSKDHATFNFLQWYVAEQHEEEVLFKDILDKIELIGNENHGLYLADQYVKGIAKSRKS

SEQ ID NO: 8862 - protein, 1315 aa, Artificial Sequence
  SARS-CoV-2/Guangdong/GD2020087-P0008/2020__EPI_ISL_413863 spike protein (1-1147)(K986P_V987P_P1069F) Ferritin construct
MFVFLVLLPLVSSQCVNLTTRTQLPPAYTNSFTRGVYYPDKVFRSSVLHSTQDLFLPFFSNVTWFHAIHVSGTNGTKRFDNPVLPFNDGVYFASTEKSNIIRGWIFGTTLDSKTQSLLIVNNATNVVIKVCEFQFCNDPFLGVYYHKNNKSWMESEFRVYSSANNCTFEYVSQPFLMDLEGKQGNFKNLREFVFKNIDGYFKIYSKHTPINLVRDLPQGFSALEPLVDLPIGINITRFQTLLALHRSYLTPGDSSSGWTAGAAAYYVGYLQPRTFLLKYNENGTITDAVDCALDPLSETKCTLKSFTVEKGIYQTSNFRVQPTESIVRFPNITNLCPFGEVFNATRFASVYAWNRKRISNCVADYSVLYNSASFSTFKCYGVSPTKLNDLCFTNVYADSFVIRGDEVREIAPGQTGKIADYNYKLPDDFTGCVIAWNSNNLDSKVGGNYNYLYRLFRKSNLKPFERDISTEIYQAGSTPCNGVEGFNCYFPLQSYGFQPTNGVGYQPYRVVVLSFELLHAPATVCGPKKSTNLVKNKCVNFNFNGLTGTGVLTESNKKFLPFQQFGRDIADTTDAVRDPQTLEILDITPCSFGGVSVITPGTNTSNQVAVLYQDVNCTEVPVAIHADQLTPTWRVYSTGSNVFQTRAGCLIGAEHVNNSYECDIPIGAGICASYQTQTNSPRRARSVASQSIIAYTMSLGAENSVAYSNNSIAIPTNFTISVTTEILPVSMTKTSVDCTMYICGDSTECSNLLLQYGSFCTQLNRALTGIAVEQDKNTQEVFAQVKQIYKTPPIKDFGGFNFSQILPDPSKPSKRSFIEDLLFNKVTLADAGFIKQYGDCLGDIAARDLICAQKFNGLTVLPPLLTDEMIAQYTSALLAGTITSGWTFGAGAALQIPFAMQMAYRFNGIGVTQNVLYENQKLIANQFNSAIGKIQDSLSSTASALGKLQDVVNQNAQALNTLVKQLSSNFGAISSVLNDILSRLDPPEAEVQIDRLITGRLQSLQTYVTQQLIRAAEIRASANLAATKMSECVLGQSKRVDFCGKGYHLMSFPQSAPHGVVFLHVTYVFAQEKNFTTAPAICHDGKAHFPREGVFVSNGTHWFVTQRNFYEPQIITTDNTFVSGNCDVVIGIVNNTVYDPLQPELDSGGGGSDIIKLLNEQVNKEMQSSNLYMSMSSWCYTHSLDGAGLFLFDHAAEEYEHAKKLIIFLNENNVPVQLTSISAPEHKFEGLTQIFQKAYEHEQHISESINNIVDHAIKSKDHATFNFLQWYVAEQHEEEVLFKDILDKIELIGNENHGLYLADQYVKGIAKSRKS

SEQ ID NO: 8863 - protein, 1315 aa, Artificial Sequence
  SARS-CoV-2/Sweden/01/2020__EPI_ISL_411951 spike protein (1-1147)(K986P_V987P_P1069F) Ferritin construct
MFVFLVLLPLVSSQCVNLTTRTQLPPAYTNSFTRGVYYPDKVFRSSVLHSTQDLFLPFFSNVTWFHAIHVSGTNGTKRFDNPVLPFNDGVYFASTEKSNIIRGWIFGTTLDSKTQSLLIVNNATNVVIKVCEFQFCNDPFLGVYYHKNNKSWMESEFRVYSSANNCTFEYVSQPFLMDLEGKQGNFKNLREFVFKNIDGYFKIYSKHTPINLVRDLPQGFSALEPLVDLPIGINITRFQTLLALHRSYLTPGDSSSGWTAGAAAYYVGYLQPRTFLLKYNENGTITDAVDCALDPLSETKCTLKSFTVEKGIYQTSNFRVQPTESIVRFPNITNLCPFGEVFNATRFASVYAWNRKRISNCVADYSVLYNSASFSTFKCYGVSPTKLNDLCFTNVYADSFVIRGDEVRQIAPGQTGKIADYNYKLPDDFTGCVIAWNSNNLDSKVGGNYNYLYRLFRKSNLKPFERDISTEIYQAGSTPCNGVEGFNCYFPLQSYGFQPTNGVGYQPYRVVVLSFELLHAPATVCGPKKSTNLVKNKCVNFNFNGLTGTGVLTESNKKFLPFQQFGRDIADTTDAVRDPQTLEILDITPCSFGGVSVITPGTNTSNQVAVLYQDVNCTEVPVAIHADQLTPTWRVYSTGSNVFQTRAGCLIGAEHVNNSYECDIPIGAGICASYQTQTNSPRRARSVASQSIIAYTMSLGAENSVAYSNNSIAIPTNFTISVTTEILPVSMTKTSVDCTMYICGDSTECSNLLLQYGSFCTQLNRALTGIAVEQDKNTQEVFAQVKQIYKTPPIKDCGGFNFSQILPDPSKPSKRSFIEDLLFNKVTLADAGFIKQYGDCLGDIAARDLICAQKFNGLTVLPPLLTDEMIAQYTSALLAGTITSGWTFGAGAALQIPFAMQMAYRFNGIGVTQNVLYENQKLIANQFNSAIGKIQDSLSSTASALGKLQDVVNQNAQALNTLVKQLSSNFGAISSVLNDILSRLDPPEAEVQIDRLITGRLQSLQTYVTQQLIRAAEIRASANLAATKMSECVLGQSKRVDFCGKGYHLMSFPQSAPHGVVFLHVTYVFAQEKNFTTAPAICHDGKAHFPREGVFVSNGTHWFVTQRNFYEPQIITTDNTFVSGNCDVVIGIVNNTVYDPLQPELDSGGGGSDIIKLLNEQVNKEMQSSNLYMSMSSWCYTHSLDGAGLFLFDHAAEEYEHAKKLIIFLNENNVPVQLTSISAPEHKFEGLTQIFQKAYEHEQHISESINNIVDHAIKSKDHATFNFLQWYVAEQHEEEVLFKDILDKIELIGNENHGLYLADQYVKGIAKSRKS

SEQ ID NO: 8864 - protein, 1315 aa, Artificial Sequence
  SARS-CoV-2/Tianmen/HBCDC-HB-07/2020__EPI_ISL_412983 spike protein (1-1147)(K986P_V987P_P1069F) Ferritin construct
MFVFLVLLPLVSSQCVNLTTRTQLPPAYTNSFTRGVYYPDKVFRSSVLHSTQDLFLPFFSNVTWFHAIHVSGTNGTKRFDNPVLPFNDGVYFASTEKSNIIRGWIFGTTLDSKTQSLLIVNNATNVVIKVCEFQFCNDPFLGVYYHKNNKSWMESEFRVYSSANNCTFEYVSQPFLMDLEGKQGNFKNLREFVFKNIDGYFKIYSKHTPINLVRDLPQGFSALEPLVDLPIGINITRFQTLLALHRSYLTPGDSSSGWTAGAAAYYVGYLQPRTFLLKYNENGTITDAVDCALDPLSETKCTLKSFTVEKGIYQTSNFRVQPTESIVRFPNITNLCPFGEVFNATRFASVYAWNRKRISNCVADYSVLYNSASFSTFKCYGVSPTKLNDLCFTNVYADSFVIRGDEVRQIAPGQTGKIADYNYKLPDDFTGCVIAWNSNNLDSKVGGNYNYLYRLFRKSNLKPFERDISTEIYQAGSTPCNGVEGFNCYFPLQSYGFQPTNGVGYQPYRVVVLSFELLHAPATVCGPKKSTNLVKNKCVNFNFNGLTGTGVLTESNKKFLPFQQFGRDIADTTDAVRDPQTLEILDITPCSFGGVSVITPGTNTSNQVAVLYQDLNCTEVPVAIHADQLTPTWRVYSTGSNVFQTRAGCLIGAEHVNNSYECDIPIGAGICASYQTQTNSPRRARSVASQSIIAYTMSLGAENSVAYSNNSIAIPTNFTISVTTEILPVSMTKTSVDCTMYICGDSTECSNLLLQYGSFCTQLNRALTGIAVEQDKNTQEVFAQVKQIYKTPPIKDFGGFNFSQILPDPSKPSKRSFIEDLLFNKVTLADAGFIKQYGDCLGDIAARDLICAQKFNGLTVLPPLLTDEMIAQYTSALLAGTITSGWTFGAGAALQIPFAMQMAYRFNGIGVTQNVLYENQKLIANQFNSAIGKIQDSLSSTASALGKLQDVVNQNAQALNTLVKQLSSNFGAISSVLNDILSRLDPPEAEVQIDRLITGRLQSLQTYVTQQLIRAAEIRASANLAATKMSECVLGQSKRVDFCGKGYHLMSFPQSAPHGVVFLHVTYVFAQEKNFTTAPAICHDGKAHFPREGVFVSNGTHWFVTQRNFYEPQIITTDNTFVSGNCDVVIGIVNNTVYDPLQPELDSGGGGSDIIKLLNEQVNKEMQSSNLYMSMSSWCYTHSLDGAGLFLFDHAAEEYEHAKKLIIFLNENNVPVQLTSISAPEHKFEGLTQIFQKAYEHEQHISESINNIVDHAIKSKDHATFNFLQWYVAEQHEEEVLFKDILDKIELIGNENHGLYLADQYVKGIAKSRKS

SEQ ID NO: 8865 - protein, 1315 aa, Artificial Sequence
  SARS-CoV-2/Hong Kong/case42_VM20002493/2020__EPI_ISL_414527 spike protein (1-1147)(K986P_V987P_P1069F) Ferritin construct
MFVFLVLLPLVSSQCVNLTTRTQLPPAYTNSFTRGVYYPDKVFRSSVLHSTQDLFLPFFSNVTWFHAIHVSGTNGTKRFDNPVLPFNDGVYFASTEKSNIIRGWIFGTTLDSKTQSLLIVNNATNVVIKVCEFQFCNDPFLGVYYHKNNKSWMESEFRVYSSANNCTFEYVSQPFLMDLEGKQGNFKNLREFVFKNIDGYFKIYSKHTPINLVRDLPQGFSALEPLVDLPIGINITRFQTLLALHRSYLTPGDSSSGWTAGAAAYYVGYLQPRTFLLKYNENGTITDAVDCALDPLSETKCTLKSFTVEKGIYQTSNFRVQPTESIVRFPNITNLCPFGEVFNATRFASVYAWNRKRISNCVADYSVLYNSASFSTFKCYGVSPTKLNDLCFTNVYADSFVIRGDEVRQIAPGQTGKIADYNYKLPDDFTGCVIAWNSNNLDSKVGGNYNYLYRLFRKSNLKPFERDISTEIYQAGSTPCNGVEGFNCYFPLQSYGFQPTNGVGYQPYRVVVLSFELLHAPATVCGPKKSTNLVKNKCVNFNFNGLTGTGVLTESNKKFLPFQQFGRDIADTTDAVRDPQTLEILDITPCSFGGVSVITPGTNTSNQVAVLYQDVNCTEVPVAIHADQLTPTWRVYSTGSNVFQTRAGCLIGAEHVNNSYECDIPIGAGICASYQTQTNSPRRARSVASQSIIAYTMSLGAENSVAYSNNSIAIPTNFAISVTTEILPVSMTKTSVDCTMYICGDSTECSNLLLQYGSFCTQLNRALTGIAVEQDKNTQEVFAQVKQIYKTPPIKDFGGFNFSQILPDPSKPSKRSFIEDLLFNKVTLADAGFIKQYGDCLGDIAARDLICAQKFNGLTVLPPLLTDEMIAQYTSALLAGTITSGWTFGAGAALQIPFAMQMAYRFNGIGVTQNVLYENQKLIANQFNSAIGKIQDSLSSTASALGKLQDVVNQNAQALNTLVKQLSSNFGAISSVLNDILSRLDPPEAEVQIDRLITGRLQSLQTYVTQQLIRAAEIRASANLAATKMSECVLGQSKRVDFCGKGYHLMSFPQSAPHGVVFLHVTYVFAQEKNFTTAPAICHDGKAHFPREGVFVSNGTHWFVTQRNFYEPQIITTDNTFVSGNCDVVIGIVNNTVYDPLQPELDSGGGGSDIIKLLNEQVNKEMQSSNLYMSMSSWCYTHSLDGAGLFLFDHAAEEYEHAKKLIIFLNENNVPVQLTSISAPEHKFEGLTQIFQKAYEHEQHISESINNIVDHAIKSKDHATFNFLQWYVAEQHEEEVLFKDILDKIELIGNENHGLYLADQYVKGIAKSRKS

SEQ ID NO: 8866 - protein, 1315 aa, Artificial Sequence
  SARS-CoV-2/USA/CruiseA-23/2020__EPI_ISL_414482 spike protein (1-1147)(K986P_V987P_P1069F) Ferritin construct
MFVFLVLLPLVSSQCVNLTTRTQLPPAYTNSFTRGVYYPDKVFRSSVLHSTQDLFLPFFSNVTWFHAIHVSGTNGTKRFDNPVLPFNDGVYFASTEKSNIIRGWIFGTTLDSKTQSLLIVNNATNVVIKVCEFQFCNDPFLGVYYHKNNKSWMESEFRVYSSANNCTFEYVSQPFLMDLEVKQGNFKNLREFVFKNIDGYFKIYSKHTPINLVRDLPQGFSALEPLVDLPIGINITRFQTLLALHRSYLTPGDSSSGWTAGAAAYYVGYLQPRTFLLKYNENGTITDAVDCALDPLSETKCTLKSFTVEKGIYQTSNFRVQPTESIVRFPNITNLCPFGEVFNATRFASVYAWNRKRISNCVADYSVLYNSASFSTFKCYGVSPTKLNDLCFTNVYADSFVIRGDEVRQIAPGQTGKIADYNYKLPDDFTGCVIAWNSNNLDSKVGGNYNYLYRLFRKSNLKPFERDISTEIYQAGSTPCNGVEGFNCYFPLQSYGFQPTNGVGYQPYRVVVLSFELLHAPATVCGPKKSTNLVKNKCVNFNFNGLTGTGVLTESNKKFLPFQQFGRDIADTTDAVRDPQTLEILDITPCSFGGVSVITPGTNTSNQVAVLYQDVNCTEVPVAIHADQLTPTWRVYSTGSNVFQTRAGCLIGAEHVNNSYECDIPIGAGICASYQTQTNSPRRARSVASQSIIAYTMSLGAENSVAYSNNSIAIPTNFTISVTTEILPVSMTKTSVDCTMYICGDSTECSNLLLQYGSFCTQLNRALTGIAVEQDKNTQEVFAQVKQIYKTPPIKDFGGFNFSQILPDPSKPSKRSFIEDLLFNKVTLADAGFIKQYGDCLGDIAARDLICAQKFNGLTVLPPLLTDEMIAQYTSALLAGTITSGWTFGAGAALQIPFAMQMAYRFNGIGVTQNVLYENQKLIANQFNSAIGKIQDSLSSTASALGKLQDVVNQNAQALNTLVKQLSSNFGAISSVLNDILSRLDPPEAEVQIDRLITGRLQSLQTYVTQQLIRAAEIRASANLAATKMSECVLGQSKRVDFCGKGYHLMSFPQSAPHGVVFLHVTYVFAQEKNFTTAPAICHDGKAHFPREGVFVSNGTHWFVTQRNFYEPQIITTDNTFVSGNCDVVIGIVNNTVYDPLQPELDSGGGGSDIIKLLNEQVNKEMQSSNLYMSMSSWCYTHSLDGAGLFLFDHAAEEYEHAKKLIIFLNENNVPVQLTSISAPEHKFEGLTQIFQKAYEHEQHISESINNIVDHAIKSKDHATFNFLQWYVAEQHEEEVLFKDILDKIELIGNENHGLYLADQYVKGIAKSRKS

SEQ ID NO: 8867 - protein, 1315 aa, Artificial Sequence
  SARS-CoV-2/Hong Kong/case85_VM20002868/2020__EPI_ISL_414519 spike protein (1-1147)(K986P_V987P_P1069F) Ferritin construct
MFVFLVLVPLVSSQCVNLTTRTQLPPAYTNSFTRGVYYPDKVFRSSVLHSTQDLFLPFFSNVTWFHAIHVSGTNGTKRFDNPVLPFNDGVYFASTEKSNIIRGWIFGTTLDSKTQSLLIVNNATNVVIKVCEFQFCNDPFLGVYYHKNNKSWMESEFRVYSSANNCTFEYVSQPFLMDLEGKQGNFKNLREFVFKNIDGYFKIYSKHTPINLVRDLPQGFSALEPLVDLPIGINITRFQTLLALHRSYLTPGDSSSGWTAGAAAYYVGYLQPRTFLLKYNENGTITDAVDCALDPLSETKCTLKSFTVEKGIYQTSNFRVQPTESIVRFPNITNLCPFGEVFNATRFASVYAWNRKRISNCVADYSVLYNSASFSTFKCYGVSPTKLNDLCFTNVYADSFVIRGDEVRQIAPGQTGKIADYNYKLPDDFTGCVIAWNSNNLDSKVGGNYNYLYRLFRKSNLKPFERDISTEIYQAGSTPCNGVEGFNCYFPLQSYGFQPTNGVGYQPYRVVVLSFELLHAPATVCGPKKSTNLVKNKCVNFNFNGLTGTGVLTESNKKFLPFQQFGRDIADTTDAVRDPQTLEILDITPCSFGGVSVITPGTNTSNQVAVLYQDVNCTEVPVAIHADQLTPTWRVYSTGSNVFQTRAGCLIGAEHVNNSYECDIPIGAGICASYQTQTNSPRRARSVASQSIIAYTMSLGAENSVAYSNNSIAIPTNFTISVTTEILPVSMTKTSVDCTMYICGDSTECSNLLLQYGSFCTQLNRALTGIAVEQDKNTQEVFAQVKQIYKTPPIKDFGGFNFSQILPDPSKPSKRSFIEDLLFNKVTLADAGFIKQYGDCLGDIAARDLICAQKFNGLTVLPPLLTDEMIAQYTSALLAGTITSGWTFGAGAALQIPFAMQMAYRFNGIGVTQNVLYENQKLIANQFNSAIGKIQDSLSSTASALGKLQDVVNQNAQALNTLVKQLSSNFGAISSVLNDILSRLDPPEAEVQIDRLITGRLQSLQTYVTQQLIRAAEIRASANLAATKMSECVLGQSKRVDFCGKGYHLMSFPQSAPHGVVFLHVTYVFAQEKNFTTAPAICHDGKAHFPREGVFVSNGTHWFVTQRNFYEPQIITTDNTFVSGNCDVVIGIVNNTVYDPLQPELDSGGGGSDIIKLLNEQVNKEMQSSNLYMSMSSWCYTHSLDGAGLFLFDHAAEEYEHAKKLIIFLNENNVPVQLTSISAPEHKFEGLTQIFQKAYEHEQHISESINNIVDHAIKSKDHATFNFLQWYVAEQHEEEVLFKDILDKIELIGNENHGLYLADQYVKGIAKSRKS

SEQ ID NO: 8868 - protein, 1315 aa, Artificial Sequence; identical to SEQ ID NO: 8858
  SARS-CoV-2/England/200990660/2020__EPI_ISL_414523 spike protein (1-1147)(K986P_V987P_P1069F) Ferritin construct

SEQ ID NO: 8869 - protein, 1315 aa, Artificial Sequence
  SARS-CoV-2/Australia/NSW09/2020__EPI_ISL_413595 spike protein (1-1147)(K986P_V987P_P1069F) Ferritin construct
MFVFLVLLPLVSSQCVNLTTRTQLPPAYTNSFTRGVYYPDKVFRSSVLHSTQDLFLPFFSNVTWFHAIHVSGTNGTKRFDNPVLPFNDGVYFASTEKSNIIRGWIFGTTLDSKTQSLLIVNNATNVVIKVCEFQFCNDPFLGVYYHKNNKSWMESEFRVYSSANNCTFEYVSQPFLMDLEGKQGNFKNLREFVFKNIDGYFKIYSKHTPINLVRDLPQGFSALEPLVDLPIGINITRFQTLLALHRSYLTPGDSSSGWTAGAAAYYVGYLQPRTFLLKYNENGTITDAVDCALDPLSETKCTLKSFTVEKGIYQTSNFRVQPTESIVRFPNITNLCPFGEVFNATRFASVYAWNRKRISNCVADYSVLYNSASFSTFKCYGVSPTKLNDLCFTNVYADSFVIRGDEVRQIAPGQTGKIADYNYKLPDDFTGCVIAWNSNNLDSKVGGNYNYLYRLFRKSNLKPFERDISTEIYQAGSTPCNGVEGFNCYFPLQSYGFQPTNGVGYQPYRVVVLSFELLHAPATVCGPKKSTNLVKNKCVNFNFNGLTGTGVLTESNKKFLPFQQFGRDIADTTDAVRDPQTLEILDITPCSFGGVSVITPGTNTSNQVAVLYQDVNCTEVPVAIHADQLTPTWRVYSTGSNVFQTRAGCLIGAEHVNNSYECDIPIGAGICASYQTQTNSPRRARSVASQSIIAYTMSLGAENSVAYSNNSIAIPTNFTISVTTEILPVSMTKTSVDCTMYICGDSTECSNLLLQYGSFCTQLNRALTGIAVEQDKNTQEVFAQVKQIYKTPPIKDFGGFNFSQILPDPSKPSKRSFIEDLLFNKVTLADAGFIKQYGDCLGDIAARDLICAQKFNGLTVLPPLLTDEMIAQYTSALLAGTITSGWTFGAGAALQIPFAMQMAYRFNGIGVTQNVLYENQKLIANQFNSAIGKIQDSLSFTASALGKLQDVVNQNAQALNTLVKQLSSNFGAISSVLNDILSRLDPPEAEVQIDRLITGRLQSLQTYVTQQLIRAAEIRASANLAATKMSECVLGQSKRVDFCGKGYHLMSFPQSAPHGVVFLHVTYVFAQEKNFTTAPAICHDGKAHFPREGVFVSNGTHWFVTQRNFYEPQIITTDNTFVSGNCDVVIGIVNNTVYDPLQPELDSGGGGSDIIKLLNEQVNKEMQSSNLYMSMSSWCYTHSLDGAGLFLFDHAAEEYEHAKKLIIFLNENNVPVQLTSISAPEHKFEGLTQIFQKAYEHEQHISESINNIVDHAIKSKDHATFNFLQWYVAEQHEEEVLFKDILDKIELIGNENHGLYLADQYVKGIAKSRKS

SEQ ID NO: 8870 - protein, 1315 aa, Artificial Sequence; identical to SEQ ID NO: 8850
  SARS-CoV-2/Australia/NSW10/2020__EPI_ISL_413596 spike protein (1-1147)(K986P_V987P_P1069F) Ferritin construct

SEQ ID NO: 8871 - protein, 1315 aa, Artificial Sequence
  SARS-CoV-2/Switzerland/1000477797/2020__EPI_ISL_413023 spike protein (1-1147)(K986P_V987P_P1069F) Ferritin construct
MFVFLVLLPLVSSQCVNLTTRTQLPPAYTNSFTRGVYYPDKVFRSSVLHSTQDLFLPFFSNVTWFHAIHVSGTNGTKRFDNPVLPFNDGVYFASTEKSNIIRGWIFGTTLDSKTQSLLIVNNATNVVIKVCEFQFCNDPFLGVYYHKNNKSWMESEFRVYSSANNCTFEYVSQPFLMDLEGKQGNFKNLREFVFKNIDGYFNIYSKHTPINLVRDLPQGFSALEPLVDLPIGINITRFQTLLALHRSYLTPGDSSSGWTAGAAAYYVGYLQPRTFLLKYNENGTITDAVDCALDPLSETKCTLKSFTVEKGIYQTSNFRVQPTESIVRFPNITNLCPFGEVFNATRFASVYAWNRKRISNCVADYSVLYNSASFSTFKCYGVSPTKLNDLCFTNVYADSFVIRGDEVRQIAPGQTGKIADYNYKLPDDFTGCVIAWNSNNLDSKVGGNYNYLYRLFRKSNLKPFERDISTEIYQAGSTPCNGVEGFNCYFPLQSYGFQPTNGVGYQPYRVVVLSFELLHAPATVCGPKKSTNLVKNKCVNFNFNGLTGTGVLTESNKKFLPFQQFGRDIADTTDAVRDPQTLEILDITPCSFGGVSVITPGTNTSNQVAVLYQGVNCTEVPVAIHADQLTPTWRVYSTGSNVFQTRAGCLIGAEHVNNSYECDIPIGAGICASYQTQTNSPRRARSVASQSIIAYTMSLGAENSVAYSNNSIAIPTNFTISVTTEILPVSMTKTSVDCTMYICGDSTECSNLLLQYGSFCTQLNRALTGIAVEQDKNTQEVFAQVKQIYKTPPIKDFGGFNFSQILPDPSKPSKRSFIEDLLFNKVTLADAGFIKQYGDCLGDIAARDLICAQKFNGLTVLPPLLTDEMIAQYTSALLAGTITSGWTFGAGAALQIPFAMQMAYRFNGIGVTQNVLYENQKLIANQFNSAIGKIQDSLSSTASALGKLQDVVNQNAQALNTLVKQLSSNFGAISSVLNDILSRLDPPEAEVQIDRLITGRLQSLQTYVTQQLIRAAEIRASANLAATKMSECVLGQSKRVDFCGKGYHLMSFPQSAPHGVVFLHVTYVFAQEKNFTTAPAICHDGKAHFPREGVFVSNGTHWFVTQRNFYEPQIITTDNTFVSGNCDVVIGIVNNTVYDPLQPELDSGGGGSDIIKLLNEQVNKEMQSSNLYMSMSSWCYTHSLDGAGLFLFDHAAEEYEHAKKLIIFLNENNVPVQLTSISAPEHKFEGLTQIFQKAYEHEQHISESINNIVDHAIKSKDHATFNFLQWYVAEQHEEEVLFKDILDKIELIGNENHGLYLADQYVKGIAKSRKS

SEQ ID NO: 8872 - protein, 1315 aa, Artificial Sequence
  SARS-CoV-2/Belgium/BA-02291/2020__EPI_ISL_415159 spike protein (1-1147)(K986P_V987P_P1069F) Ferritin construct
MFVFLVLLPLVSSQCVNLTTRTQLPPAYTNSFTRGVYYPDKVFRSSVLHSTQDLFLPFFSNVTWFHAIHVSGTNGTKRFDNPVLPFNDGVYFASTEKSNIIRGWIFGTTLDSKTQSLLIVNNATNVVIKVCEFQFCNDPFLGVYYHKNNKSWMESEFRVYSSANNCTFEYVSQPFLMDLEGKQGNFKNLREFVFKNIDGYFKIYSKHTPINLVRDLPQGFSALEPLVDLPIGINITRFQTLLALHRSYLTPGDSSSGWTAGAAAYYVGYLQPRTFLLKYNENGTITDAVDCALDPLSETKCTLKSFTVEKGIYQTSNFRVQPTESIVRFPNITNLCPFGEVFNATRFASVYAWNRKRISNCVADYSVLYNSASFSTFKCYGVSPTKLNDLCFTNVYADSFVIRGDEVRQIAPGQTGKIADYNYKLPDDFTGCVIAWNSNNLDSKVGGNYNYLYRLFRRSNLKPFERDISTEIYQAGSTPCNGVEGFNCYFPLQSYGFQPTNGVGYQPYRVVVLSFELLPAPATVCGPKKSTNLVKNKCVNFNFNGLTGTGVLTESNKKFLPFQQFGRDIADTTDAVRDPQTLEILDITPCSFGGVSVITPGTNTSNQVAVLYQGVNCTEVPVAIHADQLTPTWRVYSTGSNVFQTRAGCLIGAEHVNNSYECDIPIGAGICASYQTQTNSPRRARSVASQSIIAYTMSLGAENSVAYSNNSIAIPTNFTISVTTEILPVSMTKTSVDCTMYICGDSTECSNLLLQYGSFCTQLNRALTGIAVEQDKNTQEVFAQVKQIYKTPPIKDFGGFNFSQILPDPSKPSKRSFIEDLLFNKVTLADAGFIKQYGDCLGDIAARDLICAQKFNGLTVLPPLLTDEMIAQYTSALLAGTITSGWTFGAGAALQIPFAMQMAYRFNGIGVTQNVLYENQKLIANQFNSAIGKIQDSLSSAAPALGKLQDVVNQNAQALNTLVKQLSSNFGAISSVLNDILSRLDPPEAEVQIDRLITGRLQSLQTYVTQQLIRAAEIRASANLAATKMSECVLGQSKRVDFCGKGYHLMSFPQSAPHGVVFLHVTYVFAQEKNFTTAPAICHDGKAHFPREGVFVSNGTHWFVTQRNFYEPQIITTDNTFVSGNCDVVIGIVNNTVYDPLQPELDSGGGGSDIIKLLNEQVNKEMQSSNLYMSMSSWCYTHSLDGAGLFLFDHAAEEYEHAKKLIIFLNENNVPVQLTSISAPEHKFEGLTQIFQKAYEHEQHISESINNIVDHAIKSKDHATFNFLQWYVAEQHEEEVLFKDILDKIELIGNENHGLYLADQYVKGIAKSRKS

SEQ ID NO: 8873 - protein, 1315 aa, Artificial Sequence
  SARS-CoV-2/USA/WA8-UW5/2020__EPI_ISL_413486 spike protein (1-1147)(K986P_V987P_P1069F) Ferritin construct
MFVFLVLLPLVSSQCVNLTTRTQLPPAYTNSFTRGVYYPDKVFRSSVLHSTQDLFLPFFSNVTWFHAIHVSGTNGTKRFDNPVLPFNDGVYFASTEKSNIIRGWIFGTTLDSKTQSLLIVNNATNVVIKVCEFQFCNDPFLGVYYHKNNKSWMESEFRVYSSANNCTFEYVSQPFLMDLEGKQGNFKNLREFVFKNIDGYFKIYSKHTPINLVRDLPQGFSALEPLVDLPIGINITRFQTLLALHRSYLTPGDSSSGWTAGAAAYYVGYLQPRTFLLKYNENGTITDAVDCALDPLSETKCTLKSFTVEKGIYQTSNFRVQPTESIVRFPNITNLCPFGEVFNATRFASVYAWNRKRISNCVADYSVLYNSASFSTFKCYGVSPTKLNDLCFTNVYADSFVIRGDEVRQIAPGQTGKIADYNYKLPDDFTGCVIAWNSNNLDSKVGGNYNYLYRLFRKSNLKPFERDISTEIYQAGSTPCNGVEGFNCYFPLQSYGFQPTNGVGYQPYRVVVLSFELLHAPATVCGPKKSTNLVKNKCVNFNFNGLTGTGVLTESNKKFLPFQQFGRDIADTTDAVRDPQTLEILDITPCSFGGVSVITPGTNTSNQVAVLYQDVNCTEVPVAIHADQLTPTWRVYSTGSNVFQTRAGCLIGAEYVNNSYECDIPIGAGICASYQTQTNSPRRARSVASQSIIAYTMSLGAENSVAYSNNSIAIPTNFTISVTTEILPVSMTKTSVDCTMYICGDSTECSNLLLQYGSFCTQLNRALTGIAVEQDKNTQEVFAQVKQIYKTPPIKDFGGFNFSQILPDPSKPSKRSFIEDLLFNKVTLADAGFIKQYGDCLGDIAARDLICAQKFNGLTVLPPLLTDEMIAQYTSALLAGTITSGWTFGAGAALQIPFAMQMAYRFNGIGVTQNVLYENQKLIANQFNSAIGKIQDSLSSTASALGKLQDVVNQNAQALNTLVKQLSSNFGAISSVLNDILSRLDPPEAEVQIDRLITGRLQSLQTYVTQQLIRAAEIRASANLAATKMSECVLGQSKRVDFCGKGYHLMSFPQSAPHGVVFLHVTYVFAQEKNFTTAPAICHDGKAHFPREGVFVSNGTHWFVTQRNFYEPQIITTDNTFVSGNCDVVIGIVNNTVYDPLQPELDSGGGGSDIIKLLNEQVNKEMQSSNLYMSMSSWCYTHSLDGAGLFLFDHAAEEYEHAKKLIIFLNENNVPVQLTSISAPEHKFEGLTQIFQKAYEHEQHISESINNIVDHAIKSKDHATFNFLQWYVAEQHEEEVLFKDILDKIELIGNENHGLYLADQYVKGIAKSRKS

SEQ ID NO: 8874 - protein, 1315 aa, Artificial Sequence
  SARS-CoV-2/England/20102000506/2020__EPI_ISL_415147 spike protein (1-1147)(K986P_V987P_P1069F) Ferritin construct
MFVFLVLLPLVSSQCVNLTTRTQLPPAYTNSFTRGVYYPDKVFRSSVLHSTQDLFLPFFSNVTWFHAIHVSGTNGTKRFDNPVLPFNDGVYFASTEKSNIIRGWIFGTTLDSKTQSLLIVNNATNVVIKVCEFQFCNDPFLGVYYHKNNKSWMESEFRVYSSANNCTFEYVSQPFLMDLEGKQGNFKNLREFVFKNIDGYFKIYSKHTPINLVRDLPQGFSALEPLVDLPIGINITRFQTLLALHRSYLTPGDSSSGWTAGAAAYYVGYLQPRTFLLKYNENGTITDAVDCALDPLSETKCTLKSFTVEKGIYQTSNFRVQPTESIVRFPNITNLCPFGEVFNATRFASVYAWNRKRISNCVADYSVLYNSASFSTFKCYGVSPTKLNDLCFTNVYADSFVIRGDEVRQIAPGQTGKIADYNYKLPDDFTGCVIAWNSNNLDSKVGGNYNYLYRLFRKSNLKPFERDISTEIYQAGSTPCNGVEGFNCYFPLQSYGFQPTNGVGYQPYRVVVLSFELLHAPATVCGPKKSTNLVKNKCVNFNFNGLTGTGVLTESNKKFLPFQQFGRDIADTTDAVRDPQTLEILDITPCSFGGVSVITPGTNTSNQVAVLYQGVNCTEVPVAIHADQLTPTWRVYSTGSNVFQTRAGCLIGAEHVNNSYECDIPIGAGICASYQTQTNSPRRARSVASQSIIAYTMSLGAENSVAYSNNSIAIPTNFTISVTTEILPVSMTKTSVDCTMYICGDSTECSNLLLQYGSFCTQLNRALTGIAVEQDKNTQEVFAQVKQIYKTPPIKDFGGFNFSQILPDPSKPSKRSFIEDLLFNKVTLADAGFIKQYGYCLGDIAARDLICAQKFNGLTVLPPLLTDEMIAQYTSALLAGTITSGWTFGAGAALQIPFAMQMAYRFNGIGVTQNVLYENQKLIANQFNSAIGKIQDSLSSTASALGKLQDVVNQNAQALNTLVKQLSSNFGAISSVLNDILSRLDPPEAEVQIDRLITGRLQSLQTYVTQQLIRAAEIRASANLAATKMSECVLGQSKRVDFCGKGYHLMSFPQSAPHGVVFLHVTYVFAQEKNFTTAPAICHDGKAHFPREGVFVSNGTHWFVTQRNFYEPQIITTDNTFVSGNCDVVIGIVNNTVYDPLQPELDSGGGGSDIIKLLNEQVNKEMQSSNLYMSMSSWCYTHSLDGAGLFLFDHAAEEYEHAKKLIIFLNENNVPVQLTSISAPEHKFEGLTQIFQKAYEHEQHISESINNIVDHAIKSKDHATFNFLQWYVAEQHEEEVLFKDILDKIELIGNENHGLYLADQYVKGIAKSRKS

SEQ ID NO: 8875 - protein, 1315 aa, Artificial Sequence
  SARS-CoV-2/Belgium/VAG-03013/2020__EPI_ISL_415155 spike protein (1-1147)(K986P_V987P_P1069F) Ferritin construct
MFVFLVLLPLVSSQCVNLTTRTQLPPAYTNSFTRGVYYPDKVFRSSVLHSTQDLFLPFFSNVTWFHAIHVSGTNGTKRFDNPVLPFNDGVYFASTEKSNIIRGWIFGTTLDSKTQSLLIVNNATNVVIKVCEFQFCNDPFLGVYYHKNNKSWMESEFRVYSSANNCTFEYVSQPFLMDLEGKQGNFKNLREFVFKNIDGYFKIYSKHTPINLVRDLPQGFSALEPLVDLPIGINITRFQTLLALHRSYLTPGDSSSGWTAGAAAYYVGYLQPRTFLLKYNENGTITDAVDCALDPLSETKCTLKSFTVEKGIYQTSNFRVQPTESIVRFPNITNLCPFGEVFNATRFASVYAWNRKRISNCVADYSVLYNSASFSTFKCYGVSPTKLNDLCFTNVYADSFVIRGDEVRQIAPGQTGKIADYNYKLPDDFTGCVIAWNSNNLDSKVGGNYNYLYRLFRKSNLKPFERDISTEIYQAGSTPCNGVEGFNCYFPLQSYGFQPTNGVGYQPYRVVVLSFELLHAPATVCGPKKSTNLVKNKCVNFNFNGLTGTGVLTESNKKFLPFQQFGRDIADTTDAVRDPQTLEILDITPCSFGGVSVITPGTNTSNQVAVLYQGVNCTEVPVAIHADQLTPTWRVYSTGSNVFQTRAGCLIGAEHVNNSYECDIPIGAGICASYQTQTNSPRRARSVASQSIIAYTMSLGAENSVAYSNNSIAIPTNFTISVTTEILPVSMTKTSVDCTMYICGDSTECSNLLLQYGSFCTQLNRALTGIAVEQDKNTQEVFAQVKQIYKTPPIKDFGGFNFSQILPDPSKPSKRSFIEDLLFNKVTLADAGFIKQYGDCLGDIAARDLICAQKFNGLTVLPPLLTDEMIAQYTSALLAGTITSGWTFGAGAALQIPFAMQMAYRFNGIGVTQNVLYENQKLIANQFNSAIGKIQDSLSSTATALGKLQDVVNQNAQALNTLVKQLSSNFGAISSVLNDILSRLDPPEAEVQIDRLITGRLQSLQTYVTQQLIRAAEIRASANLAATKMSECVLGQSKRVDFCGKGYHLMSFPQSAPHGVVFLHVTYVFAQEKNFTTAPAICHDGKAHFPREGVFVSNGTHWFVTQRNFYEPQIITTDNTFVSGNCDVVIGIVNNTVYDPLQPELDSGGGGSDIIKLLNEQVNKEMQSSNLYMSMSSWCYTHSLDGAGLFLFDHAAEEYEHAKKLIIFLNENNVPVQLTSISAPEHKFEGLTQIFQKAYEHEQHISESINNIVDHAIKSKDHATFNFLQWYVAEQHEEEVLFKDILDKIELIGNENHGLYLADQYVKGIAKSRKS

SEQ ID NO: 8876 - protein, 1315 aa, Artificial Sequence
  SARS-CoV-2/Belgium/BC-03016/2020__EPI_ISL_415157 spike protein (1-1147)(K986P_V987P_P1069F) Ferritin construct
MFVFLVLLPLVSSQCVNLTTRTQLPPAYTNSFTRGVYYPDKVFRSSVLHSTQDLFLPFFSNVTWFHAIHVSGTNGTKRFDNPVLPFNDGVYFASTEKSNIIRGWIFGTTLDSKTQSLLIVNNATNVVIKVCEFQFCNDPFLGVYYHKNNKSWMESEFRVYSSANNCTFEYVSQPFLMDLEGKQGNFKNLREFVFKNIDGYFKIYSKHTPINLVRDLPQGFSALEPLVDLPIGINITRFQTLLALHRSYLTPGDSSSGWTAGAAAYYVGYLQPRTFLLKYNENGTITDAVDCALDPLSETKCTLKSFTVEKGIYQTSNFRVQPTESIVRFPNITNLCPFGEVFNATRFASVYAWNRKRISNCVADYSVLYNSASFSTFKCYGVSPTKLNDLCFTNVYADSFVIRGDEVRQIAPGQTGKIADYNYKLPDDFTGCVIAWNSNNLDSKVGGNYNYLYRLFRKSNLKPFERDISTEIYQAGSTPCNGVEGFNCYFPLQSYGFQPTNGVGYQPYRVVVLSFELLHAPATVCGPKKSTNLVKNKCVNFNFNGLTGTGVLTESNKKFLPFQQFGRDIADTTDAVRDPQTLEILDITPCSFGGVSVITPGTNTSNQVAVLYQGVNCTEVPVAIHADQLTPTWRVYSTGSNVFQTRAGCLIGAEHVNNSYECDIPIGAGICASYQTQTNSPRRARSVASQSIIAYTMSLGAENSVAYSNNSIAIPTNFTISVTTEILPVSMTKTSVDCTMYICGDSTECSNLLLQYGSFCTQLNRALTGIAVEQDKNTQEVFAQVKQIYKTPPIKDFGGFNFSQILPDPSKPSKRSFIEDLLFNKVTLADAGFIKQYGDCLGDIAARDLICAQKFNGLTVLPPLLTDEMIAQYTSALLAGTITSGWTFGAGAALQIPFAMQMAYRFNGIGVTQNVLYENQKLIANQFNSAIGKIQDSLSSTAPALGKLQDVVNQNAQALNTLVKQLSSNFGAISSVLNDILSRLDPPEAEVQIDRLITGRLQSLQTYVTQQLIRAAEIRASANLAATKMSECVLGQSKRVDFCGKGYHLMSFPQSAPHGVVFLHVTYVFAQEKNFTTAPAICHDGKAHFPREGVFVSNGTHWFVTQRNFYEPQIITTDNTFVSGNCDVVIGIVNNTVYDPLQPELDSGGGGSDIIKLLNEQVNKEMQSSNLYMSMSSWCYTHSLDGAGLFLFDHAAEEYEHAKKLIIFLNENNVPVQLTSISAPEHKFEGLTQIFQKAYEHEQHISESINNIVDHAIKSKDHATFNFLQWYVAEQHEEEVLFKDILDKIELIGNENHGLYLADQYVKGIAKSRKS

SEQ ID NO: 8877 - protein, 1315 aa, Artificial Sequence
  SARS-CoV-2/Germany/BavPat3/2020__EPI_ISL_414521 spike protein (1-1147)(K986P_V987P_P1069F) Ferritin construct
MFVFLVLLPLVSSQCVNLTTRTQLPPAYTNSFTRGVYYPDKVFRSSVLHSTQDLFLPFFSNVTWFHAIHVSGTNGTKRFDNPVLPFNDGVYFASTEKSNIIRGWIFGTTLDSKTQSLLIVNNATNVVIKVCEFQFCNDPFLGVYYHKNNKSWMESEFRVYSSANNCTFEYVSQPFLMDLEGKQGNFKNLREFVFKNIDGYFKIYSKHTPINLVRDLPQGFSALEPLVDLPIGINITRFQTLLALHRSYLTPGDSSSGWTAGAAAYYVGYLQPRTFLLKYNENGTITDAVDCALDPLSETKCTLKSFTVEKGIYQTSNFRVQPTESIVRFPNITNLCPFGEVFNATRFASVYAWNRKRISNCVADYSVLYNSASFSTFKCYGVSPTKLNDLCFTNVYADSFVIRGDEVRQIAPGQTGKIADYNYKLPDDFTGCVIAWNSNNLDSKVGGNYNYLYRLFRKSNLKPFERDISTEIYQAGSTPCNGVEGFNCYFPLQSYGFQPTNGVGYQPYRVVVLSFELLHAPATVCGPKKSTNLVKNKCVNFNFNGLTGTGVLTESNKKFLPFQQFGRDIADTTDAVRDPQTLEILDITPCSFGGVSVITPGTNTSNQVAVLYQDVNCTEVPVAIHADQLTPTWRVYSTGSNVFQTRAGCLIGAEHVNNSYECDIPIGAGICASYQTQTNSPRRARSVASQSIIAYTMSLGAENSVAYSNNSIAIPTNFTISVTTEILPVSMTKTSVDCTMYICGDSTECSNLLLQYGSFCTQLNRALTGIAVEQDKNTQQVFAQVKQIYKTPPIKDFGGFNFSQILPDPSKPSKRSFIEDLLFNKVTLADAGFIKQYGDCLGDIAARDLICAQKFNGLTVLPPLLTDEMIAQYTSALLAGTITSGWTFGAGAALQIPFAMQMAYRFNGIGVTQNVLYENQKLIANQFNSAIGKIQDSLSSTASALGKLQDVVNQNAQALNTLVKQLSSNFGAISSVLNDILSRLDPPEAEVQIDRLITGRLQSLQTYVTQQLIRAAEIRASANLAATKMSECVLGQSKRVDFCGKGYHLMSFPQSAPHGVVFLHVTYVFAQEKNFTTAPAICHDGKAHFPREGVFVSNGTHWFVTQRNFYEPQIITTDNTFVSGNCDVVIGIVNNTVYDPLQPELDSGGGGSDIIKLLNEQVNKEMQSSNLYMSMSSWCYTHSLDGAGLFLFDHAAEEYEHAKKLIIFLNENNVPVQLTSISAPEHKFEGLTQIFQKAYEHEQHISESINNIVDHAIKSKDHATFNFLQWYVAEQHEEEVLFKDILDKIELIGNENHGLYLADQYVKGIAKSRKS

SEQ ID NO: 8878 - protein, 1315 aa, Artificial Sequence
  SARS-CoV-2/France/HF1805/2020__EPI_ISL_414628 spike protein (1-1147)(K986P_V987P_P1069F) Ferritin construct
MFVFLVLLPLVSSQCVNLTTRTQLPPAYTNSFTRGVYYPDKVFRSSVLHSTQDLFLPFFSNVTWFHAIHVSGTNGTKRFDNPVLPFNDGVYFASTEKSNIIRGWIFGTTLDSKTQSLLIVNNATNVVIKVCEFQFCNDPFLGVYYHKNNKSWMESEFRVYSSANNCTFEYVSQPFLMDLEGKQGNFKNLREFVFKNIDGYFKIYSKHTPINLVRDLPQGFSALEPLVDLPIGINITRFQTLLALHRSYLTPGDSSSGWTAGAAAYYVGYLQPRTFLLKYNENGTITDAVDCALDPLSETKCTLKSFTVEKGIYQTSNFRVQPTESIVRFPNITNLCPFGEVFNATRFASVYAWNRKRISNCVADYSVLYNSASFSTFKCYGVSPTKLNDLCFTNVYADSFVIRGDEVRQIAPGQTGKIADYNYKLPDDFTGCVIAWNSNNLDSKVGGNYNYLYRLFRKSNLKPFERDISTEIYQAGSTPCNGVEGFNCYFPLQSYGFQPTNGVGYQPYRVVVLSFELLHAPATVCGPKKSTNLVKNKCVNFNFNGLTGTGVLTESNKKFLPFQQFGRDIADTTDAVRDPQTLEILDITPCSFGGVSVITPGTNTSNQVAVLYQGVNCTEVPVAIHADQLTPTWRVYSTGSNVFQTRAGCLIGAEHVNNSYECDIPIGAGICASYQTQTNSPRRARSVASQSIIAYTMSLGAENSVAYSNNSIAIPTNFTISVTTEILPVSMTKTSVDCTMYICGDSTECSNLLLQYGSFCTQLNRALTGIAVEQDKNTQEVFAQVKQIYKTPPIKDFGGFNFSQILPDPSKPSKRSFIEDLLFNKVTLADAGFIKQYGDCLGDIAARDLICAQKFNGLTVLPPLLTDEMIAQYTSALLAGTITSGWTFGAGAALQIPFAMQMAYRFNGIGVTQNVLYENQKLIANQFNSAIGKIQDSLSSTASALGKLQDVVNQNAQALNTLVKQLSSNFGAISSVLNDILSRLDPPEAEVQIDRLITGRLQSLQTYVTQQLIRAAEIRASANLAATKMSECVLGQSKRVDFCGKGYHLMSFPQSAPHGVVFLHVTYVFAQEKNFTTAPAICHDGKAHFPREGVFVSNGTHWFVTQRNFYEPQIITTDNTFVSGNCDVVIGVVNNTVYDPLQPELDSGGGGSDIIKLLNEQVNKEMQSSNLYMSMSSWCYTHSLDGAGLFLFDHAAEEYEHAKKLIIFLNENNVPVQLTSISAPEHKFEGLTQIFQKAYEHEQHISESINNIVDHAIKSKDHATFNFLQWYVAEQHEEEVLFKDILDKIELIGNENHGLYLADQYVKGIAKSRKS

SEQ ID NO: 8879 - protein, 1315 aa, Artificial Sequence
  SARS-CoV-2/Netherlands/ZuidHolland_9/2020__EPI_ISL_414445 spike protein (1-1147)(K986P_V987P_P1069F) Ferritin construct
MFVFLVLLPLVSSQCVNLTTRTQLPPAYTNSFTRGVYYPDKVFRSSVLHSTQDLFLPFFSNVTWFHAIHVSGTNGTKRFDNPVLPFNDGVYFASTEKSNIIRGWIFGTTLDSKTQSLLIVNNATNVVIKVCEFQFCNDPFLGVYYHKNNKSWMESEFRVYSSANNCTFEYVSQPFLMDLEGKQGNFKNLREFVFKNIDGYFKIYSKHTPINLVRDLPQGFSALEPLVDLPIGINITRFQTLLALHRSYLTPGDSSSGWTAGAAAYYVGYLQPRTFLLKYNENGTITDAVDCALDPLSETKCTLKSFTVEKGIYQTSNFRVQPTESIVRFPNITNLCPFGEVFNATRFASVYAWNRKRISNCVADYSVLYNSASFSTFKCYGVSPTKLNDLCFTNVYADSFVIRGDEVRQIAPGQTGKIADYNYKLPDDFTGCVIAWNSNNLDSKVGGNYNYLYRLFRKSNLKPFERDISTEIYQAGSTPCNGVEGFNCYFPLQSYGFQPTNGVGYQPYRVVVLSFELLHAPATVCGPKKSTNLVKNKCVNFNFNGLTGTGVLTESNKKFLPFQQFGRDIADTTDAVRDPQTLEILDITPCSFGGVSVITPGTNTSNQVAVLYQGVNCTEVPVAIHADQLTPTWRVYSTGSNVFQTRAGCLIGAEHVNNSYECDIPIGAGICASYQTQTNSPRRARSVASQSIIAYTMSLGAENSVAYSNNSIAIPTNFTISVTTEILPVSMTKTSVDCTMYICGDSTECSNLLLQYGSFCTQLNRALTGIAVEQDKNTQEVFAQVKQIYKTPPIKDFGGFNFSQILPDPSKPSKRSFIEDLLFNKVTLADAGFIKQYGDCLGDIAARDLICVQKFNGLTVLPPLLTDEMIAQYTSALLAGTITSGWTFGAGAALQIPFAMQMAYRFNGIGVTQNVLYENQKLIANQFNSAIGKIQDSLSSTASALGKLQDVVNQNAQALNTLVKQLSSNFGAISSVLNDILSRLDPPEAEVQIDRLITGRLQSLQTYVTQQLIRAAEIRASANLAATKMSECVLGQSKRVDFCGKGYHLMSFPQSAPHGVVFLHVTYVFAQEKNFTTAPAICHDGKAHFPREGVFVSNGTHWFVTQRNFYEPQIITTDNTFVSGNCDVVIGIVNNTVYDPLQPELDSGGGGSDIIKLLNEQVNKEMQSSNLYMSMSSWCYTHSLDGAGLFLFDHAAEEYEHAKKLIIFLNENNVPVQLTSISAPEHKFEGLTQIFQKAYEHEQHISESINNIVDHAIKSKDHATFNFLQWYVAEQHEEEVLFKDILDKIELIGNENHGLYLADQYVKGIAKSRKS

SEQ ID NO: 8880 - protein, 1315 aa, Artificial Sequence
  SARS-CoV-2/Finland/FIN03032020A/2020__EPI_ISL_413602 spike protein (1-1147)(K986P_V987P_P1069F) Ferritin construct
MFVFLVLLPLVSSQCVNLTTRTQLPPAYTNSFTRGVYYPDKVFRSSVLHSTQDLFLPFFSNVTWFHAIHVSGTNGTKRFDNPVLPFNDGVYFASTEKSNIIRGWIFGTTLDSKTQSLLIVNNATNVVIKVCEFQFCNDPFLGVYYHKNNKSWMESEFRVYSSANNCTFEYVSQPFLMDLEGKQGNFKNLREFVFKNIDGYFKIYSKHTPINLVRDLPQGFSALEPLVDLPIGINITRFQTLLALHRSYLTPGDSSSGWTAGAAAYYVGYLQPRTFLLKYNENGTITDAVDCALDPLSETKCTLKSFTVEKGIYQTSNFRVQPTESIVRFPNITNLCPFGEVFNATRFASVYAWNRKRISNCVADYSVLYNSASFSTFKCYGVSPTKLNDLCFTNVYADSFVIRGDEVRQIAPGQTGKIADYNYKLPDDFTGCVISWNSNNLDSKVGGNYNYLYRLFRKSNLKPFERDISTEIYQAGSTPCNGVEGFNCYFPLQSYGFQPTNGVGYQPYRVVVLSFELLHAPATVCGPKKSTNLVKNKCVNFNFNGLTGTGVLTESNKKFLPFQQFGRDIADTTDAVRDPQTLEILDITPCSFGGVSVITPGTNTSNQVAVLYQGVNCTEVPVAIHADQLTPTWRVYSTGSNVFQTRAGCLIGAEHVNNSYECDIPIGAGICASYQTQTNSPRRARSVASQSIIAYTMSLGAENSVAYSNNSIAIPTNFTISVTTEILPVSMTKTSVDCTMYICGDSTECSNLLLQYGSFCTQLNRALTGIAVEQDKNTQEVFAQVKQIYKTPPIKDFGGFNFSQILPDPSKPSKRSFIEDLLFNKVTLADAGFIKQYGDCLGDIAARDLICAQKFNGLTVLPPLLTDEMIAQYTSALLAGTITSGWTFGAGAALQIPFAMQMAYRFNGIGVTQNVLYENQKLIANQFNSAIGKIQDSLSSTASALGKLQDVVNQNAQALNTLVKQLSSNFGAISSVLNDILSRLDPPEAEVQIDRLITGRLQSLQTYVTQQLIRAAEIRASANLAATKMSECVLGQSKRVDFCGKGYHLMSFPQSAPHGVVFLHVTYVFAQEKNFTTAPAICHDGKAHFPREGVFVSNGTHWFVTQRNFYEPQIITTDNTFVSGNCDVVIGIVNNTVYDPLQPELDSGGGGSDIIKLLNEQVNKEMQSSNLYMSMSSWCYTHSLDGAGLFLFDHAAEEYEHAKKLIIFLNENNVPVQLTSISAPEHKFEGLTQIFQKAYEHEQHISESINNIVDHAIKSKDHATFNFLQWYVAEQHEEEVLFKDILDKIELIGNENHGLYLADQYVKGIAKSRKS

SEQ ID NO: 8881 - protein, 1315 aa, Artificial Sequence
  SARS-CoV-2/France/GE1977/2020__EPI_ISL_414632 spike protein (1-1147)(K986P_V987P_P1069F) Ferritin construct
MFVFLVLLPLVSSQCVNLTTRTQLPPAYTNSFTRGVYYPDKVFRSSVLHSTQDLFLPFFSNVTWFHAIHVSGTNGTKRFDNPVLPFNDGVYFASTEKSNIIRGWIFGTTLDSKTQSLLIVNNATNVVIKVCEFQFCNDPFLGVYYHKNNKSWMESEFRVYSSANNCTFEYVSQPFLMDLEGKQGNFKNLREFVFKNIDGYFKIYSKHTPINLVRDLPQGFSALEPLVDLPIGINITRFQTLLALHRSYLTPGDSSSGWTAGAAAYYVGYLQPRTFLLKYNENGTITDAVDCALDPLSETKCTLKSFTVEKGIYQTSNFRVQPTESIVRFPNITNLCPFGEVFNATRFASVYAWNRKRISNCVADYSVLYNSASFSTFKCYGVSPTKLNDLCFTNVYADSFVIRGDEVRQIAPGQTGKIADYNYKLPDDFTGCVIAWNSNNLDSKVGGNYNYLYRLFRKSNLKPFERDISTEIYQAGSTPCNGVEGFNCYFPLQSYGFQPTNGVGYQPYRVVVLSFELLHAPATVCGPKKSTNLVKNKCVNFNFNGLTGTGVLTESNKKFLPFQQFGRDIADTTDAVRDPQTLEILDITPCSFGGVSVITPGTNTSNQVAVLYQGVNCTEVPVAIHADQLTPTWRVYSTGSNVFQTRAGCLIGAEHVNNSYECDIPIGAGICASYQTQTNSPRRARSVASQSIIAYTMSLGAENSVAYSNNSIAIPTNFTISVTTEILPVSMTKTSVDCTMYICGDSTECSNLLLQYGSFCTQLNRALTGIAVEQDKNTQEVFAQVKQIYKTPPIKDFGGFNFSQILPDPSKPSKRSFIEDLLFNKVTLADAGFIKQYGDCLGDIAARDLICAQKFNGLTVLPPLLTDEMIAQYTSALLAGTITSGWTFGAGAALQIPFAMQMAYRFNGIGVTQNVLYENQKLIANQFNSAIGKIQDSLFSTASALGKLQDVVNQNAQALNTLVKQLSSNFGAISSVLNDILSRLDPPEAEVQIDRLITGRLQSLQTYVTQQLIRAAEIRASANLAATKMSECVLGQSKRVDFCGKGYHLMSFPQSAPHGVVFLHVTYVFAQEKNFTTAPAICHDGKAHFPREGVFVSNGTHWFVTQRNFYEPQIITTDNTFVSGNCDVVIGIVNNTVYDPLQPELDSGGGGSDIIKLLNEQVNKEMQSSNLYMSMSSWCYTHSLDGAGLFLFDHAAEEYEHAKKLIIFLNENNVPVQLTSISAPEHKFEGLTQIFQKAYEHEQHISESINNIVDHAIKSKDHATFNFLQWYVAEQHEEEVLFKDILDKIELIGNENHGLYLADQYVKGIAKSRKS

SEQ ID NO: 8882 - protein, 1315 aa, Artificial Sequence
  SARS-CoV-2/Finland/FIN-313/2020__EPI_ISL_414641 spike protein (1-1147)(K986P_V987P_P1069F) Ferritin construct
MFVFLVLLPLVSSQCVNLTTRTQLPPAYTNSFTRGVYYPDKVFRSSVLHSTQDLFLPFFSNVTWFHAIHVSGTNGTKRFDNPVLPFNDGVYFASTEKSNIIRGWIFGTTLDSKTQSLLIVNNATNVVIKVCEFQFCNDPFLGVYYHKNNKSWMESEFRVYSSANNCTFEYVSQPFLMDLEGKQGNFKNLREFVFKNIDGYFKIYSKHTPINLVRDLPQGFSALEPLVDLPIGINITRFKTLLALHRSYLTPGDSSSGWTAGAAAYYVGYLQPRTFLLKYNENGTITDAVDCALDPLSETKCTLKSFTVEKGIYQTSNFRVQPTESIVRFPNITNLCPFGEVFNATRFASVYAWNRKRISNCVADYSVLYNSASFSTFKCYGVSPTKLNDLCFTNVYADSFVIRGDEVRQIAPGQTGKIADYNYKLPDDFTGCVIAWNSNNLDSKVGGNYNYLYRLFRKSNLKPFERDISTEIYQAGSTPCNGVEGFNCYFPLQSYGFQPTNGVGYQPYRVVVLSFELLHAPATVCGPKKSTNLVKNKCVNFNFNGLTGTGVLTESNKKFLPFQQFGRDIADTTDAVRDPQTLEILDITPCSFGGVSVITPGTNTSNQVAVLYQGVNCTEVPVAIHADQLTPTWRVYSTGSNVFQTRAGCLIGAEHVNNSYECDIPIGAGICASYQTQTNSPRRARSVASQSIIAYTMSLGAENSVAYSNNSIAIPTNFTISVTTEILPVSMTKTSVDCTMYICGDSTECSNLLLQYGSFCTQLNRALTGIAVEQDKNTQEVFAQVKQIYKTPPIKDFGGFNFSQILPDPSKPSKRSFIEDLLFNKVTLADAGFIKQYGDCLGDIAARDLICAQKFNGLTVLPPLLTDEMIAQYTSALLAGTITSGWTFGAGAALQIPFAMQMAYRFNGIGVTQNVLYENQKLIANQFNSAIGKIQDSLSSTASALGKLQDVVNQNAQALNTLVKQLSSNFGAISSVLNDILSRLDPPEAEVQIDRLITGRLQSLQTYVTQQLIRAAEIRASANLAATKMSECVLGQSKRVDFCGKGYHLMSFPQSAPHGVVFLHVTYVFAQEKNFTTAPAICHDGKAHFPREGVFVSNGTHWFVTQRNFYEPQIITTDNTFVSGNCDVVIGIVNNTVYDPLQPELDSGGGGSDIIKLLNEQVNKEMQSSNLYMSMSSWCYTHSLDGAGLFLFDHAAEEYEHAKKLIIFLNENNVPVQLTSISAPEHKFEGLTQIFQKAYEHEQHISESINNIVDHAIKSKDHATFNFLQWYVAEQHEEEVLFKDILDKIELIGNENHGLYLADQYVKGIAKSRKS

SEQ ID NO: 8883 - protein, 1315 aa, Artificial Sequence
  SARS-CoV-2/Netherlands/ZuidHolland_2/2020__EPI_ISL_414556 spike protein (1-1147)(K986P_V987P_P1069F) Ferritin construct
MFVFLVLLPLVSSQCVNLTTRTQLPPAYTNSFTRGVYYPDKVFRSSVLHSTQDLFLPFFSNVTWFHAIHVSGTNGTKRFDNPVLPFNDGVYFASTEKSNIIRGWIFGTTLDSKTQSLLIVNNATNVVIKVCEFQFCNDPFLGVYYHKNNKSWMESEFRVYSSANNCTFEYVSQPFLMDLEGKQGNFKNLREFVFKNIDGYFKIYSKHTPINLVRDLPQGFSALEPLVDLPIGINITRFQTLLALHRSYLTPGDSSSGWTAGAAAYYVGYLQPRTFLLKYNENGTITDAVDCALDPLSETKCTLKSFTVEKGIYQTSNFRVQPTESIVRFPNITNLCPFGEVFNATRFASVYAWNRKRISNCVADYSVLYNSASFSTFKCYGVSPTKLNDLCFTNVYADSFVIRGDEVRQIAPGQTGKIADYNYKLPDDFTGCVIAWNSNNLDSKVGGNYNYLYRLFRKSNLKPFERDISTEIYQAGSTPCNGVEGFNCYFPLQSYGFQPTNGVGYQPYRVVVLSFELLHAPATVCGPKKSTNLVKNKCVNFNFNGLTGTGVLTESNKKFLPFQQFGRDIADTTDAVRDPQTLEILDITPCSFGGVSVITPGTNTSNQVAVLYQGVNCTEVPVAIHADQLTPTWRVYSTGSNVFQTRAGCLIGAEHVNNSYECDIPIGAGICASYQTQTNSPRRARSVASQSIIAYTMSLGAENSVAYSNNSIAIPTNFTISVTTEILPVSMTKTSVDCTMYICGDSTECSNLLLQYGSFCTQLNRALTGIALEQDKNTQEVFAQVKQIYKTPPIKDFGGFNFSQILPDPSKPSKRSFIEDLLFNKVTLADAGFIKQYGDCLGDIAARDLICAQKFNGLTVLPPLLTDEMIAQYTSALLAGTITSGWTFGAGAALQIPFAMQMAYRFNGIGVTQNVLYENQKLIANQFNSAIGKIQDSLSSTASALGKLQDVVNQNAQALNTLVKQLSSNFGAISSVLNDILSRLDPPEAEVQIDRLITGRLQSLQTYVTQQLIRAAEIRASANLAATKMSECVLGQSKRVDFCGKGYHLMSFPQSAPHGVVFLHVTYVFAQEKNFTTAPAICHDGKAHFPREGVFVSNGTHWFVTQRNFYEPQIITTDNTFVSGNCDVVIGIVNNTVYDPLQPELDSGGGGSDIIKLLNEQVNKEMQSSNLYMSMSSWCYTHSLDGAGLFLFDHAAEEYEHAKKLIIFLNENNVPVQLTSISAPEHKFEGLTQIFQKAYEHEQHISESINNIVDHAIKSKDHATFNFLQWYVAEQHEEEVLFKDILDKIELIGNENHGLYLADQYVKGIAKSRKS

SEQ ID NO: 8884 - protein, 1315 aa, Artificial Sequence
  SARS-CoV-2/USA/WA-UW31/2020__EPI_ISL_414618 spike protein (1-1147)(K986P_V987P_P1069F) Ferritin construct
MFVFLVLLPLVSSQCVNLTTRTQLPPAYTNSFTRGVYYPDKVFRSSVLHSTQDLFLPFFSNVTWFHAIHVSGTNGTKRFDNPVLPFNDGVYFASTEKSNIIRGWIFGTTLDSKTQSLLIVNNATNVVIKVCEFQFCNDPFLGVYYHKNNKSWMESEFRVYSSANNCTFEYVSQPFLMDLEGKQGNFKNLREFVFKNIDGYFKIYSKHTPINLVRDLPQGFSALEPLVDLPIGINITRFQTLLALHRSYLTPGDSSSGWTAGAAAYYVGYLQPRTFLLKYNENGTITDAVDCALDPLSETKCTLKSFTVEKGIYQTSNFRVQPTESIVRFPNITNLCPFGEVFNATRFASVYAWNRKRISNCVADYSVLYNSASFSTFKCYGVSPTKLNDLCFTNVYADSFVIRGDEVRQIAPGQTGKIADYNYKLPDDFTGCVIAWNSNNLDSKVGGNYNYLYRLFRKSNLKPFERDISTEIYQAGSTPCNGAEGFNCYFPLQSYGFQPTNGVGYQPYRVVVLSFELLHAPATVCGPKKSTNLVKNKCVNFNFNGLTGTGVLTESNKKFLPFQQFGRDIADTTDAVRDPQTLEILDITPCSFGGVSVITPGTNTSNQVAVLYQDVNCTEVPVAIHADQLTPTWRVYSTGSNVFQTRAGCLIGAEHVNNSYECDIPIGAGICASYQTQTNSPRRARSVASQSIIAYTMSLGAENSVAYSNNSIAIPTNFTISVTTEILPVSMTKTSVDCTMYICGDSTECSNLLLQYGSFCTQLNRALTGIAVEQDKNTQEVFAQVKQIYKTPPIKDFGGFNFSQILPDPSKPSKRSFIEDLLFNKVTLADAGFIKQYGDCLGDIAARDLICAQKFNGLTVLPPLLTDEMIAQYTSALLAGTITSGWTFGAGAALQIPFAMQMAYRFNGIGVTQNVLYENQKLIANQFNSAIGKIQDSLSSTASALGKLQDVVNQNAQALNTLVKQLSSNFGAISSVLNDILSRLDPPEAEVQIDRLITGRLQSLQTYVTQQLIRAAEIRASANLAATKMSECVLGQSKRVDFCGKGYHLMSFPQSAPHGVVFLHVTYVFAQEKNFTTAPAICHDGKAHFPREGVFVSNGTHWFVTQRNFYEPQIITTDNTFVSGNCDVVIGIVNNTVYDPLQPELDSGGGGSDIIKLLNEQVNKEMQSSNLYMSMSSWCYTHSLDGAGLFLFDHAAEEYEHAKKLIIFLNENNVPVQLTSISAPEHKFEGLTQIFQKAYEHEQHISESINNIVDHAIKSKDHATFNFLQWYVAEQHEEEVLFKDILDKIELIGNENHGLYLADQYVKGIAKSRKS

SEQ ID NO: 8885 - protein, 1315 aa, Artificial Sequence
  SARS-CoV-2/South Korea/SNU01/2020__EPI_ISL_411929 spike protein (1-1147)(K986P_V987P_P1069F) Ferritin construct
MFVFLVLLPLVSSQCVNLTTRTQLPPAYTNSFTRGVYYPDKVFRSSVLHSTQDLFLPFFSNVTWFHAIHVSGTNGTKRFDNPVLPFNDGVYFASTEKSNIIRGWIFGTTLDSKTQSLLIVNNATNVVIKVCEFQFCNDPFLGVYYHKNNKSWMESEFRVYSSANNCTFEYVSQPFLMDLEGKQGNFKNLREFVFKNIDGYFKIYSKHTPINLVRDLPQGFWALEPLVDLPIGINITRFQTLLALHRSYLTPGDSSSGWTAGAAAYYVGYLQPRTFLLKYNENGTITDAVDCALDPLSETKCTLKSFTVEKGIYQTSNFRVQPTESIVRFPNITNLCPFGEVFNATRFASVYAWNRKRISNCVADYSVLYNSASFSTFKCYGVSPTKLNDLCFTNVYADSFVIRGDEVRQIAPGQTGKIADYNYKLPDDFTGCVIAWNSNNLDSKVGGNYNYLYRLFRKSNLKPFERDISTEIYQAGSTPCNGVEGFNCYFPLQSYGFQPTNGVGYQPYRVVVLSFELLHAPATVCGPKKSTNLVKNKCVNFNFNGLTGTGVLTESNKKFLPFQQFGRDIADTTDAVRDPQTLEILDITPCSFGGVSVITPGTNTSNQVAVLYQDVNCTEVPVAIHADQLTPTWRVYSTGSNVFQTRAGCLIGAEHVNNSYECDIPIGAGICASYQTQTNSPRRARSVASQSIIAYTMSLGAENSVAYSNNSIAIPTNFTISVTTEILPVSMTKTSVDCTMYICGDSTECSNLLLQYGSFCTQLNRALTGIAVEQDKNTQEVFAQVKQIYKTPPIKDFGGFNFSQILPDPSKPSKRSFIEDLLFNKVTLADAGFIKQYGDCLGDIAARDLICAQKFNGLTVLPPLLTDEMIAQYTSALLAGTITSGWTFGAGAALQIPFAMQMAYRFNGIGVTQNVLYENQKLIANQFNSAIGKIQDSLSSTASALGKLQDVVNQNAQALNTLVKQLSSNFGAISSVLNDILSRLDPPEAEVQIDRLITGRLQSLQTYVTQQLIRAAEIRASANLAATKMSECVLGQSKRVDFCGKGYHLMSFPQSAPHGVVFLHVTYVFAQEKNFTTAPAICHDGKAHFPREGVFVSNGTHWFVTQRNFYEPQIITTDNTFVSGNCDVVIGIVNNTVYDPLQPELDSGGGGSDIIKLLNEQVNKEMQSSNLYMSMSSWCYTHSLDGAGLFLFDHAAEEYEHAKKLIIFLNENNVPVQLTSISAPEHKFEGLTQIFQKAYEHEQHISESINNIVDHAIKSKDHATFNFLQWYVAEQHEEEVLFKDILDKIELIGNENHGLYLADQYVKGIAKSRKS

SEQ ID NO: 8886 - protein, 1315 aa, Artificial Sequence
  SARS-CoV-2/China/WF0004/2020__EPI_ISL_413694 spike protein (1-1147)(K986P_V987P_P1069F) Ferritin construct
MFVFLVLLPLVSSQCVNLTTRTQLPPAYTNSFTRGVYYPDKVFRSSVLHSTQDLFLPFFSNVTWFHAIHVSGTNGTKRFDNPVLPFNDGVYFASTEKSNIIRGWIFGTTLDSKTQSLLIVNNATNVVIKVCEFQFCNDPFLGVYYHKNNKSWTESEFRVYSSANNCTFEYVSQPFLMDLEGKQGNFKNLREFVFKNIDGYFKIYSKHTPINLVRDLPQGFSALEPLVDLPIGINITRFQTLLALHRSYLTPGDSSSGWTAGAAAYYVGYLQPRTFLLKYNENGTITDAVDCALDPLSETKCTLKSFTVEKGIYQTSNFRVQPTESIVRFPNITNLCPFGEVFNATRFASVYAWNRKRISNCVADYSVLYNSASFSTFKCYGVSPTKLNDLCFTNVYADSFVIRGDEVRQIAPGQTGKIADYNYKLPDDFTGCVIAWNSNNLDSKVGGNYNYLYRLFRKSNLKPFERDISTEIYQAGSTPCNGVEGFNCYFPLQSYGFQPTNGVGYQPYRVVVLSFELLHAPATVCGPKKSTNLVKNKCVNFNFNGLTGTGVLTESNKKFLPFQQFGRDIADTTDAVRDPQTLEILDITPCSFGGVSVITPGTNTSNQVAVLYQDVNCTEVPVAIHADQLTPTWRVYSTGSNVFQTRAGCLIGAEHVNNSYECDIPIGAGICASYQTQTNSPRRARSVASQSIIAYTMSLGAENSVAYSNNSIAIPTNFTISVTTEILPVSMTKTSVDCTMYICGDSTECSNLLLQYGSFCTQLNRALTGIAVEQDKNTQEVFAQVKQIYKTPPIKDFGGFNFSQILPDPSKPSKRSFIEDLLFNKVTLADAGFIKQYGDCLGDIAARDLICAQKFNGLTVLPPLLTDEMIAQYTSALLAGTITSGWTFGAGAALQIPFAMQMAYRFNGIGVTQNVLYENQKLIANQFNSAIGKIQDSLSSTASALGKLQDVVNQNAQALNTLVKQLSSNFGAISSVLNDILSRLDPPEAEVQIDRLITGRLQSLQTYVTQQLIRAAEIRASANLAATKMSECVLGQSKRFDFCGKGYHLMSFPQSAPHGVVFLHVTYVFAQEKNFTTAPAICHDGKAHFPREGVFVSNGTHWFVTQRNFYEPQIITTDNTFVSGNCDVVIGIVNNTVYDPLQPELDSGGGGSDIIKLLNEQVNKEMQSSNLYMSMSSWCYTHSLDGAGLFLFDHAAEEYEHAKKLIIFLNENNVPVQLTSISAPEHKFEGLTQIFQKAYEHEQHISESINNIVDHAIKSKDHATFNFLQWYVAEQHEEEVLFKDILDKIELIGNENHGLYLADQYVKGIAKSRKS

SEQ ID NO: 8887 - protein, 1315 aa, Artificial Sequence
  SARS-CoV-2/China/WF0028/2020__EPI_ISL_413791 spike protein (1-1147)(K986P_V987P_P1069F) Ferritin construct
MFVFLVLLPLVSSQCVNLTTRTQLPPAYTNSFTRGVYYPDKVFRSSVLHSTQDLFLPFFSNVTWFHAIHVSGTNGTKRFDNPVLPFNDGVYFASTEKSNIIRGWIFGTTLDSKTQSLLIVNNATNVVIKVCEFQFCNDPFLGVYYHKNNKSWMESEFRVYSSANNCTFEYVSQPFLMDLEGKQGNFKNLREFVFKNIDGYFKIYSKHTPINLVRDLPQGFSALEPLVDLPIGINITRFQTLLALHRSYLTPGDSSSGWTAGAAAYYVGYLQPRTFLLKYNENGTITDAVDCALDPLSETKCTLKSFTVEKGIYQTSNFRVQPTESIVRFPNITNLCPFGEVFNATRFASVYAWNRKRISNCVADYSVLYNSASFSTFKCYGVSPTKLNDLCFTNVYADSFVIRGDEVRQIAPGQTGKIADYNYKLPDDFTGCVIAWNSNNLDSKVGGNYNYLYRLFRKSNLKPFERDISTEIYQAGSTPCNGVEGFNCYFPLQSYGFQPTNGVGYQPYRVVVLSFELLHAPATVCGPKKSTNLVKNKCVNFNFNGLTGTGVLTESNKKFLPFQQFGRDIADTTDAVRDPQTLEILDITPCSFGGVSVITPGTNTSNQVAVLYQDVNCTEVPVAIHADQLTPTWRVYSTGSNVFQTRAGCLIGAEHVNNSYECDIPIGAGICASYQTQTNSPRRARSVASQSIIAYTMSLGAENSVAYSNNSIAIPTNFTISVTTEILPVSMTKTSVDCTMYICGDSTECSNLLLQYGSFCTQLNRALTGIAVEQDKNTQEVFAQVKQIYKTPPIKDFGGFNFSQILPDPSKPSKRSFIEDLLFNKVTLADAGFIKQYGDCLGDIAARDLICAQKFNGLTVLPPLLTDEMIAQYTSALLAGTITSGWTFGAGAALQIPFAMQMAYRFNGIGVTQNVLYENQKLIANQFNSAIGKIQDSLSSTASALGKLQDVVNQNAQALNTLVKQLSSNFGAISSVLNDILSRLDPPEAEVQIDRLITGRLQSLQTYVTQQLIRAAEIRASANLAATKMSECVLGQSKRVDFCGKGYHLMSFPQSAPHGVVFLHVTYVFAQEKNFTTAPAICHDGKAHFPREGVFVSNGTHWFVTQRNFYEPQIITTDNTFVSGNCDVVIGIVNNTVYDPLQPELESGGGGSDIIKLLNEQVNKEMQSSNLYMSMSSWCYTHSLDGAGLFLFDHAAEEYEHAKKLIIFLNENNVPVQLTSISAPEHKFEGLTQIFQKAYEHEQHISESINNIVDHAIKSKDHATFNFLQWYVAEQHEEEVLFKDILDKIELIGNENHGLYLADQYVKGIAKSRKS

SEQ ID NO: 8888 - protein, 1315 aa, Artificial Sequence
  SARS-CoV-2/2019-nCoV/USA-CruiseA-18/2020__MT159716.1 spike protein (1-1147)(K986P_V987P_P1069F) Ferritin construct
MFVFLVLLPLVSSQCVNLTTRTQLPPAYTNSFTRGVYYPDKVFRSSVLHSTQDLFLPFFSNVTWFHAIHVSGTNGTKRFDNPVLPFNDGVYFASTEKSNIIRGWIFGTTLDSKTQSLLIVNNATNVVIKVCEFQFCNDPFLGVYYHKNNKSWMESELRVYSSANNCTFEYVSQPFLMDLEGKQGNFKNLREFVFKNIDGYFKIYSKHTPINLVRDLPQGFSALEPLVDLPIGINITRFQTLLALHRSYLTPGDSSSGWTAGAAAYYVGYLQPRTFLLKYNENGTITDAVDCALDPLSETKCTLKSFTVEKGIYQTSNFRVQPTESIVRFPNITNLCPFGEVFNATRFASVYAWNRKRISNCVADYSVLYNSASFSTFKCYGVSPTKLNDLCFTNVYADSFVIRGDEVRQIAPGQTGKIADYNYKLPDDFTGCVIAWNSNNLDSKVGGNYNYLYRLFRKSNLKPFERDISTEIYQAGSTPCNGVEGFNCYFPLQSYGFQPTNGVGYQPYRVVVLSFELLHAPATVCGPKKSTNLVKNKCVNFNFNGLTGTGVLTESNKKFLPFQQFGRDIADTTDAVRDPQTLEILDITPCSFGGVSVITPGTNTSNQVAVLYQDVNCTEVPVAIHADQLTPTWRVYSTGSNVFQTRAGCLIGAEHVNNSYECDIPIGAGICASYQTQTNSPRRARSVASQSIIAYTMSLGAENSVAYSNNSIAIPTNFTISVTTEILPVSMTKTSVDCTMYICGDSTECSNLLLQYGSFCTQLNRALTGIAVEQDKNTQEVFAQVKQIYKTPPIKDFGGFNFSQILPDPSKPSKRSFIEDLLFNKVTLADAGFIKQYGDCLGDIAARDLICAQKFNGLTVLPPLLTDEMIAQYTSALLAGTITSGWTFGAGAALQIPFAMQMAYRFNGIGVTQNVLYENQKLIANQFNSAIGKIQDSLSSTASALGKLQDVVNQNAQALNTLVKQLSSNFGAISSVLNDILSRLDPPEAEVQIDRLITGRLQSLQTYVTQQLIRAAEIRASANLAATKMSECVLGQSKRVDFCGKGYHLMSFPQSAPHGVVFLHVTYVFAQEKNFTTAPAICHDGKAHFPREGVFVSNGTHWFVTQRNFYEPQIITTDNTFVSGNCDVVIGIVNNTVYDPLQPELDSGGGGSDIIKLLNEQVNKEMQSSNLYMSMSSWCYTHSLDGAGLFLFDHAAEEYEHAKKLIIFLNENNVPVQLTSISAPEHKFEGLTQIFQKAYEHEQHISESINNIVDHAIKSKDHATFNFLQWYVAEQHEEEVLFKDILDKIELIGNENHGLYLADQYVKGIAKSRKS

SEQ ID NO: 8889 - protein, 1315 aa, Artificial Sequence
  SARS-CoV-2/SARS-CoV-2/Yunnan-01/human/2020/CHN__MT049951.1 spike protein (1-1147)(K986P_V987P_P1069F) Ferritin construct
MFVFLVLLPLVSSQCVNLTTRTQLPPANTNSFTRGVYYPDKVFRSSVLHSTQDLFLPFFSNVTWFHAIHVSGTNGTKRFDNPVLPFNDGVYFASTEKSNIIRGWIFGTTLDSKTQSLLIVNNATNVVIKVCEFQFCNDPFLGVYYHKNNKSWMESEFRVYSSANNCTFEYVSQPFLMDLEGKQGNFKNLREFVFKNIDGYFKIYSKHTPINLVRDLPQGFSALEPLVDLPIGINITRFQTLLALHRSYLTPGDSSSGWTAGAAAYYVGYLQPRTFLLKYNENGTITDAVDCALDPLSETKCTLKSFTVEKGIYQTSNFRVQPTESIVRFPNITNLCPFGEVFNATRFASVYAWNRKRISNCVADYSVLYNSASFSTFKCYGVSPTKLNDLCFTNVYADSFVIRGDEVRQIAPGQTGKIADYNYKLPDDFTGCVIAWNSNNLDSKVGGNYNYLYRLFRKSNLKPFERDISTEIYQAGSTPCNGVEGFNCYFPLQSYGFQPTNGVGYQPYRVVVLSFELLHAPATVCGPKKSTNLVKNKCVNFNFNGLTGTGVLTESNKKFLPFQQFGRDIADTTDAVRDPQTLEILDITPCSFGGVSVITPGTNTSNQVAVLYQDVNCTEVPVAIHADQLTPTWRVYSTGSNVFQTRAGCLIGAEHVNNSYECDIPIGAGICASYQTQTNSPRRARSVASQSIIAYTMSLGAENSVAYSNNSIAIPTNFTISVTTEILPVSMTKTSVDCTMYICGDSTECSNLLLQYGSFCTQLNRALTGIAVEQDKNTQEVFAQVKQIYKTPPIKDFGGFNFSQILPDPSKPSKRSFIEDLLFNKVTLADAGFIKQYGDCLGDIAARDLICAQKFNGLTVLPPLLTDEMIAQYTSALLAGTITSGWTFGAGAALQIPFAMQMAYRFNGIGVTQNVLYENQKLIANQFNSAIGKIQDSLSSTASALGKLQDVVNQNAQALNTLVKQLSSNFGAISSVLNDILSRLDPPEAEVQIDRLITGRLQSLQTYVTQQLIRAAEIRASANLAATKMSECVLGQSKRVDFCGKGYHLMSFPQSAPHGVVFLHVTYVFAQEKNFTTAPAICHDGKAHFPREGVFVSNGTHWFVTQRNFYEPQIITTDNTFVSGNCDVVIGIVNNTVYDPLQPELDSGGGGSDIIKLLNEQVNKEMQSSNLYMSMSSWCYTHSLDGAGLFLFDHAAEEYEHAKKLIIFLNENNVPVQLTSISAPEHKFEGLTQIFQKAYEHEQHISESINNIVDHAIKSKDHATFNFLQWYVAEQHEEEVLFKDILDKIELIGNENHGLYLADQYVKGIAKSRKS

SEQ ID NO: 8890 - protein, 1315 aa, Artificial Sequence
  SARS-CoV-2/USA/WA-UW292/2020__EPI_ISL_418077 spike protein (1-1147)(K986P_V987P_P1069F) Ferritin construct
MFVFLVLLPLVSSQCVNLTTRTQLPPAYTNSFTRGVYYPDKVFRSSVLHSTQDLFLPFFSNVTWFHAIHVSGTNGTKRFDNPVLPFNDGVYFASTEKSNIIRGWIFGTTLDSKTQSLLIVNNATNVVIKVCEFQFCNDPFLGVYYHKNNKSWMESEFRVYSSANNCTFEYVSQPFLMDLEGKQGNFKNLREFVFKNIDGYFKIYSKHTPINLVRDLPQGFSALEPLVDLPIGINITRFQTLLALHRSYLTPGDSSSGWTAGAAAYYVGYLQPRTFLLKYNENGTITDAVDCALDPLSETKCTLKSFTVEKGIYQTSNFRVQPTESIVRFPNITNLCPFGEVFNATRFASVYAWNRKRISNCVADYSVLYNSASFSTFKCYGVSPTKLNDLCFTNVYADSFVIRGDEVRQIAPGQTGKIADYNYKLPDDFTGCVIAWNSNNLDSKVGGNYNYLYRLFRKSNLKPFERDISTEIYQASSTPCNGVEGFNCYFPLQSYGFQPTNGVGYQPYRVVVLSFELLHAPATVCGPKKSTNLVKNKCVNFNFNGLTGTGVLTESNKKFLPFQQFGRDIADTTDAVRDPQTLEILDITPCSFGGVSVITPGTNTSNQVAVLYQDVNCTEVPVAIHADQLTPTWRVYSTGSNVFQTRAGCLIGAEHVNNSYECDIPIGAGICASYQTQTNSPRRARSVASQSIIAYTMSLGAENSVAYSNNSIAIPTNFTISVTTEILPVSMTKTSVDCTMYICGDSTECSNLLLQYGSFCTQLNRALTGIAVEQDKNTQEVFAQVKQIYKTPPIKDFGGFNFSQILPDPSKPSKRSFIEDLLFNKVTLADAGFIKQYGDCLGDIAARDLICAQKFNGLTVLPPLLTDEMIAQYTSALLAGTITSGWTFGAGAALQIPFAMQMAYRFNGIGVTQNVLYENQKLIANQFNSAIGKIQDSLSSTASALGKLQDVVNQNAQALNTLVKQLSSNFGAISSVLNDILSRLDPPEAEVQIDRLITGRLQSLQTYVTQQLIRAAEIRASANLAATKMSECVLGQSKRVDFCGKGYHLMSFPQSAPHGVVFLHVTYVFAQEKNFTTAPAICHDGKAHFPREGVFVSNGTHWFVTQRNFYEPQIITTDNTFVSGNCDVVIGIVNNTVYDPLQPELDSGGGGSDIIKLLNEQVNKEMQSSNLYMSMSSWCYTHSLDGAGLFLFDHAAEEYEHAKKLIIFLNENNVPVQLTSISAPEHKFEGLTQIFQKAYEHEQHISESINNIVDHAIKSKDHATFNFLQWYVAEQHEEEVLFKDILDKIELIGNENHGLYLADQYVKGIAKSRKS

SEQ ID NO: 8891 - protein, 1315 aa, Artificial Sequence
  SARS-CoV-2/Iceland/192/2020__EPI_ISL_417819 spike protein (1-1147)(K986P_V987P_P1069F) Ferritin construct
MFVFFVLLPLVSSQCVNLTTRTQLPPAYTNSFTRGVYYPDKVFRSSVLHSTQDLFLPFFSNVTWFHAIHVSGTNGTKRFDNPVLPFNDGVYFASTEKSNIIRGWIFGTTLDSKTQSLLIVNNATNVVIKVCEFQFCNDPFLGVYYHKNNKSWMESEFRVYSSANNCTFEYVSQPFLMDLEGKQGNFKNLREFVFKNIDGYFKIYSKHTPINLVRDLPQGFSALEPLVDLPIGINITRFQTLLALHRSYLTPGDSSSGWTAGAAAYYVGYLQPRTFLLKYNENGTITDAVDCALDPLSETKCTLKSFTVEKGIYQTSNFRVQPTESIVRFPNITNLCPFGEVFNATRFASVYAWNRKRISNCVADYSVLYNSASFSTFKCYGVSPTKLNDLCFTNVYADSFVIRGDEVRQIAPGQTGKIADYNYKLPDDFTGCVIAWNSNNLDSKVGGNYNYLYRLFRKSNLKPFERDISTEIYQAGSTPCNGVEGFNCYFPLQSYGFQPTNGVGYQPYRVVVLSFELLHAPATVCGPKKSTNLVKNKCVNFNFNGLTGTGVLTESNKKFLPFQQFGRDIADTTDAVRDPQTLEILDITPCSFGGVSVITPGTNTSNQVAVLYQGVNCTEVPVAIHADQLTPTWRVYSTGSNVFQTRAGCLIGAEHVNNSYECDIPIGAGICASYQTQTNSPRRARSVASQSIIAYTMSLGAENSVAYSNNSIAIPTNFTISVTTEILPVSMTKTSVDCTMYICGDSTECSNLLLQYGSFCTQLNRALTGIAVEQDKNTQEVFAQVKQIYKTPPIKDFGGFNFSQILPDPSKPSKRSFIEDLLFNKVTLADAGFIKQYGDCLGDIAARDLICAQKFNGLTVLPPLLTDEMIAQYTSALLAGTITSGWTFGAGAALQIPFAMQMAYRFNGIGVTQNVLYENQKLIANQFNSAIGKIQDSLSSTASALGKLQDVVNQNAQALNTLVKQLSSNFGAISSVLNDILSRLDPPEAEVQIDRLITGRLQSLQTYVTQQLIRAAEIRASANLAATKMSECVLGQSKRVDFCGKGYHLMSFPQSAPHGVVFLHVTYVFAQEKNFTTAPAICHDGKAHFPREGVFVSNGTHWFVTQRNFYEPQIITTDNTFVSGNCDVVIGIVNNTVYDPLQPELDSGGGGSDIIKLLNEQVNKEMQSSNLYMSMSSWCYTHSLDGAGLFLFDHAAEEYEHAKKLIIFLNENNVPVQLTSISAPEHKFEGLTQIFQKAYEHEQHISESINNIVDHAIKSKDHATFNFLQWYVAEQHEEEVLFKDILDKIELIGNENHGLYLADQYVKGIAKSRKS

SEQ ID NO: 8892 - protein, 1315 aa, Artificial Sequence
  SARS-CoV-2/Belgium/ULG-6939/2020__EPI_ISL_417020 spike protein (1-1147)(K986P_V987P_P1069F) Ferritin construct
MFVFLVLLPLVSSQCVNLTTRTQLPPAYTNSFTRGVYYPDKVFRSSVLHSTQDLFLPFFSNVTWFHAIHVSGTNGTKRFDNPVLPFNDGVYFASTEKSNIIRGWIFGTTLDSKTQSLLIVNNATNVVIKVCEFQFCNDPFLGVYYHKNNKSWMESEFRVYSSANNCTFEYVSQPFLMDLEGKQGNFKNLREFVFKNIDGYFKIYSKHTPINLVRDLPQGFSALEPLVDLPIGINITRFQTLLALHRSYLTPGDSSSGWTAGAAAYYVGYLQPRTFLLKYNENGTITDAVDCALDPLSETKCTLKSFTVEKGIYQTSNFRVQPTESIVRFPNITNLCPFGEVFNATRFASVYAWNRKRISNCVADYSVLYNSASFSTFKCYGVSPTKLNDLCFTNVYADSFVIRGDEVRQIAPGQTGKIADYNYKLPDDFTGCVIAWNSNNLDSKVGGNYNYLYRLFRKSNLKPFERDISTEIYQAGSTPCNGVEGFNCYFPLQSYGFQPTNGVGYQPYRVVVLSFELLHAPATVCGPKKSTNLVKNKCVNFNFNGLTGTGVLTESNKKFLPFQQFGRDIADTTDAVRDPQTLEILDITPCSFGGVSVITPGTNTSNQVAVLYQGVNCTEVPVAIHADQLTPTWRVYSTGSNVFQTRAGCLIGAEHVNNSYECDIPIGAGICASYQTQTNSPRRARSVASQSIIAYTMSLGAENSVVYSNNSIAIPTNFTISVTTEILPVSMTKTSVDCTMYICGDSTECSNLLLQYGSFCTQLNRALTGIAVEQDKNTQEVFAQVKQIYKTPPIKDFGGFNFSQILPDPSKPSKRSFIEDLLFNKVTLADAGFIKQYGDCLGDIAARDLICAQKFNGLTVLPPLLTDEMIAQYTSALLAGTITSGWTFGAGAALQIPFAMQMAYRFNGIGVTQNVLYENQKLIANQFNSAIGKIQDSLSSTASALGKLQDVVNQNAQALNTLVKQLSSNFGAISSVLNDILSRLDPPEAEVQIDRLITGRLQSLQTYVTQQLIRAAEIRASANLAATKMSECVLGQSKRVDFCGKGYHLMSFPQSAPHGVVFLHVTYVFAQEKNFTTAPAICHDGKAHFPREGVFVSNGTHWFVTQRNFYEPQIITTDNTFVSGNCDVVIGIVNNTVYDPLQPELDSGGGGSDIIKLLNEQVNKEMQSSNLYMSMSSWCYTHSLDGAGLFLFDHAAEEYEHAKKLIIFLNENNVPVQLTSISAPEHKFEGLTQIFQKAYEHEQHISESINNIVDHAIKSKDHATFNFLQWYVAEQHEEEVLFKDILDKIELIGNENHGLYLADQYVKGIAKSRKS

SEQ ID NO: 8893 - protein, 1315 aa, Artificial Sequence
  SARS-CoV-2/France/HF2496/2020__EPI_ISL_418231 spike protein (1-1147)(K986P_V987P_P1069F) Ferritin construct
MFVFLVLLPLVSSQCVNLTTRTQLPPAYTNSFTRGVYYPDKVFRSSVLHSTQDLFLPFFSNVTWFHAIHVSGTNGTKRFDNPVLPFNDGVYFASTEKSNIIRGWIFGTTLDSKTQSLLIVNNATNVVIKVCEFQFCNDPFLGVYYHKNNKSWMESEFRVYSSANNCTFEYVSQPFLMDLEGKQGNFKNLREFVFKNIDGYFKIYSKHTPINLVRDLPQGFSALEPLVDLPIGINITRFQTLLALHRSYLTPGDSSSGWTAGAAAYYVGYLQPRTFLLKYNENGTITDAVDCALDPLSETKCTLKSFTVEKGIYQTSNFRVQPTESIVRFPNITNLCPFGEVFNATRFASVYAWNRKRISNCVADYSVLYNSASFSTFKCYGVSPTKLNDLCFTNVYADSFVIRGDEVRQIAPGQTGKIADYNYKLPDDFTGCVIAWNSNNLDSKVGGNYNYLYRLFRKSNLKPFERDISTEIYQAGSTPCNGVEGFNCYFPLQSYGFQPTNGVGYQPYRVVVLSFELLHAPATVCGPKKSTNLVKNKCVNFNFNGLTGTGVLTESNKKFLPFQQFGRDIADTTDAVRDPQTLEILDITPCSFGGVSVITPGTNTSNQVAVLYQGVNCTEVPVAIHADQLTPTWRVYSTGSNVFQTRAGCLIGAEHVNNSYECDIPIGAGICASYQTQTNSPRRARSVASQSIIAYTMSLGAENSVAYSNNSIAIPTNFTISVTTEILPVSMTKTSVDCTMYICGDSTECSNLLLQYGSFCTQLNRALTGIAVEQDKNTQEVFAQVKQIYKTPPIKDFGGFNFSQILPDPSKPSKRSFIEDLLFNKVTLADAGFIKQYGDCLGDIVARDLICAQKFNGLTVLPPLLTDEMIAQYTSALLAGTITSGWTFGAGAALQIPFAMQMAYRFNGIGVTQNVLYENQKLIANQFNSAIGKIQDSLSSTASALGKLQDVVNQNAQALNTLVKQLSSNFGAISSVLNDILSRLDPPEAEVQIDRLITGRLQSLQTYVTQQLIRAAEIRASANLAATKMSECVLGQSKRVDFCGKGYHLMSFPQSAPHGVVFLHVTYVFAQEKNFTTAPAICHDGKAHFPREGVFVSNGTHWFVTQRNFYEPQIITTDNTFVSGNCDVVIGIVNNTVYDPLQPELDSGGGGSDIIKLLNEQVNKEMQSSNLYMSMSSWCYTHSLDGAGLFLFDHAAEEYEHAKKLIIFLNENNVPVQLTSISAPEHKFEGLTQIFQKAYEHEQHISESINNIVDHAIKSKDHATFNFLQWYVAEQHEEEVLFKDILDKIELIGNENHGLYLADQYVKGIAKSRKS

SEQ ID NO: 8894 - protein, 1315 aa, Artificial Sequence
  SARS-CoV-2/USA/WA-UW291/2020__EPI_ISL_418076 spike protein (1-1147)(K986P_V987P_P1069F) Ferritin construct
MFVFLVLLPLVSSQCVNLTTRTQLPPAYTNSFTRGVYYPDKVFRSSVLHSTQDLFLPFFSNVTWFHAIHVSGTNGTKRFDNPVLPFNDGVYFASTEKSNIIRGWIFGTTLDSKTQSLLIVNNATNVVIKVCEFQFCNDPFLGVYYHKNNKSWMESEFRVYSSANNCTFEYVSQPFLMDLEGKQGNFKNLREFVFKNIDGYFKIYSKHTPINLVRDLPQGFSALEPLVDLPIGINITRFQTLLALHRSYLTPGDSSSGWTAGAAAYYVGYLQPRTFLLKYNENGTITDAVDCALDPLSETKCTLKSFTVEKGIYQTSNFRVQPTESIVRFPNITNLCPFGEVFNATRFASVYAWNRKRISNCVADYSVLYNSASFSTFKCYGVSPTKLNDLCFTNVYADSFVIRGDEVRQIAPGQTGKIADYNYKLPDDFTGCVIAWNSNNLDSKVGGNYNYLYRLFRKSNLKPFERDISTEIYQAGSTPCNGVEGFNCYFPLQSYGFQPTNGVGYQPYRVVVLSFELLHAPATVCGPKKSTNLVKNKCVNFNFNGLTGTGVLTESNKKFLPFQQFGRDIADTTDAVRDPQTLEILDITPCSFGGVSVITPGTNTSNQVAVLYQGVNCTEVPVAIHADQLTPTWRVYSTGSNVFQTRAGCLIGAEHVNNSYECDIPIGAGICASYQTQTNSPRRARSVASQSIIAYTMSLGAENSVAYSNNSIAIPTNFTISVTTEILPVSMTKTSVDCTMYICGDSTECSNLLLQYGSFCTQLNRALTGIAVEQDKNTQEVFAQVKQIYKTPPIKDFGGFNFSQILPDPSKPSKRSFIEDLLFNKVTLADAGFIKQYGDCLGDIAARDLICAQKFNGLTVLPPLLTDEMIAQYTSALLAGTITSGWTFGAGAALQIPFAMQMAYRFNGIGVTQNVLYENQKLIANQFNSAIGKIQYSLSSTASALGKLQDVVNQNAQALNTLVKQLSSNFGAISSVLNDILSRLDPPEAEVQIDRLITGRLQSLQTYVTQQLIRAAEIRASANLAATKMSECVLGQSKRVDFCGKGYHLMSFPQSAPHGVVFLHVTYVFAQEKNFTTAPAICHDGKAHFPREGVFVSNGTHWFVTQRNFYEPQIITTDNTFVSGNCDVVIGIVNNTVYDPLQPELDSGGGGSDIIKLLNEQVNKEMQSSNLYMSMSSWCYTHSLDGAGLFLFDHAAEEYEHAKKLIIFLNENNVPVQLTSISAPEHKFEGLTQIFQKAYEHEQHISESINNIVDHAIKSKDHATFNFLQWYVAEQHEEEVLFKDILDKIELIGNENHGLYLADQYVKGIAKSRKS

SEQ ID NO: 8895 - protein, 1315 aa, Artificial Sequence; identical to SEQ ID NO: 8858
  SARS-CoV-2/Portugal/PT0034/2020__EPI_ISL_418019 spike protein (1-1147)(K986P_V987P_P1069F) Ferritin construct

SEQ ID NO: 8896 - protein, 1315 aa, Artificial Sequence; identical to SEQ ID NO: 8850
  SARS-CoV-2/Iceland/202/2020__EPI_ISL_417750 spike protein (1-1147)(K986P_V987P_P1069F) Ferritin construct

SEQ ID NO: 8897 - protein, 1315 aa, Artificial Sequence
  SARS-CoV-2/USA/WA-UW261/2020__EPI_ISL_418046 spike protein (1-1147)(K986P_V987P_P1069F) Ferritin construct
MFVFLVLLPLVSSQCVNLTTRTQLPPAYTNSFTRGVYYPDKVFRSSVLHSTQDLFLPFFSNVTWFHAIHVSGTNGTKRFDNPVLPFNDGVYFASTEKSNIIRGWIFGTTLDSKTQSLLIVNNATNVVIKVCEFQFCNDPFLGVYYHKNNKSWMESEFRVYSSANNCTFEYVSQPFLMDLEGKQGNFKNLREFVFKNIDGYFKIYSKHTPINLVRDLPQGFSALEPLVDLPIGINITRFQTLLALHRSYLTPGDSSSGWTAGAAAYYVGYLQPRTFLLKYNENGTITDAVDCALDPLSETKCTLKSFTVEKGIYQTSNFRVQPTESIVRFPNITNLCPFGEVFNATRFTSVYAWNRKRISNCVADYSVLYNSASFSTFKCYGVSPTKLNDLCFTNVYADSFVIRGDEVRQIAPGQTGKIADYNYKLPDDFTGCVIAWNSNNLDSKVGGNYNYLYRLFRKSNLKPFERDISTEIYQAGSTPCNGVEGFNCYFPLQSYGFQPTNGVGYQPYRVVVLSFELLHAPATVCGPKKSTNLVKNKCVNFNFNGLTGTGVLTESNKKFLPFQQFGRDIADTTDAVRDPQTLEILDITPCSFGGVSVITPGTNTSNQVAVLYQDVNCTEVPVAIHADQLTPTWRVYSTGSNVFQTRAGCLIGAEHVNNSYECDIPIGAGICASYQTQTNSPRRARSVASQSIIAYTMSLGAENSVAYSNNSIAIPTNFTISVTTEILPVSMTKTSVDCTMYICGDSTECSNLLLQYGSFCTQLNRALTGIAVEQDKNTQEVFAQVKQIYKTPPIKDFGGFNFSQILPDPSKPSKRSFIEDLLFNKVTLADAGFIKQYGDCLGDIAARDLICAQKFNGLTVLPPLLTDEMIAQYTSALLAGTITSGWTFGAGAALQIPFAMQMAYRFNGIGVTQNVLYENQKLIANQFNSAIGKIQDSLSSTASALGKLQDVVNQNAQALNTLVKQLSSNFGAISSVLNDILSRLDPPEAEVQIDRLITGRLQSLQTYVTQQLIRAAEIRASANLAATKMSECVLGQSKRVDFCGKGYHLMSFPQSAPHGVVFLHVTYVFAQEKNFTTAPAICHDGKAHFPREGVFVSNGTHWFVTQRNFYEPQIITTDNTFVSGNCDVVIGIVNNTVYDPLQPELDSGGGGSDIIKLLNEQVNKEMQSSNLYMSMSSWCYTHSLDGAGLFLFDHAAEEYEHAKKLIIFLNENNVPVQLTSISAPEHKFEGLTQIFQKAYEHEQHISESINNIVDHAIKSKDHATFNFLQWYVAEQHEEEVLFKDILDKIELIGNENHGLYLADQYVKGIAKSRKS

SEQ ID NO: 8898 - protein, 1315 aa, Artificial Sequence
  SARS-CoV-2/Portugal/PT0035/2020__EPI_ISL_418020 spike protein (1-1147)(K986P_V987P_P1069F) Ferritin construct
MFVFLVLLPLVSSQCVNLTTRTQLPPAYTNSFTRGVYYPDKVFRSSVLHSTQDLFLPFFSNVTWFHAIHVSGTNGTKRFDNPVLPFNDGVYFASTEKSNIIRGWIFGTTLDSKTQSLLIVNNATNVVIKVCEFQFCNDPFLGVYYHKNNKSWMESEFRVYSSANNCTFEYVSQPFLMDLEGKQGNFKNLREFVFKNIDGYFKIYSKHTPINLVRDLPQGFSALEPLVDLPIGINITRFQTLLALHRSYLTPGDSSSGWTAGAAAYYVGYLQPRTFLLKYNENGTITDAVDCALDPLSETKCTLKSFTVEKGIYQTSNFRVQPTESIVRFPNITNLCPFGEVFNATRFASVYAWNRKRISNCVADYSVLYNSASFSTFKCYGVSPTKLNDLCFTNVYADSFVIRGDEVRQIAPGQTGKIADYNYKLPDDFTGCVIAWNSNNLDSKVGGNYNYLYRLFRKSNLKPFERDISTEIYQAGSTPCNGVEGFNCYFPLQSYGFQPTNGVGYQPYRVVVLSFELLHAPATVCGPKKSTNLVKNKCVNFNFNGLTGTGVLTESNKKFLPFQQFGRDIADTTDAVRDPQTLEILDITPCSFGGVSVITPGTNTSNQVAVLYQDVNCTEVPVAIHADQLTPTWRVYSTGSNVFQTRAGCLIGAEHVNNSYECDIPIGAGICASYQTQTNSPRRARSVASQSIIAYTMSLGAENSVAYSNNSIAIPTNFTISVTTEILPVSMTKTSVDCTMYICGDSTECSNLLLQYGSFCTQLNRALTGIAVEQDKNTQEVFAQVKQIYKTPPIKDFGGFNFSQILPDPSKPSKRSFIEDLLFNKVTLADAGFIKQYGDCLGDISARDLICAQKFNGLTVLPPLLTDEMIAQYTSALLAGTITSGWTFGAGAALQIPFAMQMAYRFNGIGVTQNVLYENQKLIANQFNSAIGKIQDSLSSTASALGKLQDVVNQNAQALNTLVKQLSSNFGAISSVLNDILSRLDPPEAEVQIDRLITGRLQSLQTYVTQQLIRAAEIRASANLAATKMSECVLGQSKRVDFCGKGYHLMSFPQSAPHGVVFLHVTYVFAQEKNFTTAPAICHDGKAHFPREGVFVSNGTHWFVTQRNFYEPQIITTDNTFVSGNCDVVIGIVNNTVYDPLQPELDSGGGGSDIIKLLNEQVNKEMQSSNLYMSMSSWCYTHSLDGAGLFLFDHAAEEYEHAKKLIIFLNENNVPVQLTSISAPEHKFEGLTQIFQKAYEHEQHISESINNIVDHAIKSKDHATFNFLQWYVAEQHEEEVLFKDILDKIELIGNENHGLYLADQYVKGIAKSRKS

SEQ ID NO: 8899 - protein, 1315 aa, Artificial Sequence
  SARS-CoV-2/USA/NY-NYUMC7/2020__EPI_ISL_418192 spike protein (1-1147)(K986P_V987P_P1069F) Ferritin construct
MFVFLVLLPLVSSQCVNLTTRTQLPPAYTNSFTRGVYYPDKVFRSSVLHSTQDLFLPFFSNVTWFHAIHVSGTNGTKRFDNPVLPFNDGVYFASTEKSNIIRGWIFGTTLDSKTQSLLIVNNATNVVIKVCEFQFCNDPFLGVYHHKNNKSWMESEFRVYSSANNCTFEYVSQPFLMDLEGKQGNFKNLREFVFKNIDGYFKIYSKHTPINLVRDLPQGFSALEPLVDLPIGINITRFQTLLALHRSYLTPGDSSSGWTAGAAAYYVGYLQPRTFLLKYNENGTITDAVDCALDPLSETKCTLKSFTVEKGIYQTSNFRVQPTESIVRFPNITNLCPFGEVFNATRFASVYAWNRKRISNCVADYSVLYNSASFSTFKCYGVSPTKLNDLCFTNVYADSFVIRGDEVRQIAPGQTGKIADYNYKLPDDFTGCVIAWNSNNLDSKVGGNYNYLYRLFRKSNLKPFERDISTEIYQAGSTPCNGVEGFNCYFPLQSYGFQPTNGVGYQPYRVVVLSFELLHAPATVCGPKKSTNLVKNKCVNFNFNGLTGTGVLTESNKKFLPFQQFGRDIADTTDAVRDPQTLEILDITPCSFGGVSVITPGTNTSNQVAVLYQGVNCTEVPVAIHADQLTPTWRVYSTGSNVFQTRAGCLIGAEHVNNSYECDIPIGAGICASYQTQTNSPRRARSVASQSIIAYTMSLGAENSVAYSNNSIAIPTNFTISVTTEILPVSMTKTSVDCTMYICGDSTECSNLLLQYGSFCTQLNRALTGIAVEQDKNTQEVFAQVKQIYKTPPIKDFGGFNFSQILPDPSKPSKRSFIEDLLFNKVTLADAGFIKQYGDCLGDIAARDLICAQKFNGLTVLPPLLTDEMIAQYTSALLAGTITSGWTFGAGAALQIPFAMQMAYRFNGIGVTQNVLYENQKLIANQFNSAIGKIQDSLSSTASALGKLQDVVNQNAQALNTLVKQLSSNFGAISSVLNDILSRLDPPEAEVQIDRLITGRLQSLQTYVTQQLIRAAEIRASANLAATKMSECVLGQSKRVDFCGKGYHLMSFPQSAPHGVVFLHVTYVFAQEKNFTTAPAICHDGKAHFPREGVFVSNGTHWFVTQRNFYEPQIITTDNTFVSGNCDVVIGIVNNTVYDPLQPELDSGGGGSDIIKLLNEQVNKEMQSSNLYMSMSSWCYTHSLDGAGLFLFDHAAEEYEHAKKLIIFLNENNVPVQLTSISAPEHKFEGLTQIFQKAYEHEQHISESINNIVDHAIKSKDHATFNFLQWYVAEQHEEEVLFKDILDKIELIGNENHGLYLADQYVKGIAKSRKS

SEQ ID NO: 8900 - protein, 1315 aa, Artificial Sequence
  SARS-CoV-2/Iceland/189/2020__EPI_ISL_417709 spike protein (1-1147)(K986P_V987P_P1069F) Ferritin construct
MFVFLVLLPLVSSQCVNLTTRTQLPPAYTNSFTRGVYYPDKVFRSSVLHSTQDLFLPFFSNVTWFHAIHVSGTNGTKRFDNPVLPFNDGVYFASTEKSNIIRGWIFGTTLDSKTQSLLIVNNATNVVIKVCEFQFCNDPFLGVYYHKNNKSWMESEFRVYSSANNCTFEYVSQPFLMDLEGKQGNFKNLREFVFKNIDGYFKIYSKHTPINLVRDLPQGFSALEPLVDLPIGINITRFQTLLALHRSYLTPGDSSSGWTAGAAAYYVGYLQPRTFLLKYNENGTITDAVDCALDPLSETKCTLKSFTVEKGIYQTSNFRVQPTESIVRFPNITNLCPFGEVFNATRFASVYAWNRKRISNCVADYSVLYNSASFSTFKCYGVSPTKLNDLCFTNVYADSFVIRGDEVRQIAPGQTGKIADYNYKLPDDFTGCVIAWNSNNLDSKVGGNYNYLYRLFRKSNLKPFERDISTEIYQAGSTPCNGVEGFNCYFPLQSYGFQPTNGVGYQPYRVVVLSFELLHAPATVCGPKKSTNLVKNKCVNFNFNGLTGTGVLTESNKKFLPFQQFGRDIADTTDAVRDPQTLEILDITPCSFGGVSVITPGTNTSNQVAVLYQGVNCTEVPVAIHADQLTPTWRVYSTGSNVFQTRAGCLIGAEHVNNSYECDIPIGAGICASYQTQTNSPRRARSVASQSIIAYTMSLGAENSVAYSNNSIAIPTNFTISVTTEILPVSMTKTSVDCTMYICGDSTECSNLLLQYGSFCTQLNRALTGIAVEQDKNTQEVFAQVKQIYKTPPIKDFGGFNFSQILPDPSKPSKRSFIEDLLFNKVTLADAGFTKQYGDCLGDIAARDLICAQKFNGLTVLPPLLTDEMIAQYTSALLAGTITSGWTFGAGAALQIPFAMQMAYRFNGIGVTQNVLYENQKLIANQFNSAIGKIQDSLSSTASALGKLQDVVNQNAQALNTLVKQLSSNFGAISSVLNDILSRLDPPEAEVQIDRLITGRLQSLQTYVTQQLIRAAEIRASANLAATKMSECVLGQSKRVDFCGKGYHLMSFPQSAPHGVVFLHVTYVFAQEKNFTTAPAICHDGKAHFPREGVFVSNGTHWFVTQRNFYEPQIITTDNTFVSGNCDVVIGIVNNTVYDPLQPELDSGGGGSDIIKLLNEQVNKEMQSSNLYMSMSSWCYTHSLDGAGLFLFDHAAEEYEHAKKLIIFLNENNVPVQLTSISAPEHKFEGLTQIFQKAYEHEQHISESINNIVDHAIKSKDHATFNFLQWYVAEQHEEEVLFKDILDKIELIGNENHGLYLADQYVKGIAKSRKS

SEQ ID NO: 8901 - protein, 1315 aa, Artificial Sequence
  SARS-CoV-2/Australia/NSW56/2020__EPI_ISL_417408 spike protein (1-1147)(K986P_V987P_P1069F) Ferritin construct
MFVFLVLLPLVSSQCVNLTTRTQLPPAYTNSFTRGVYYPDKVFRSSVLHSTQDLFLPFFSNVTWFHAIHVSGTNGTKRFDNPVLPFNDGVYFASTEKSNIIRGWIFGTTLDSKTQSLLIVNNATNVVIKVCEFQFCNDPFLGVYYHKNNKSWMESEFRVYSSANNCTFEYVSQPFLMDLEGKQGNFKNLREFVFKNIDGYFKIYSKHTPINLVRDLPQGFSALEPLVDLPIGINITRFQTLLALHRSYLTPGDSSSGWTAGAAAYYVGYLQPRTFLLKYNENGTITDAVDCALDPLSETKCTLKSFTVEKGIYQTSNFRVQPTESIVRFPNITNLCPFGEVFNATRFASVYAWNRKRISNCVADYSVLYNSASFSTFKCYGVSPTKLNDLCFTNVYADSFVIRGDEVRQIAPGQTGKIADYNYKLPDDFTGCVIAWNSNNLDSKVGGNYNYLYRLFRKSNLKPFERDISTEIYQAGSTPCNGVEGFNCYFPLQSYGFQPTNGVGYQPYRVVVLSFELLHAPATVCGPKKSTNLVKNKCVNFNFNGLTGTGVLTESNKKFLPFQQFGRDIADTTDAVRDPQTLEILDITPCSFGGVSVITPGTNTSNQVAVLYQDVNCTEVPVAIHADQLTPTWRVYSTGSNVFQTRAGCLIGAEHVNNSYECDIPIGAGICASYQTQTNSPRRARSVASQSIIAYTMSLGAENSVAYSNNSIAIPTNFTISVTTEILPVSMTKTSVDCTMYICGDSTECSNLLLQYGSFCTQLNRALTGIAVEQDKNTQEVFAQVKQIYKTPPIKDFGGFNFSQILPDSSKPSKRSFIEDLLFNKVTLADAGFIKQYGDCLGDIAARDLICAQKFNGLTVLPPLLTDEMIAQYTSALLAGTITSGWTFGAGAALQIPFAMQMAYRFNGIGVTQNVLYENQKLIANQFNSAIGKIQDSLSSTASALGKLQDVVNQNAQALNTLVKQLSSNFGAISSVLNDILSRLDPPEAEVQIDRLITGRLQSLQTYVTQQLIRAAEIRASANLAATKMSECVLGQSKRVDFCGKGYHLMSFPQSAPHGVVFLHVTYVFAQEKNFTTAPAICHDGKAHFPREGVFVSNGTHWFVTQRNFYEPQIITTDNTFVSGNCDVVIGIVNNTVYDPLQPELDSGGGGSDIIKLLNEQVNKEMQSSNLYMSMSSWCYTHSLDGAGLFLFDHAAEEYEHAKKLIIFLNENNVPVQLTSISAPEHKFEGLTQIFQKAYEHEQHISESINNIVDHAIKSKDHATFNFLQWYVAEQHEEEVLFKDILDKIELIGNENHGLYLADQYVKGIAKSRKS

SEQ ID NO: 8902 - protein, 1315 aa, Artificial Sequence
  SARS-CoV-2/Iceland/280/2020__EPI_ISL_417608 spike protein (1-1147)(K986P_V987P_P1069F) Ferritin construct
MFVFLVLLPLVSSQCVNLTTRTQLPPAYTNSFTRGVYYPDKVFRSSVLHSTQDLFLPFFSNVTWFHAIHVSGTNGTKRFDNPVLPFNDGVYFASTEKSNIIRGWIFGTTLDSKTQSLLIVNNATNVVIKVCEFQFCNDPFLGVYYHKNNKSWMESEFRVYSSANNCTFEYVSQPFLMDLEGKQGNFKNLREFVFKNIDGYFKIYSKHTPINLVRDLPQGFSALEPLVDLPIGINITRFQTLLALHRSYLTPGDSSSGWTAGAAAYYVGYLQPRTFLLKYNENGTITDAVDCALDPLSETKCTLKSFTVEKGIYQTSNFRVQPTESIVRFPNITNLCPFGEVFNATRFASVYAWNRKRISNCVADYSVLYNSASFSTFKCYGVSPTKLNDLCFTNVYADSFVIRGDEVRQIAPGQTGKIADYNYKLPDDFTGCVIAWNSNNLDSKVGGNYNYLYRLFRKSNLKPFERDISTEIYQAGSTPCNGVEGFNCYFPLQSYGFQPTNGVGYQPYRVVVLSFELLHAPATVCGPKKSTNLVKNKCVNFNFNGLTGTGVLTESNKKFLPFQQFGRDIADTTDAVRDPQTLEILDITPCSFGGVSVITPGTNTSNQVAVLYQGVNCTEVPVAIHADQLTPTWRVYSTGSNVFQTRAGCLIGAEHVNNSYECDIPIGAGICASYHTQTNSPRRARSVASQSIIAYTMSLGAENSVAYSNNSIAIPTNFTISVTTEILPVSMTKTSVDCTMYICGDSTECSNLLLQYGSFCTQLNRALTGIAVEQDKNTQEVFAQVKQIYKTPPIKDFGGFNFSQILPDPSKPSKRSFIEDLLFNKVTLADAGFIKQYGDCLGDIAARDLICAQKFNGLTVLPPLLTDEMIAQYTSALLAGTITSGWTFGAGAALQIPFAMQMAYRFNGIGVTQNVLYENQKLIANQFNSAIGKIQDSLSSTASALGKLQDVVNQNAQALNTLVKQLSSNFGAISSVLNDILSRLDPPEAEVQIDRLITGRLQSLQTYVTQQLIRAAEIRASANLAATKMSECVLGQSKRVDFCGKGYHLMSFPQSAPHGVVFLHVTYVFAQEKNFTTAPAICHDGKAHFPREGVFVSNGTHWFVTQRNFYEPQIITTDNTFVSGNCDVVIGIVNNTVYDPLQPELDSGGGGSDIIKLLNEQVNKEMQSSNLYMSMSSWCYTHSLDGAGLFLFDHAAEEYEHAKKLIIFLNENNVPVQLTSISAPEHKFEGLTQIFQKAYEHEQHISESINNIVDHAIKSKDHATFNFLQWYVAEQHEEEVLFKDILDKIELIGNENHGLYLADQYVKGIAKSRKS

SEQ ID NO: 8903 - protein, 1315 aa, Artificial Sequence; identical to SEQ ID NO: 8858
  SARS-CoV-2/Iceland/247/2020__EPI_ISL_417575 spike protein (1-1147)(K986P_V987P_P1069F) Ferritin construct

SEQ ID NO: 8904 - protein, 1315 aa, Artificial Sequence
  SARS-CoV-2/Iceland/238/2020__EPI_ISL_417566 spike protein (1-1147)(K986P_V987P_P1069F) Ferritin construct
MFVFLVLLPLVSSQCVNLTTRTQLPPAYTNSFTRGVYYPDKVFRSSVLHSTQDLFLPFFSNVTWFHAIHVSGTNGTKRFDNPVLPFNDGVYFASTEKSNIIRGWIFGTTLDSKTQSLLIVNNATNVVIKVCEFQFCNDPFLGVYYHKNNKSWMESEFRVYSSANNCTFEYVSQPFLMDLEGKQGNFKNLREFVFKNIDGYFKIYSKHTPINLVRDLPQGFSALEPLVDLPIGINITRFQTLLALHRSYLTPGDSSSGWTAGAAAYYVGYLQPRTFLLKYNENGTITDAVDCALDPLSETKCTLKSFTVEKGIYQTSNFRVQPTESIVRFPNITNLCPFGEVFNATRFASVYAWNRKRISNCVADYSVLYNSASFSTFKCYGVSPTKLNDLCFTNVYADSFVIRGDEVRQIAPGQTGKIADYNYKLPDDFTGCVIAWNSNNLDSKVGGNYNYLYRLFRKSNLKPFERDISTEIYQAGSTPCNGVEGFNCYFPLQSYGFQPTNGVGYQPYRVVVLSFELLHAPATVCGPKKSTNLVKNKCVNFNFNGLTGTGVLTESNKKFLPFQQFGRDIADTTDAVRDPQTLEILDITPCSFGGVSVITPGTNTSNQVAVLYQGVNCTEVPVAIHADQLTPTWRVYSTGSNVFQTRAGCLIGAEHVNNSYECDIPIGAGICASYQTQTNSPRRARSVASQSIIAYTMSLGAENSVAYSNNSIAIPTNFTISVTTEILPVSMTKTSVDCTMYICGDSTECSNLLLQYGSFCTQLNRALTGIAVEQDKNTQEVFAQVKQIYKTPPIKDFGGFNFSQILPDPSKPSKRSFIEDLLFNKVTLADVGFIKQYGDCLGDIAARDLICAQKFNGLTVLPPLLTDEMIAQYTSALLAGTITSGWTFGAGAALQIPFAMQMAYRFNGIGVTQNVLYENQKLIANQFNSAIGKIQDSLSSTASALGKLQDVVNQNAQALNTLVKQLSSNFGAISSVLNDILSRLDPPEAEVQIDRLITGRLQSLQTYVTQQLIRAAEIRASANLAATKMSECVLGQSKRVDFCGKGYHLMSFPQSAPHGVVFLHVTYVFAQEKNFTTAPAICHDGKAHFPREGVFVSNGTHWFVTQRNFYEPQIITTDNTFVSGNCDVVIGIVNNTVYDPLQPELDSGGGGSDIIKLLNEQVNKEMQSSNLYMSMSSWCYTHSLDGAGLFLFDHAAEEYEHAKKLIIFLNENNVPVQLTSISAPEHKFEGLTQIFQKAYEHEQHISESINNIVDHAIKSKDHATFNFLQWYVAEQHEEEVLFKDILDKIELIGNENHGLYLADQYVKGIAKSRKS

SEQ ID NO: 8905 - protein, 1315 aa, Artificial Sequence
  SARS-CoV-2/Greece/16/2020__EPI_ISL_418265 spike protein (1-1147)(K986P_V987P_P1069F) Ferritin construct
MFVFLVLLPLVSSQCVNLTTRTQLPPAYTNSFTRGVYYPDKVFRSSVLHSTQDLFLPFFSNVTWFHAIHVSGTNGTKRFDNPVLPFNDGVYFASTEKSNIIRGWIFGTTLDSKTQSLLIVNNATNVVIKVCEFQFCNDPFLGVYYHKNNKSWMESEFRVYSSANNCTFEYVSQPFLMDLEGKQGNFKNLREFVFKNVDGYFKIYSKHTPINLVRDLPQGFSALEPLVDLPIGINITRFQTLLALHRSYLTPGDSSSGWTAGAAAYYVGYLQPRTFLLKYNENGTITDAVDCALDPLSETKCTLKSFTVEKGIYQTSNFRVQPTESIVRFPNITNLCPFGEVFNATRFASVYAWNRKRISNCVADYSVLYNSASFSTFKCYGVSPTKLNDLCFTNVYADSFVIRGDEVRQIAPGQTGKIADYNYKLPDDFTGCVIAWNSNNLDSKVGGNYNYLYRLFRKSNLKPFERDISTEIYQAGSTPCNGVEGFNCYFPLQSYGFQPTNGVGYQPYRVVVLSFELLHAPATVCGPKKSTNLVKNKCVNFNFNGLTGTGVLTESNKKFLPFQQFGRDIADTTDAVRDPQTLEILDITPCSFGGVSVITPGTNTSNQVAVLYQDVNCTEVPVAIHADQLTPTWRVYSTGSNVFQTRAGCLIGAEHVNNSYECDIPIGAGICASYQTQTNSPRRARSVASQSIIAYTMSLGAENSVAYSNNSIAIPTNFTISVTTEILPVSMTKTSVDCTMYICGDSTECSNLLLQYGSFCTQLNRALTGIAVEQDKNTQEVFAQVKQIYKTPPIKDFGGFNFSQILPDPSKPSKRSFIEDLLFNKVTLADAGFIKQYGDCLGDIAARDLICAQKFNGLTVLPPLLTDEMIAQYTSALLAGTITSGWTFGAGAALQIPFAMQMAYRFNGIGVTQNVLYENQKLIANQFNSAIGKIQDSLSSTASALGKLQDVVNQNAQALNTLVKQLSSNFGAISSVLNDILSRLDPPEAEVQIDRLITGRLQSLQTYVTQQLIRAAEIRASANLAATKMSECVLGQSKRVDFCGKGYHLMSFPQSAPHGVVFLHVTYVFAQEKNFTTAPAICHDGKAHFPREGVFVSNGTHWFVTQRNFYEPQIITTDNTFVSGNCDVVIGIVNNTVYDPLQPELDSGGGGSDIIKLLNEQVNKEMQSSNLYMSMSSWCYTHSLDGAGLFLFDHAAEEYEHAKKLIIFLNENNVPVQLTSISAPEHKFEGLTQIFQKAYEHEQHISESINNIVDHAIKSKDHATFNFLQWYVAEQHEEEVLFKDILDKIELIGNENHGLYLADQYVKGIAKSRKS

SEQ ID NO: 8906 - protein, 1315 aa, Artificial Sequence
  SARS-CoV-2/Iceland/319/2020__EPI_ISL_417648 spike protein (1-1147)(K986P_V987P_P1069F) Ferritin construct
MFVFLVLLPLVSSQCVNLTTRTQLPPAYTNSFTRGVYYPDKVFRSSVLHSTQDLFLPFFSNVTWFHAIHVSGTNGTKRFDNPVLPFNDGVYFASTEKSNIIRGWIFGTTLDSKTQSLLIVNNATNVVIKVCEFQFCNDPFLGVYYHKNNKSWMESEFRVYSSANNCTFEYVSQPFLIDLEGKQGNFKNLREFVFKNIDGYFKIYSKHTPINLVRDLPQGFSALEPLVDLPIGINITRFQTLLALHRSYLTPGDSSSGWTAGAAAYYVGYLQPRTFLLKYNENGTITDAVDCALDPLSETKCTLKSFTVEKGIYQTSNFRVQPTESIVRFPNITNLCPFGEVFNATRFASVYAWNRKRISNCVADYSVLYNSASFSTFKCYGVSPTKLNDLCFTNVYADSFVIRGDEVRQIAPGQTGKIADYNYKLPDDFTGCVIAWNSNNLDSKVGGNYNYLYRLFRKSNLKPFERDISTEIYQAGSTPCNGVEGFNCYFPLQSYGFQPTNGVGYQPYRVVVLSFELLHAPATVCGPKKSTNLVKNKCVNFNFNGLTGTGVLTESNKKFLPFQQFGRDIADTTDAVRDPQTLEILDITPCSFGGVSVITPGTNTSNQVAVLYQGVNCTEVPVAIHADQLTPTWRVYSTGSNVFQTRAGCLIGAEHVNNSYECDIPIGAGICASYQTQTNSPRRARSVASQSIIAYTMSLGAENSVAYSNNSIAIPTNFTISVTTEILPVSMTKTSVDCTMYICGDSTECSNLLLQYGSFCTQLNRALTGIAVEQDKNTQEVFAQVKQIYKTPPIKDFGGFNFSQILPDPSKPSKRSFIEDLLFNKVTLADAGFIKQYGDCLGDIAARDLICAQKFNGLTVLPPLLTDEMIAQYTSALLAGTITSGWTFGAGAALQIPFAMQMAYRFNGIGVTQNVLYENQKLIANQFNSAIGKIQDSLSSTASALGKLQDVVNQNAQALNTLVKQLSSNFGAISSVLNDILSRLDPPEAEVQIDRLITGRLQSLQTYVTQQLIRAAEIRASANLAATKMSECVLGQSKRVDFCGKGYHLMSFPQSAPHGVVFLHVTYVFAQEKNFTTAPAICHDGKAHFPREGVFVSNGTHWFVTQRNFYEPQIITTDNTFVSGNCDVVIGIVNNTVYDPLQPELDSGGGGSDIIKLLNEQVNKEMQSSNLYMSMSSWCYTHSLDGAGLFLFDHAAEEYEHAKKLIIFLNENNVPVQLTSISAPEHKFEGLTQIFQKAYEHEQHISESINNIVDHAIKSKDHATFNFLQWYVAEQHEEEVLFKDILDKIELIGNENHGLYLADQYVKGIAKSRKS

SEQ ID NO: 8907 - protein, 1315 aa, Artificial Sequence
  SARS-CoV-2/Congo/94/2020__EPI_ISL_417947 spike protein (1-1147)(K986P_V987P_P1069F) Ferritin construct
MFVFLVLLPLVSSQCVNLTTRTQLPPAYTNSFTRGVYYPDKVFRSSVLHSTQDLFLPFFSNVTWFHAIHVSGTNGTKRFDNPVLPFNDGVYFASTEKSNIIRGWIFGTTLDSKTQSLLIVNNATNVVIKVCEFQFCNDPFLGVYYHKNNKSWMESEFRVYSSANNCTFEYVSQPFLMDLEGKQGNFKNLREFVFKNIDGYFKIYSKHTPINLVRDLPQGFSALEPLVDLPIGINITRFQTLLALHRSYLTPGDSSSGWTAGAAAYYVGYLQPRTFLLKYNENGTITDAVDCALDPLSETKCTLKSFTVEKGIYQTSNFRVQPTESIVRFPNITNLCPFGEVFNATRFASVYAWNRKRISNCVADYSVLYNSASFSTFKCYGVSPTKLNDLCFTNVYADSFVIRGDEVRQIAPGQTGKIADYNYKLPDDFTGCVIAWNSNNLDSKVGGNYNYLYRLFRKSNLKPFERDISTEIYQAGSTPCNGVEGFNCYFPLQSYGFQPTNGVGYQPYRVVVLSFELLHAPATVCGPKKSTNLVKNKCVNFNFNGLTGTGVLTESNKKFLPFQQFGRDIADTTDAVRDPQTLEILDITPCSFGGVSVITPGTNTSNQVAVLYQGVNCTEVPVAIHADQLTPTWRVYSTGSNVFQTRAGCLIGAEHVNNSYECDIPIGAGICASYQTQTNSPRRARSVASQSIIAYTMSLGAENSVAYSNNSIAIPTNFTISVTTEILPVSMTKTSVDCTMYICGDSTECSNLLLQYGSFCTQLNRALTGIAVEQDKNTQEVFAQVKQIYKTPPIKDFGGFNFSQILPDPSKPSKRSFIEDILFNKVTLADAGFIKQYGDCLGDIAARDLICAQKFNGLTVLPPLLTDEMIAQYTSALLAGTITSGWTFGAGAALQIPFAMQMAYRFNGIGVTQNVLYENQKLIANQFNSAIGKIQDSLSSTASALGKLQDVVNQNAQALNTLVKQLSSNFGAISSVLNDILSRLDPPEAEVQIDRLITGRLQSLQTYVTQQLIRAAEIRASANLAATKMSECVLGQSKRVDFCGKGYHLMSFPQSAPHGVVFLHVTYVFAQEKNFTTAPAICHDGKAHFPREGVFVSNGTHWFVTQRNFYEPQIITTDNTFVSGNCDVVIGIVNNTVYDPLQPELDSGGGGSDIIKLLNEQVNKEMQSSNLYMSMSSWCYTHSLDGAGLFLFDHAAEEYEHAKKLIIFLNENNVPVQLTSISAPEHKFEGLTQIFQKAYEHEQHISESINNIVDHAIKSKDHATFNFLQWYVAEQHEEEVLFKDILDKIELIGNENHGLYLADQYVKGIAKSRKS

SEQ ID NO: 8908 - protein, 1315 aa, Artificial Sequence
  SARS-CoV-2/Congo/158/2020__EPI_ISL_417950 spike protein (1-1147)(K986P_V987P_P1069F) Ferritin construct
MFVFLVLLPLVSSQCVNLTTRTQLPPAYTNSFTRGVYYPDKVFRSSVLHSTQDLFLPFFSNVTWFHAIHVSGTNGTKRFDNPVLPFNDGVYFASTEKSNIIRGWIFGTTLDSKTQSLLIVNNATNVVIKVCEFQFCNDPFLGVYYHKNNKSWMESEFRVYSSANNCTFEYVSQPFLMDLEGKQGNFKNLREFVFKNIDGYFKIYSKHTPINLVRDLPQGFSALEPLVDLPIGINITRFQTLLALHRSYLTPGDSSSGWTAGAAAYYVGYLQPRTFLLKYNENGTITDAVDCALDPLSETKCTLKSFTVEKGIYQTSNFRVQPTESIVRFPNITNLCPFGEVFNATRFASVYAWNRKRISNCVADYSVLYNSASFSTFKCYGVSPTKLNDLCFTNVYADSFVIRGDEVRQIAPGQTGKIADYNYKLPDDFTGCVIAWNSNNLDSKVGGNYNYLYRLFRKSNLKPFERDISTEIYQAGSTPCNGVEGFNCYFPLQSYGFQPTNGVGYQPYRVVVLSFELLHAPATVCGPKKSTNLVKNKCVNFNFNGLTGTGVLTESNKKFLPFQQFGRDIADTTDAVRDPQTLEILDITPCSFGGVSVITPGTNTSNQVAVLYQDVNCTEVPVAIHADQLTPTWRVYSTGSNVFQTRAGCLIGAEHVNNSYECDIPIGAGICASYQTQTNSPRRARSVASQSIIAYTMSLGAENSVAYSNNSIAIPTNFTISVTTEILPVSMTKTSVDCTMYICGDSTECSNLLLQYGSFCTQLNRALTGIAVEQDKNTQEVFAQVKQIYKTPPIKDFGGFNFSQILPDPSKPSKRSFIEDLLFNKVTLADAGFIKQYGDCLGDIAARDLICAQKFNGLTVLPPLLTDEMIAQYTSALLAGTITSGWTFGAGAALQIPFAMQMAYRFNGIGVTQNVLYENQKLIANQFNSAIGKIQDSLSSTASALGKLQDVVNQNAQALNTLVKQLSSNFGAISSVLNDILSRLDPPEAEVQIDRLITGRLQSLQTYVTQQLIRAAEIRASANLAATKMSECVLGQSKRVDFCGKGYHLMSFPQSAPHGVVFLHVTYVFAQEKNFTTAPAICHDGKAHFPREGVFVSNGTHWFVTQRNFYEPQIITTDNTFLSGNCDVVIGIVNNTVYDPLQPELDSGGGGSDIIKLLNEQVNKEMQSSNLYMSMSSWCYTHSLDGAGLFLFDHAAEEYEHAKKLIIFLNENNVPVQLTSISAPEHKFEGLTQIFQKAYEHEQHISESINNIVDHAIKSKDHATFNFLQWYVAEQHEEEVLFKDILDKIELIGNENHGLYLADQYVKGIAKSRKS

SEQ ID NO: 8909 - protein, 1315 aa, Artificial Sequence
  SARS-CoV-2/USA/UT-00034/2020__EPI_ISL_417977 spike protein (1-1147)(K986P_V987P_P1069F) Ferritin construct
MFVFLVLLPLVSSQCVNLTTRTQLPPAYTNSFTRGVYYPDKVFRSSVLHSTQDLFLPFFSNVTWFHAIHVSGTNGTKRFDNPVLPFNDGVYFASTEKSNIIRGWIFGTTLDSKTQSLLIVNNATNVVIKVCEFQFCNDPFLGVYYYKNNKSWMESEFRVYSSANNCTFEYVSQPFLMDLEGKQGNFKNLREFVFKNIDGYFKIYSKHTPINLVRDLPQGFSALEPLVDLPIGINITRFQTLLALHRSYLTPGDSSSGWTAGAAAYYVGYLQPRTFLLKYNENGTITDAVDCALDPLSETKCTLKSFTVEKGIYQTSNFRVQPTESIVRFPNITNLCPFGEVFNATRFASVYAWNRKRISNCVADYSVLYNSASFSTFKCYGVSPTKLNDLCFTNVYADSFVIRGDEVRQIAPGQTGKIADYNYKLPDDFTGCVIAWNSNNLDSKVGGNYNYLYRLFRKSNLKPFERDISTEIYQAGSTPCNGVEGFNCYFPLQSYGFQPTNGVGYQPYRVVVLSFELLHAPATVCGPKKSTNLVKNKCVNFNFNGLTGTGVLTESNKKFLPFQQFGRDIADTTDAVRDPQTLEILDITPCSFGGVSVITPGTNTSNQVAVLYQGVNCTEVPVAIHADQLTPTWRVYSTGSNVFQTRAGCLIGAEHVNNSYECDIPIGAGICASYQTQTNSPRRARSVASQSIIAYTMSLGAENSVAYSNNSIAIPTNFTISVTTEILPVSMTKTSVDCTMYICGDSTECSNLLLQYGSFCTQLNRALTGIAVEQDKNTQEVFAQVKQIYKTPPIKDFGGFNFSQILPDPSKPSKRSFIEDLLFNKVTLADAGFIKQYGDCLGDIAARDLICAQKFNGLTVLPPLLTDEMIAQYTSALLAGTITSGWTFGAGAALQIPFAMQMAYRFNGIGVTQNVLYENQKLIANQFNSAIGKIQDSLSSTASALGKLQDVVNQNAQALNTLVKQLSSNFGAISSVLNDILSRLDPPEAEVQIDRLITGRLQSLQTYVTQQLIRAAEIRASANLAATKMSECVLGQSKRVDFCGKGYHLMSFPQSAPHGVVFLHVTYVFAQEKNFTTAPAICHDGKAHFPREGVFVSNGTHWFVTQRNFYEPQIITTDNTFVSGNCDVVIGIVNNTVYDPLQPELDSGGGGSDIIKLLNEQVNKEMQSSNLYMSMSSWCYTHSLDGAGLFLFDHAAEEYEHAKKLIIFLNENNVPVQLTSISAPEHKFEGLTQIFQKAYEHEQHISESINNIVDHAIKSKDHATFNFLQWYVAEQHEEEVLFKDILDKIELIGNENHGLYLADQYVKGIAKSRKS

SEQ ID NO: 8910 - protein, 1315 aa, Artificial Sequence
  SARS-CoV-2/USA/UT-00033/2020__EPI_ISL_417976 spike protein (1-1147)(K986P_V987P_P1069F) Ferritin construct
MFVFLVLLPLVSSQCVNLTTRTQLPPAYTNSFTRGVYYPDKVFRSSVLHSTQDLFLPFFSNVTWFHAIHVSGTNGTKRFDNPVLPFNDGVYFASTEKSNIIRGWIFGTTLDSKTQSLLIVNNATNVVIKVCEFQFCNDPFLGVYYHKNNKSWMESEFRVYSSANNCTFEYVSQPFLMDLEGKQGNFKNLREFVFKNIDGYFKIYSKHTPINLVRDLPQGFSALEPLVDLPIGINITRFQTLLALHRSYLTPGDSSSGLTAGAAAYYVGYLQPRTFLLKYNENGTITDAVDCALDPLSETKCTLKSFTVEKGIYQTSNFRVQPTESIVRFPNITNLCPFGEVFNATRFASVYAWNRKRISNCVADYSVLYNSASFSTFKCYGVSPTKLNDLCFTNVYADSFVIRGDEVRQIAPGQTGKIADYNYKLPDDFTGCVIAWNSNNLDSKVGGNYNYLYRLFRKSNLKPFERDISTEIYQAGSTPCNGVEGFNCYFPLQSYGFQPTNGVGYQPYRVVVLSFELLHAPATVCGPKKSTNLVKNKCVNFNFNGLTGTGVLTESNKKFLPFQQFGRDIADTTDAVRDPQTLEILDITPCSFGGVSVITPGTNTSNQVAVLYQGVNCTEVPVAIHADQLTPTWRVYSTGSNVFQTRAGCLIGAEHVNNSYECDIPIGAGICASYQTQTNSPRRARSVASQSIIAYTMSLGAENSVAYSNNSIAIPTNFTISVTTEILPVSMTKTSVDCTMYICGDSTECSNLLLQYGSFCTQLNRALTGIAVEQDKNTQEVFAQVKQIYKTPPIKDFGGFNFSQILPDPSKPSKRSFIEDLLFNKVTLADAGFIKQYGDCLGDIAARDLICAQKFNGLTVLPPLLTDEMIAQYTSALLAGTITSGWTFGAGAALQIPFAMQMAYRFNGIGVTQNVLYENQKLIANQFNSAIGKIQDSLSSTASALGKLQDVVNQNAQALNTLVKQLSSNFGAISSVLNDILSRLDPPEAEVQIDRLITGRLQSLQTYVTQQLIRAAEIRASANLAATKMSECVLGQSKRVDFCGKGYHLMSFPQSAPHGVVFLHVTYVFAQEKNFTTAPAICHDGKAHFPREGVFVSNGTHWFVTQRNFYEPQIITTDNTFVSGNCDVVIGIVNNTVYDPLQPELDSGGGGSDIIKLLNEQVNKEMQSSNLYMSMSSWCYTHSLDGAGLFLFDHAAEEYEHAKKLIIFLNENNVPVQLTSISAPEHKFEGLTQIFQKAYEHEQHISESINNIVDHAIKSKDHATFNFLQWYVAEQHEEEVLFKDILDKIELIGNENHGLYLADQYVKGIAKSRKS

SEQ ID NO: 8911 - protein, 1315 aa, Artificial Sequence
  SARS-CoV-2/USA/WI-13/2020__EPI_ISL_417516 spike protein (1-1147)(K986P_V987P_P1069F) Ferritin construct
MFVFLVLLPLVSSQCVNLTTRTQLPPAYTNSFTRGVYYPDKVFRSSVLHSTQDLFLPFFSNVTWFHAIHVSGTNGTKRFDNPVLPFNDGVYFASTEKSNIIRGWIFGTTLDSKTQSLLIVNNATNVVIKVCEFQFCNDPFLGVYYHKNNKSWMESEFRVYSSANNCTFEYVSQPFLMDLEGKQGNFKNLREFVFKNIDGYFKIYSKHTPINLVRDLPQGFSALEPLVDLPIGINITRFQTLLALHRSYLTPGDSSSGWTAGAAAYYVGYLQPRTFLLKYNENGTITDAVDCALDPLSETKCTLKSFTVEKGIYQTSNFRVLPTESIVRFPNITNLCPFGEVFNATRFASVYAWNRKRISNCVADYSVLYNSASFSTFKCYGVSPTKLNDLCFTNVYADSFVIRGDEVRQIAPGQTGKIADYNYKLPDDFTGCVIAWNSNNLDSKVGGNYNYLYRLFRKSNLKPFERDISTEIYQAGSTPCNGVEGFNCYFPLQSYGFQPTNGVGYQPYRVVVLSFELLHAPATVCGPKKSTNLVKNKCVNFNFNGLTGTGVLTESNKKFLPFQQFGRDIADTTDAVRDPQTLEILDITPCSFGGVSVITPGTNTSNQVAVLYQGVNCTEVPVAIHADQLTPTWRVYSTGSNVFQTRAGCLIGAEHVNNSYECDIPIGAGICASYQTQTNSPRRARSVASQSIIAYTMSLGAENSVAYSNNSIAIPTNFTISVTTEILPVSMTKTSVDCTMYICGDSTECSNLLLQYGSFCTQLNRALTGIAVEQDKNTQEVFAQVKQIYKTPPIKDFGGFNFSQILPDPSKPSKRSFIEDLLFNKVTLADAGFIKQYGDCLGDIAARDLICAQKFNGLTVLPPLLTDEMIAQYTSALLAGTITSGWTFGAGAALQIPFAMQMAYRFNGIGVTQNVLYENQKLIANQFNSAIGKIQDSLSSTASALGKLQDVVNQNAQALNTLVKQLSSNFGAISSVLNDILSRLDPPEAEVQIDRLITGRLQSLQTYVTQQLIRAAEIRASANLAATKMSECVLGQSKRVDFCGKGYHLMSFPQSAPHGVVFLHVTYVFAQEKNFTTAPAICHDGKAHFPREGVFVSNGTHWFVTQRNFYEPQIITTDNTFVSGNCDVVIGIVNNTVYDPLQPELDSGGGGSDIIKLLNEQVNKEMQSSNLYMSMSSWCYTHSLDGAGLFLFDHAAEEYEHAKKLIIFLNENNVPVQLTSISAPEHKFEGLTQIFQKAYEHEQHISESINNIVDHAIKSKDHATFNFLQWYVAEQHEEEVLFKDILDKIELIGNENHGLYLADQYVKGIAKSRKS

SEQ ID NO: 8912 - protein, 1314 aa, Artificial Sequence
  SARS-CoV-2/India/1-27/2020__EPI_ISL_413522 spike protein (1-1146)(K985P_V986P_P1068F) Ferritin construct
MFVFLVLLPLVSSQCVNLTTRTQLPPAYTNSFTRGVYYPDKVFRSSVLHSTQDLFLPFFSNVTWFHAIHVSGTNGTKRFDNPVLPFNDGVYFASTEKSNIIRGWIFGTTLDSKTQSLLIVNNATNVVIKVCEFQFCNDPFLGVYHKNNKSWMESEFRVYSSANNCTFEYVSQPFLMDLEGKQGNFKNLREFVFKNIDGYFKIYSKHTPINLVRDLPQGFSALEPLVDLPIGINITRFQTLLALHRSYLTPGDSSSGWTAGAAAYYVGYLQPRTFLLKYNENGTITDAVDCALDPLSETKCTLKSFTVEKGIYQTSNFRVQPTESIVRFPNITNLCPFGEVFNATRFASVYAWNRKRISNCVADYSVLYNSASFSTFKCYGVSPTKLNDLCFTNVYADSFVIRGDEVIQIAPGQTGKIADYNYKLPDDFTGCVIAWNSNNLDSKVGGNYNYLYRLFRKSNLKPFERDISTEIYQAGSTPCNGVEGFNCYFPLQSYGFQPTNGVGYQPYRVVVLSFELLHAPATVCGPKKSTNLVKNKCVNFNFNGLTGTGVLTESNKKFLPFQQFGRDIADTTDAVRDPQTLEILDITPCSFGGVSVITPGTNTSNQVAVLYQDVNCTEVPVAIHADQLTPTWRVYSTGSNVFQTRAGCLIGAEHVNNSYECDIPIGAGICASYQTQTNSPRRARSVASQSIIAYTMSLGAENSVAYSNNSIAIPTNFTISVTTEILPVSMTKTSVDCTMYICGDSTECSNLLLQYGSFCTQLNRALTGIAVEQDKNTQEVFAQVKQIYKTPPIKDFGGFNFSQILPDPSKPSKRSFIEDLLFNKVTLADAGFIKQYGDCLGDIAARDLICAQKFNGLTVLPPLLTDEMIAQYTSALLAGTITSGWTFGAGAALQIPFAMQMAYRFNGIGVTQNVLYENQKLIANQFNSAIGKIQDSLSSTASALGKLQDVVNQNAQALNTLVKQLSSNFGAISSVLNDILSRLDPPEAEVQIDRLITGRLQSLQTYVTQQLIRAAEIRASANLAATKMSECVLGQSKRVDFCGKGYHLMSFPQSAPHGVVFLHVTYVFAQEKNFTTAPAICHDGKAHFPREGVFVSNGTHWFVTQRNFYEPQIITTDNTFVSGNCDVVIGIVNNTVYDPLQPELDSGGGGSDIIKLLNEQVNKEMQSSNLYMSMSSWCYTHSLDGAGLFLFDHAAEEYEHAKKLIIFLNENNVPVQLTSISAPEHKFEGLTQIFQKAYEHEQHISESINNIVDHAIKSKDHATFNFLQWYVAEQHEEEVLFKDILDKIELIGNENHGLYLADQYVKGIAKSRKS

SEQ ID NO: 8913 - protein, 1309 aa, Artificial Sequence
  SARS-CoV-2/pangolin/Guangxi/P4L/2017__EPI_ISL_410538 spike protein (1-1141)(K980P_V981P_P1063F) Ferritin construct
MFVFLFVLPLVSSQCVNLTTRTGIPPGYTNSSTRGVYYPDKVFRSSILHLTQDLFLPFFSNVTWFNTINYQGGFKKFDNPVLPFNDGVYFASTEKSNIIRGWIFGTTLDARTQSLLIVNNATNVVIKVCEFQFCTDPFLGVYYHNNNKTWVENEFRVYSSANNCTFEYISQPFLMDLEGKQGNFKNLREFVFKNVDGYFKIYSKHTPIDLVRDLPRGFAALEPLVDLPIGINITRFQTLLALHRSYLTPGNLESGWTTGAAAYYVGYLQQRTFLLSYNQNGTITDAVDCSLDPLSETKCTLKSLTVEKGIYQTSNFRVQPTISIVRFPNITNLCPFGEVFNASKFASVYAWNRKRISNCVADYSVLYNSTSFSTFKCYGVSPTKLNDLCFTNVYADSFVVKGDEVRQIAPGQTGVIADYNYKLPDDFTGCVIAWNSVKQDALTGGNYGYLYRLFRKSKLKPFERDISTEIYQAGSTPCNGQVGLNCYYPLERYGFHPTTGVNYQPFRVVVLSFELLNGPATVCGPKLSTTLVKDKCVNFNFNGLTGTGVLTTSKKQFLPFQQFGRDISDTTDAVRDPQTLEILDITPCSFGGVSVITPGTNTSNQVAVLYQDVNCTEVPMAIHAEQLTPAWRVYSAGANVFQTRAGCLVGAEHVNNSYECDIPVGAGICASYHSMSSLRSVNQRSIIAYTMSLGAENSVAYSNNSIAIPTNFTISVTTEILPVSMTKTSVDCTMYICGDSIECSNLLLQYGSFCTQLNRALTGIAVEQDKNTQEVFAQVKQIYKTPPIKDFGGFNFSQILPDPSKPSKRSFIEDLLFNKVTLADAGFIKQYGDCLGDIAARDLICAQKFNGLTVLPPLLTDEMIAQYTSALLAGTITSGWTFGAGAALQIPFAMQMAYRFNGIGVTQNVLYENQKLIANQFNSAIGKIQDSLSSTASALGKLQDVVNQNAQALNTLVKQLSSNFGAISSVLNDILSRLDPPEAEVQIDRLITGRLQSLQTYVTQQLIRAAEIRASANLAATKMSECVLGQSKRVDFCGKGYHLMSFPQSAPHGVVFLHVTYVFAQEKNFTTAPAICHEGKAHFPREGVFVSNGTHWFITQRNFYEPQIITTDNTFVSGSCDVVIGIVNNTVYDPLQPELDSGGGGSDIIKLLNEQVNKEMQSSNLYMSMSSWCYTHSLDGAGLFLFDHAAEEYEHAKKLIIFLNENNVPVQLTSISAPEHKFEGLTQIFQKAYEHEQHISESINNIVDHAIKSKDHATFNFLQWYVAEQHEEEVLFKDILDKIELIGNENHGLYLADQYVKGIAKSRKS

SEQ ID NO: 8914 - protein, 1309 aa, Artificial Sequence
  SARS-CoV-2/pangolin/Guangxi/P5L/2017__EPI_ISL_410540 spike protein (1-1141)(K980P_V981P_P1063F) Ferritin construct
MFVFLFVLPLVSSQCVNLTTRTGIPPGYTNSSTRGVYYPDKVFRSSILHLTQDLFLPFFSNVTWFNTINYQGGFKKFDNPVLPFNDGVYFASTEKSNIIRGWIFGTTLDARTQSLLIVNNATNVVIKVCEFQFCTDPFLGVYYHNNNKTWVENEFRVYSSANNCTFEYISQPFLMDLEGKQGNFKNLREFVFKNVDGYFKIYSKHTPIDLVRDLPRGFAALEPLVDLPIGINITRFQTLLALHRSYLTPGKLESGWTTGAAAYYVGYLQQRTFLLSYNQNGTITDAVDCSLDPLSETKCTLKSLTVEKGIYQTSNFRVQPTISIVRFPNITNLCPFGEVFNASKFASVYAWNRKRISNCVADYSVLYNSTSFSTFKCYGVSPTKLNDLCFTNVYADSFVVKGDEVRQIAPGQTGVIADYNYKLPDDFTGCVIAWNSVKQDALTGGNYGYLYRLFRKSKLKPFERDISTEIYQAGSTPCNGQVGLNCYYPLERYGFHPTTGVNYQPFRVVVLSFELLNGPATVCGPKLSTTLVKDKCVNFNFNGLTGTGVLTTSKKQFLPFQQFGRDISDTTDAVRDPQTLEILDITPCSFGGVSVITPGTNTSNQVAVLYQDVNCTEVPMAIHAEQLTPAWRVYSAGANVFQTRAGCLVGAEHVNNSYECDIPVGAGICASYHSMSSFRSVNQRSIIAYTMSLGAENSVAYSNNSIAIPTNFTISVTTEILPVSMTKTSVDCTMYICGDSIECSNLLLQYGSFCTQLNRALTGIAVEQDKNTQEVFAQVKQIYKTPPIKDFGGFNFSQILPDPSKPSKRSFIEDLLFNKVTLADAGFIKQYGDCLGDIAARDLICAQKFNGLTVLPPLLTDEMIAQYTSALLAGTITSGWTFGAGAALQIPFAMQMAYRFNGIGVTQNVLYENQKLIANQFNSAIGKIQDSLSSTASALGKLQDVVNQNAQALNTLVKQLSSNFGAISSVLNDILSRLDPPEAEVQIDRLITGRLQSLQTYVTQQLIRAAEIRASANLAATKMSECVLGQSKRVDFCGKGYHLMSFPQSAPHGVVFLHVTYVFAQEKNFTTAPAICHEGKAHFPREGVFVSNGTHWFITQRNFYEPQIITTDNTFVSGSCDVVIGIVNNTVYDPLQPELDSGGGGSDIIKLLNEQVNKEMQSSNLYMSMSSWCYTHSLDGAGLFLFDHAAEEYEHAKKLIIFLNENNVPVQLTSISAPEHKFEGLTQIFQKAYEHEQHISESINNIVDHAIKSKDHATFNFLQWYVAEQHEEEVLFKDILDKIELIGNENHGLYLADQYVKGIAKSRKS

SEQ ID NO: 8915 - protein, 1309 aa, Artificial Sequence
  SARS-CoV-2/pangolin/Guangxi/P5E/2017__EPI_ISL_410541 spike protein (1-1141)(K980P_V981P_P1063F) Ferritin construct
MFVFLFVLPLVSSQCVNLTTRTGIPPGYTNSSTRGVYYPDKVFRSSILHLTQDLFLPFFSNVTWFNTITYQGGSKKFDNPVLPFNDGVYFASTEKSNIIRGWIFGTTLDARTQSLLIVNNATNVVIKVCEFQFCTDPFLGVYYHNNNKTWVENEFRVYSSANNCTFEYISQPFLMDLEGKQGNFKNLREFVFKNVDGYFKIYSKHTPIDLVRDLPRGFAALEPLVDLPIGINITRFQTLLALHRSYLTPGKLESGWTTGAAAYYVGYLQQRTFLLSYNQNGTITDAVDCSLDPLSETKCTLKSLTVEKGIYQTSNFRVQPTISIVRFPNITNLCPFGEVFNASKFASVYAWNRKRISNCVADYSVLYNSTSFSTFKCYGVSPTKLNDLCFTNVYADSFVVKGDEVRQIAPGQTGVIADYNYKLPDDFTGCVIAWNSVKQDALTGDNYGYLYRLFRKSKLKPFERDISTEIYQAGSTPCNGQVGLNCYYPLERYGFHPTTGVNYQPFRVVVLSFELLNGPATVCGPKLSTTLVKDKCVNFNFNGLTGTGVLTTSKKQFLPFQQFGRDISDTTDAVRDPQTLEILDITPCSFGGVSVITPGTNTSNQVAVLYQDVNCTEVPMAIHAEQLTPAWRVYSAGANVFQTRAGCLVGAEHVNNSYECDIPVGAGICASYHSMSSFRSVNQRSIIAYTMSLGAENSVAYSNNSIAIPTNFTISVTTEILPVSMTKTSVDCTMYICGDSIECSNLLLQYGSFCTQLNRALTGIAVEQDKNTQEVFAQVKQIYKTPPIKDFGGFNFSQILPDPSKPSKRSFIEDLLFNKVTLADAGFIKQYGDCLGDIAARDLICAQKFNGLTVLPPLLTDEMIAQYTSALLAGTITSGWTFGAGAALQIPFAMQMAYRFNGIGVTQNVLYENQKLIANQFNSAIGKIQDSLSSTASALGKLQDVVNQNAQALNTLVKQLSSNFGAISSVLNDILSRLDPPEAEVQIDRLITGRLQSLQTYVTQQLIRAAEIRASANLAATKMSECVLGQSKRVDFCGKGYHLMSFPQSAPHGVVFLHVTYVFAQEKNFTTAPAICHEGKAHFPREGVFVSNGTHWFITQRNFYEPQIITTDNTFVSGSCDVVIGIVNNTVYDPLQPELDSGGGGSDIIKLLNEQVNKEMQSSNLYMSMSSWCYTHSLDGAGLFLFDHAAEEYEHAKKLIIFLNENNVPVQLTSISAPEHKFEGLTQIFQKAYEHEQHISESINNIVDHAIKSKDHATFNFLQWYVAEQHEEEVLFKDILDKIELIGNENHGLYLADQYVKGIAKSRKS

SEQ ID NO: 8916 - protein, 1307 aa, Artificial Sequence
  SARS-CoV-2/pangolin/Guangxi/P1E/2017__EPI_ISL_410539 spike protein (1-1139)(K978P_V979P_P1061F) Ferritin construct
MFVFLFVLPLVSSQCVNLTTRTGIQPGYTNSSTRGVYYPDKVFRSSILHLTQDLFLPFFSNVTWFNTINYQGGFKKFDNPVLPFNDGVYFASTEKSNIIRGWIFGTTLDARTQSLLIVNNATNVVIKVCEFQFCTDPFLGVYYHNNNKTWVENEFRVYSSANNCTFEYISQPFLMDLEGKQGNFKNLREFVFKNVDGYFKIYSKHTPIDLVRDLPRGFAALEPLVDLPIGINITRFQTLLALHRSYLTPGKLESGWTTGAAAYYVGYLQQRTFLLSYNQNGTITDAVDCSLDPLSETKCTLKSLTVEKGIYQTSNFRVQPTISIVRFPNITNLCPFGEVFNASKFASVYAWNRKRISNCVADYSVLYNSTSFSTFKCYGVSPTKLNDLCFTNVYADSFVVKGDEVRQIAPGQTGVIADYNYKLPDDFTGCVIAWNSVKQDALTGGNYLYRLFRKSKLKPFERDISTEIYQAGSTPCNGQVGLNCYYPLERYGFHPTTGVNYQPFRVVVLSFELLNGPATVCGPKLSTTLVKDKCVNFNFNGLTGTGVLTTSKKQFLPFQQFGRDISDTTDAVRDPQTLEILDITPCSFGGVSVITPGTNTSNQVAVLYQDVNCTEVPMAIHAEQLTPAWRVYSAGANVFQTRAGCLVGAEHVNNSYECDIPVGAGICASYHSMSSLRSVNQRSIIAYTMSLGAENSVAYSNNSIAIPTNFTISVTTEILPVSMTKTSVDCTMYICGDSIECSNLLLQYGSFCTQLNRALTGIAVEQDKNTQEVFAQVKQIYKTPPIKDFGGFNFSQILPDPSKPSKRSFIEDLLFNKVTLADAGFIKQYGDCLGDIAARDLICAQKFNGLTVLPPLLTDEMIAQYTSALLAGTITSGWTFGAGAALQIPFAMQMAYRFNGIGVTQNVLYENQKLIANQFNSAIGKIQDSLSSTASALGKLQDVVNQNAQALNTLVKQLSSNFGAISSVLNDILSRLDPPEAEVQIDRLITGRLQSLQTYVTQQLIRAAEIRASANLAATKMSECVLGQSKRVDFCGKGYHLMSFPQSAPHGVVFLHVTYVFAQEKNFTTAPAICHEGKAHFPREGVFVSNGTHWFITQRNFYEPQIITTDNTFVSGSCDVVIGIVNNTVYDPLQPELDSGGGGSDIIKLLNEQVNKEMQSSNLYMSMSSWCYTHSLDGAGLFLFDHAAEEYEHAKKLIIFLNENNVPVQLTSISAPEHKFEGLTQIFQKAYEHEQHISESINNIVDHAIKSKDHATFNFLQWYVAEQHEEEVLFKDILDKIELIGNENHGLYLADQYVKGIAKSRKS

SEQ ID NO: 8917 - protein, 1315 aa, Artificial Sequence
  SARS-CoV-2/Wuhan/WIV05/2019__EPI_ISL_402128 spike protein (1-1147)(K986P_V987P_ H1048Q_H1064N_ H1083N_H1101N) Ferritin construct
MFVFLVLLPLVSSQCVNLTTRTQLPPAYTNSFTRGVYYPDKVFRSSVLHSTQDLFLPFFSNVTWFHAIHVSGTNGTKRFDNPVLPFNDGVYFASTEKSNIIRGWIFGTTLDSKTQSLLIVNNATNVVIKVCEFQFCNDPFLGVYYHKNNKSWMESEFRVYSSANNCTFEYVSQPFLMDLEGKQGNFKNLREFVFKNIDGYFKIYSKHTPINLVRDLPQGFSALEPLVDLPIGINITRFQTLLALHRSYLTPGDSSSGWTAGAAAYYVGYLQPRTFLLKYNENGTITDAVDCALDPLSETKCTLKSFTVEKGIYQTSNFRVQPTESIVRFPNITNLCPFGEVFNATRFASVYAWNRKRISNCVADYSVLYNSASFSTFKCYGVSPTKLNDLCFTNVYADSFVIRGDEVRQIAPGQTGKIADYNYKLPDDFTGCVIAWNSNNLDSKVGGNYNYLYRLFRKSNLKPFERDISTEIYQAGSTPCNGVEGFNCYFPLQSYGFQPTNGVGYQPYRVVVLSFELLHAPATVCGPKKSTNLVKNKCVNFNFNGLTGTGVLTESNKKFLPFQQFGRDIADTTDAVRDPQTLEILDITPCSFGGVSVITPGTNTSNQVAVLYQDVNCTEVPVAIHADQLTPTWRVYSTGSNVFQTRAGCLIGAEHVNNSYECDIPIGAGICASYQTQTNSPRRARSVASQSIIAYTMSLGAENSVAYSNNSIAIPTNFTISVTTEILPVSMTKTSVDCTMYICGDSTECSNLLLQYGSFCTQLNRALTGIAVEQDKNTQEVFAQVKQIYKTPPIKDFGGFNFSQILPDPSKPSKRSFIEDLLFNKVTLADAGFIKQYGDCLGDIAARDLICAQKFNGLTVLPPLLTDEMIAQYTSALLAGTITSGWTFGAGAALQIPFAMQMAYRFNGIGVTQNVLYENQKLIANQFNSAIGKIQDSLSSTASALGKLQDVVNQNAQALNTLVKQLSSNFGAISSVLNDILSRLDPPEAEVQIDRLITGRLQSLQTYVTQQLIRAAEIRASANLAATKMSECVLGQSKRVDFCGKGYQLMSFPQSAPHGVVFLNVTYVPAQEKNFTTAPAICNDGKAHFPREGVFVSNGTNWFVTQRNFYEPQIITTDNTFVSGNCDVVIGIVNNTVYDPLQPELDSGGGGSDIIKLLNEQVNKEMQSSNLYMSMSSWCYTHSLDGAGLFLFDHAAEEYEHAKKLIIFLNENNVPVQLTSISAPEHKFEGLTQIFQKAYEHEQHISESINNIVDHAIKSKDHATFNFLQWYVAEQHEEEVLFKDILDKIELIGNENHGLYLADQYVKGIAKSRKS

SEQ ID NO: 8918 - protein, 1311 aa, Artificial Sequence
  SARS-CoV-2/bat/Yunnan/RaTG13/2013__EPI_ISL_402131 spike protein (1-1143)(K982P_V983P_ H1044Q_H1060N_ H1079N_H1097N) Ferritin construct
MFVFLVLLPLVSSQCVNLTTRTQLPPAYTNSSTRGVYYPDKVFRSSVLHLTQDLFLPFFSNVTWFHAIHVSGTNGIKRFDNPVLPFNDGVYFASTEKSNIIRGWIFGTTLDSKTQSLLIVNNATNVVIKVCEFQFCNDPFLGVYYHKNNKSWMESEFRVYSSANNCTFEYVSQPFLMDLEGKQGNFKNLREFVFKNIDGYFKIYSKHTPINLVRDLPPGFSALEPLVDLPIGINITRFQTLLALHRSYLTPGDSSSGWTAGAAAYYVGYLQPRTFLLKYNENGTITDAVDCALDPLSETKCTLKSFTVEKGIYQTSNFRVQPTDSIVRFPNITNLCPFGEVFNATTFASVYAWNRKRISNCVADYSVLYNSTSFSTFKCYGVSPTKLNDLCFTNVYADSFVITGDEVRQIAPGQTGKIADYNYKLPDDFTGCVIAWNSKHIDAKEGGNFNYLYRLFRKANLKPFERDISTEIYQAGSKPCNGQTGLNCYYPLYRYGFYPTDGVGHQPYRVVVLSFELLNAPATVCGPKKSTNLVKNKCVNFNFNGLTGTGVLTESNKKFLPFQQFGRDIADTTDAVRDPQTLEILDITPCSFGGVSVITPGTNASNQVAVLYQDVNCTEVPVAIHADQLTPTWRVYSTGSNVFQTRAGCLIGAEHVNNSYECDIPIGAGICASYQTQTNSRSVASQSIIAYTMSLGAENSVAYSNNSIAIPTNFTISVTTEILPVSMTKTSVDCTMYICGDSTECSNLLLQYGSFCTQLNRALTGIAVEQDKNTQEVFAQVKQIYKTPPIKDFGGFNFSQILPDPSKPSKRSFIEDLLFNKVTLADAGFIKQYGDCLGDIAARDLICAQKFNGLTVLPPLLTDEMIAQYTSALLAGTITSGWTFGAGAALQIPFAMQMAYRFNGIGVTQNVLYENQKLIANQFNSAIGKIQDSLSSTASALGKLQDVVNQNAQALNTLVKQLSSNFGAISSVLNDILSRLDPPEAEVQIDRLITGRLQSLQTYVTQQLIRAAEIRASANLAATKMSECVLGQSKRVDFCGKGYQLMSFPQSAPHGVVFLNVTYVPAQEKNFTTAPAICNDGKAHFPREGVFVSNGTNWFVTQRNFYEPQIITTDNTFVSGSCDVVIGIVNNTVYDPLQPELDSGGGGSDIIKLLNEQVNKEMQSSNLYMSMSSWCYTHSLDGAGLFLFDHAAEEYEHAKKLIIFLNENNVPVQLTSISAPEHKFEGLTQIFQKAYEHEQHISESINNIVDHAIKSKDHATFNFLQWYVAEQHEEEVLFKDILDKIELIGNENHGLYLADQYVKGIAKSRKS

SEQ ID NO: 8919 - protein, 1315 aa, Artificial Sequence
  SARS-CoV-2/Wuhan/HBCDC-HB-01/2019__EPI_ISL_402132 spike protein (1-1147)(K986P_V987P_ H1048Q_H1064N_ H1083N_H1101N) Ferritin construct
MFVFLVLLPLVSSQCVNLTTRTQLPPAYTNSITRGVYYPDKVFRSSVLHSTQDLFLPFFSNVTWFHAIHVSGTNGTKRFDNPVLPFNDGVYFASTEKSNIIRGWIFGTTLDSKTQSLLIVNNATNVVIKVCEFQFCNDPFLGVYYHKNNKSWMESEFRVYSSANNCTFEYVSQPFLMDLEGKQGNFKNLREFVFKNIDGYFKIYSKHTPINLVRDLPQGFSALEPLVDLPIGINITRFQTLLALHRSYLTPGDSSSGWTAGAAAYYVGYLQPRTFLLKYNENGTITDAVDCALDPLSETKCTLKSFTVEKGIYQTSNFRVQPTESIVRFPNITNLCPFGEVFNATRFASVYAWNRKRISNCVADYSVLYNSASFSTFKCYGVSPTKLNDLCFTNVYADSFVIRGDEVRQIAPGQTGKIADYNYKLPDDFTGCVIAWNSNNLDSKVGGNYNYLYRLFRKSNLKPFERDISTEIYQAGSTPCNGVEGFNCYFPLQSYGFQPTNGVGYQPYRVVVLSFELLHAPATVCGPKKSTNLVKNKCVNFNFNGLTGTGVLTESNKKFLPFQQFGRDIADTTDAVRDPQTLEILDITPCSFGGVSVITPGTNTSNQVAVLYQDVNCTEVPVAIHADQLTPTWRVYSTGSNVFQTRAGCLIGAEHVNNSYECDIPIGAGICASYQTQTNSPRRARSVASQSIIAYTMSLGAENSVAYSNNSIAIPTNFTISVTTEILPVSMTKTSVDCTMYICGDSTECSNLLLQYGSFCTQLNRALTGIAVEQDKNTQEVFAQVKQIYKTPPIKDFGGFNFSQILPDPSKPSKRSFIEDLLFNKVTLADAGFIKQYGDCLGDIAARDLICAQKFNGLTVLPPLLTDEMIAQYTSALLAGTITSGWTFGAGAALQIPFAMQMAYRFNGIGVTQNVLYENQKLIANQFNSAIGKIQDSLSSTASALGKLQDVVNQNAQALNTLVKQLSSNFGAISSVLNDILSRLDPPEAEVQIDRLITGRLQSLQTYVTQQLIRAAEIRASANLAATKMSECVLGQSKRVDFCGKGYQLMSFPQSAPHGVVFLNVTYVPAQEKNFTTAPAICNDGKAHFPREGVFVSNGTNWFVTQRNFYEPQIITTDNTFVSGNCDVVIGIVNNTVYDPLQPELDSGGGGSDIIKLLNEQVNKEMQSSNLYMSMSSWCYTHSLDGAGLFLFDHAAEEYEHAKKLIIFLNENNVPVQLTSISAPEHKFEGLTQIFQKAYEHEQHISESINNIVDHAIKSKDHATFNFLQWYVAEQHEEEVLFKDILDKIELIGNENHGLYLADQYVKGIAKSRKS

SEQ ID NO: 8920 - protein, 1315 aa, Artificial Sequence
  SARS-CoV-2/Guangdong/20SF028/2020__EPI_ISL_403936 spike protein (1-1147)(K986P_V987P_ H1048Q_H1064N_ H1083N_H1101N) Ferritin construct
MFVFLVLLPLVSSQCVNLTTRTQLPPAYTNSFTRGVYYPDKVFRSSVLYSTQDLFLPFFSNVTWFHAIHVSGTNGTKRFDNPVLPFNDGVYFASTEKSNIIRGWIFGTTLDSKTQSLLIVNNATNVVIKVCEFQFCNDPFLGVYYHKNNKSWMESEFRVYSSANNCTFEYVSQPFLMDLEGKQGNFKNLREFVFKNIDGYFKIYSKHTPINLVRDLPQGFSALEPLVDLPIGINITRFQTLLALHRSYLTPGDSSSGWTAGAAAYYVGYLQPRTFLLKYNENGTITDAVDCALDPLSETKCTLKSFTVEKGIYQTSNFRVQPTESIVRFPNITNLCPFGEVFNATRFASVYAWNRKRISNCVADYSVLYNSASFSTFKCYGVSPTKLNDLCFTNVYADSFVIRGDEVRQIAPGQTGKIADYNYKLPDDFTGCVIAWNSNNLDSKVGGNYNYLYRLFRKSNLKPFERDISTEIYQAGSTPCNGVEGFNCYFPLQSYGFQPTNGVGYQPYRVVVLSFELLHAPATVCGPKKSTNLVKNKCVNFNFNGLTGTGVLTESNKKFLPFQQFGRDIADTTDAVRDPQTLEILDITPCSFGGVSVITPGTNTSNQVAVLYQDVNCTEVPVAIHADQLTPTWRVYSTGSNVFQTRAGCLIGAEHVNNSYECDIPIGAGICASYQTQTNSPRRARSVASQSIIAYTMSLGAENSVAYSNNSIAIPTNFTISVTTEILPVSMTKTSVDCTMYICGDSTECSNLLLQYGSFCTQLNRALTGIAVEQDKNTQEVFAQVKQIYKTPPIKDFGGFNFSQILPDPSKPSKRSFIEDLLFNKVTLADAGFIKQYGDCLGDIAARDLICAQKFNGLTVLPPLLTDEMIAQYTSALLAGTITSGWTFGAGAALQIPFAMQMAYRFNGIGVTQNVLYENQKLIANQFNSAIGKIQDSLSSTASALGKLQDVVNQNAQALNTLVKQLSSNFGAISSVLNDILSRLDPPEAEVQIDRLITGRLQSLQTYVTQQLIRAAEIRASANLAATKMSECVLGQSKRVDFCGKGYQLMSFPQSAPHGVVFLNVTYVPAQEKNFTTAPAICNDGKAHFPREGVFVSNGTNWFVTQRNFYEPQIITTDNTFVSGNCDVVIGIVNNTVYDPLQPELDSGGGGSDIIKLLNEQVNKEMQSSNLYMSMSSWCYTHSLDGAGLFLFDHAAEEYEHAKKLIIFLNENNVPVQLTSISAPEHKFEGLTQIFQKAYEHEQHISESINNIVDHAIKSKDHATFNFLQWYVAEQHEEEVLFKDILDKIELIGNENHGLYLADQYVKGIAKSRKS

SEQ ID NO: 8921 - protein, 1315 aa, Artificial Sequence
  SARS-CoV-2/Shenzhen/SZTH-001/2020__EPI_ISL_406592 spike protein (1-1147)(K986P_V987P_ H1048Q_H1064N_ H1083N_H1101N) Ferritin construct
MFVFLVLLPLVSSQCVNLTTRTQLPPAYTNSFTRGVYYPDKVFRSSVLHSTQDLFLPFFSNVTWFHAIHVSGTNGTKRFDNPVLPFNDGVYFASTEKSNIIRGWIFGTTLDSKTQSLLIVNNATNVVIKVCEFQFCNDPFLGVYYHKNNKSWMESEFRVYSSANNCTFEYVSQPFLMDLEGKQGNFKNLREFVFKNIDGYFKIYSKHTPINLVRDLPQGFSALEPLVDLPIGINITRFQTLLALHRSYLTPGDSSSGWTAGAAAYYVGYLQPRTFLLKYNENGTITDAVDCALDPLSETKCTLKSFTVEKGIYQTSNFRVQPTESIVRFPNITNLCPFGEVFNATRFASVYAWNRKRISNCVADYSVLYNSASFSTFKCYGVSPTKLNDLCFTNVYADSFVIRGDEVRQIAPGQTGKIADYNYKLPDDFTGCVIAWNSNNLDSKVGGNYNYLYRLFRKSNLKPFERDISTEIYQAGSTPCNGVEGFNCYFPLQSYGFQPTNGVGYQPYRVVVLSFELLHAPATVCGPKKSTNLVKNKCVNFNFNGLTGTGVLTESNKKFLPFQQFGRDIADTTDAVRDPQTLEILDITPCSFGGVSVITPGTNTSNQVAVLYQDVNCTEVPVAIHADQLTPTWRVYSTGSNVFQTRAGCLIGAEHVNNSYECDIPIGAGICASYQTQTNSPRRARSVASQSIIAYTMSLGAENSVAYSNNSIAIPTNFTISVTTEILPVSMTKTSVDCTMYICGDSTECSNLLLQYGSFCTQLNRALTGIAVEQDKNTQEVFAQVKQIYKTPPIKDFGGFNFSQILPDPSKPSKRSFIEDLLFNKVTLADAGFIKQYGDCLGDIAARDLICAQKFNGLTVLPPLLTDEMIAQYTSALLAGTITSGWTFGAGAALQIPFAMQMAYRFNGIGVTQNVLYENQKLIANQFNSAIGKIQDSLSSTASALGKLQDVVNQNAQALNTLVKQLSSNFGAISSVLNDILSRLDPPEAEVQIDRLITGRLQSLQTYVTQQLIRAAEIRASANLAATKMSECVLGQSKRVDFCGKGYQLMSFPQSAPHGVVFLNVTYVPAQEKNFTTAPAICNDGKAHFPREGVFVSNGTNWFVTQRNFYEPQIITTDNTFVSGNCDVLIGIVNNTVYDPLQPELDSGGGGSDIIKLLNEQVNKEMQSSNLYMSMSSWCYTHSLDGAGLFLFDHAAEEYEHAKKLIIFLNENNVPVQLTSISAPEHKFEGLTQIFQKAYEHEQHISESINNIVDHAIKSKDHATFNFLQWYVAEQHEEEVLFKDILDKIELIGNENHGLYLADQYVKGIAKSRKS

SEQ ID NO: 8922 - protein, 1315 aa, Artificial Sequence
  SARS-CoV-2/Shenzhen/SZTH-004/2020__EPI_ISL_406595 spike protein (1-1147)(K986P_V987P_ H1048Q_H1064N_ H1083N_H1101N) Ferritin construct
MFVFLVLLPLVSSQCVNLTTRTQLPPAYTNSFTRGVYYPDKVFRSSVLHSTQDLFLPFFSNVTWFHAIHVSGTNGTKRFDNPVLPFNDGVYFASTEKSNIIRGWIFGTTLDSKTQSLLIVNNATNVVIKVCEFQFCNDPFLGVYYHKNNKSWMESEFRVYSSANNCTFEYVSQPFLMDLEGKQGNFKNLREFVFKNIDGYFKIYSKHTPINLVRDLPQGFSALEPLVDLPIGINITRFQTLLALHRSYLTPGDSSSGWTAGAAAYYVGYLQPRTFLLKYNENGTITDAVDCALDPLSETKCTLKSFTVEKGIYQTSNFRVQPTESIVRFPNITNLCPFGEVFNATRFASVYAWDRKRISNCVAYYSVLYNSASFSTFKCYGVSPTKLNDLCFTNVYADSFVIRGDEVRQIAPGQTGKIADYNYKLPDDFTGCVIAWNSNNLDSKVGGNYNYLYRLFRKSNLKPFERDISTEIYQAGSTPCNGVEGFNCYFPLQSYGFQPTNGVGYQPYRVVVLSFELLHAPATVCGPKKSTNLVKNKCVNFNFNGLTGTGVLTESNKKFLPFQQFGRDIADTTDAVRDPQTLEILDITPCSFGGVSVITPGTNTSNQVAVLYQDVNCTEVPVAIHADQLTPTWRVYSTGSNVFQTRAGCLIGAEHVNNSYECDIPIGAGICASYQTQTNSPRRARSVASQSIIAYTMSLGAENSVAYSNNSIAIPTNFTISVTTEILPVSMTKTSVDCTMYICGDSTECSNLLLQYGSFCTQLNRALTGIAVEQDKNTQEVFAQVKQIYKTPPIKDFGGFNFSQILPDPSKPSKRSFIEDLLFNKVTLADAGFIKQYGDCLGDIAARDLICAQKFNGLTVLPPLLTDEMIAQYTSALLAGTITSGWTFGAGAALQIPFAMQMAYRFNGIGVTQNVLYENQKLIANQFNSAIGKIQDSLSSTASALGKLQDVVNQNAQALNTLVKQLSSNFGAISSVLNDILSRLDPPEAEVQIDRLITGRLQSLQTYVTQQLIRAAEIRASANLAATKMSECVLGQSKRVDFCGKGYQLMSFPQSAPHGVVFLNVTYVPAQEKNFTTAPAICNDGKAHFPREGVFVSNGTNWFVTQRNFYEPQIITTDNTFVSGNCDVVIGIVNNTVYDPLQPELDSGGGGSDIIKLLNEQVNKEMQSSNLYMSMSSWCYTHSLDGAGLFLFDHAAEEYEHAKKLIIFLNENNVPVQLTSISAPEHKFEGLTQIFQKAYEHEQHISESINNIVDHAIKSKDHATFNFLQWYVAEQHEEEVLFKDILDKIELIGNENHGLYLADQYVKGIAKSRKS

SEQ ID NO: 8923 - protein, 1315 aa, Artificial Sequence
  SARS-CoV-2/France/IDF0372/2020__EPI_ISL_406596 spike protein (1-1147)(K986P_V987P_ H1048Q_H1064N_ H1083N_H1101N) Ferritin construct
MFVFLVLLPLVSSQCVNLTTRTQLPPAYTNSFTRGVYYPDKVFRSSVLHSTQDLFLPFFSNVTWFHAIHVSGTNGTKRFDNPVLPFNDGVYFASTEKSNIIRGWIFGTTLDSKTQSLLIVNNATNVVIKVCEFQFCNDPFLGVYYHKNNKSWMESEFRVYSSANNCTFEYVSQPFLMDLEGKQGNFKNLREFVFKNIDGYFKIYSKHTPINLVRDLPQGFSALEPLVDLPIGINITRFQTLLALHRSYLTPGDSSSGWTAGAAAYYVGYLQPRTFLLKYNENGTITDAVDCALDPLSETKCTLKSFTVEKGIYQTSNFRVQPTESIVRFPNITNLCPFGEVFNATRFASVYAWNRKRISNCVADYSFLYNSASFSTFKCYGVSPTKLNDLCFTNVYADSFVIRGDEVRQIAPGQTGKIADYNYKLPDDFTGCVIAWNSNNLDSKVGGNYNYLYRLFRKSNLKPFERDISTEIYQAGSTPCNGVEGFNCYFPLQSYGFQPTNGVGYQPYRVVVLSFELLHAPATVCGPKKSTNLVKNKCVNFNFNGLTGTGVLTESNKKFLPFQQFGRDIADTTDAVRDPQTLEILDITPCSFGGVSVITPGTNTSNQVAVLYQDVNCTEVPVAIHADQLTPTWRVYSTGSNVFQTRAGCLIGAEHVNNSYECDIPIGAGICASYQTQTNSPRRARSVASQSIIAYTMSLGAENSVAYSNNSIAIPTNFTISVTTEILPVSMTKTSVDCTMYICGDSTECSNLLLQYGSFCTQLNRALTGIAVEQDKNTQEVFAQVKQIYKTPPIKDFGGFNFSQILPDPSKPSKRSFIEDLLFNKVTLADAGFIKQYGDCLGDIAARDLICAQKFNGLTVLPPLLTDEMIAQYTSALLAGTITSGWTFGAGAALQIPFAMQMAYRFNGIGVTQNVLYENQKLIANQFNSAIGKIQDSLSSTASALGKLQDVVNQNAQALNTLVKQLSSNFGAISSVLNDILSRLDPPEAEVQIDRLITGRLQSLQTYVTQQLIRAAEIRASANLAATKMSECVLGQSKRVDFCGKGYQLMSFPQSAPHGVVFLNVTYVPAQEKNFTTAPAICNDGKAHFPREGVFVSNGTNWFVTQRNFYEPQIITTDNTFVSGNCDVVIGIVNNTVYDPLQPELDSGGGGSDIIKLLNEQVNKEMQSSNLYMSMSSWCYTHSLDGAGLFLFDHAAEEYEHAKKLIIFLNENNVPVQLTSISAPEHKFEGLTQIFQKAYEHEQHISESINNIVDHAIKSKDHATFNFLQWYVAEQHEEEVLFKDILDKIELIGNENHGLYLADQYVKGIAKSRKS

SEQ ID NO: 8924 - protein, 1315 aa, Artificial Sequence
  SARS-CoV-2/Australia/VIC01/2020__EPI_ISL_406844 spike protein (1-1147)(K986P_V987P_ H1048Q_H1064N_ H1083N_H1101N) Ferritin construct
MFVFLVLLPLVSSQCVNLTTRTQLPPAYTNSFTRGVYYPDKVFRSSVLHSTQDLFLPFFSNVTWFHAIHVSGTNGTKRFDNPVLPFNDGVYFASTEKSNIIRGWIFGTTLDSKTQSLLIVNNATNVVIKVCEFQFCNDPFLGVYYHKNNKSWMESEFRVYSSANNCTFEYVSQPFLMDLEGKQGNFKNLREFVFKNIDGYFKIYSKHTPINLVRDLPQGFSALEPLVDLPIGINITRFQTLLALHRRYLTPGDSSSGWTAGAAAYYVGYLQPRTFLLKYNENGTITDAVDCALDPLSETKCTLKSFTVEKGIYQTSNFRVQPTESIVRFPNITNLCPFGEVFNATRFASVYAWNRKRISNCVADYSVLYNSASFSTFKCYGVSPTKLNDLCFTNVYADSFVIRGDEVRQIAPGQTGKIADYNYKLPDDFTGCVIAWNSNNLDSKVGGNYNYLYRLFRKSNLKPFERDISTEIYQAGSTPCNGVEGFNCYFPLQSYGFQPTNGVGYQPYRVVVLSFELLHAPATVCGPKKSTNLVKNKCVNFNFNGLTGTGVLTESNKKFLPFQQFGRDIADTTDAVRDPQTLEILDITPCSFGGVSVITPGTNTSNQVAVLYQDVNCTEVPVAIHADQLTPTWRVYSTGSNVFQTRAGCLIGAEHVNNSYECDIPIGAGICASYQTQTNSPRRARSVASQSIIAYTMSLGAENSVAYSNNSIAIPTNFTISVTTEILPVSMTKTSVDCTMYICGDSTECSNLLLQYGSFCTQLNRALTGIAVEQDKNTQEVFAQVKQIYKTPPIKDFGGFNFSQILPDPSKPSKRSFIEDLLFNKVTLADAGFIKQYGDCLGDIAARDLICAQKFNGLTVLPPLLTDEMIAQYTSALLAGTITSGWTFGAGAALQIPFAMQMAYRFNGIGVTQNVLYENQKLIANQFNSAIGKIQDSLSSTASALGKLQDVVNQNAQALNTLVKQLSSNFGAISSVLNDILSRLDPPEAEVQIDRLITGRLQSLQTYVTQQLIRAAEIRASANLAATKMSECVLGQSKRVDFCGKGYQLMSFPQSAPHGVVFLNVTYVPAQEKNFTTAPAICNDGKAHFPREGVFVSNGTNWFVTQRNFYEPQIITTDNTFVSGNCDVVIGIVNNTVYDPLQPELDSGGGGSDIIKLLNEQVNKEMQSSNLYMSMSSWCYTHSLDGAGLFLFDHAAEEYEHAKKLIIFLNENNVPVQLTSISAPEHKFEGLTQIFQKAYEHEQHISESINNIVDHAIKSKDHATFNFLQWYVAEQHEEEVLFKDILDKIELIGNENHGLYLADQYVKGIAKSRKS

SEQ ID NO: 8925 - protein, 1315 aa, Artificial Sequence
  SARS-CoV-2/Germany/BavPat1/2020__EPI_ISL_406862 spike protein (1-1147)(K986P_V987P_ H1048Q_H1064N_ H1083N_H1101N) Ferritin construct
MFVFLVLLPLVSSQCVNLTTRTQLPPAYTNSFTRGVYYPDKVFRSSVLHSTQDLFLPFFSNVTWFHAIHVSGTNGTKRFDNPVLPFNDGVYFASTEKSNIIRGWIFGTTLDSKTQSLLIVNNATNVVIKVCEFQFCNDPFLGVYYHKNNKSWMESEFRVYSSANNCTFEYVSQPFLMDLEGKQGNFKNLREFVFKNIDGYFKIYSKHTPINLVRDLPQGFSALEPLVDLPIGINITRFQTLLALHRSYLTPGDSSSGWTAGAAAYYVGYLQPRTFLLKYNENGTITDAVDCALDPLSETKCTLKSFTVEKGIYQTSNFRVQPTESIVRFPNITNLCPFGEVFNATRFASVYAWNRKRISNCVADYSVLYNSASFSTFKCYGVSPTKLNDLCFTNVYADSFVIRGDEVRQIAPGQTGKIADYNYKLPDDFTGCVIAWNSNNLDSKVGGNYNYLYRLFRKSNLKPFERDISTEIYQAGSTPCNGVEGFNCYFPLQSYGFQPTNGVGYQPYRVVVLSFELLHAPATVCGPKKSTNLVKNKCVNFNFNGLTGTGVLTESNKKFLPFQQFGRDIADTTDAVRDPQTLEILDITPCSFGGVSVITPGTNTSNQVAVLYQGVNCTEVPVAIHADQLTPTWRVYSTGSNVFQTRAGCLIGAEHVNNSYECDIPIGAGICASYQTQTNSPRRARSVASQSIIAYTMSLGAENSVAYSNNSIAIPTNFTISVTTEILPVSMTKTSVDCTMYICGDSTECSNLLLQYGSFCTQLNRALTGIAVEQDKNTQEVFAQVKQIYKTPPIKDFGGFNFSQILPDPSKPSKRSFIEDLLFNKVTLADAGFIKQYGDCLGDIAARDLICAQKFNGLTVLPPLLTDEMIAQYTSALLAGTITSGWTFGAGAALQIPFAMQMAYRFNGIGVTQNVLYENQKLIANQFNSAIGKIQDSLSSTASALGKLQDVVNQNAQALNTLVKQLSSNFGAISSVLNDILSRLDPPEAEVQIDRLITGRLQSLQTYVTQQLIRAAEIRASANLAATKMSECVLGQSKRVDFCGKGYQLMSFPQSAPHGVVFLNVTYVPAQEKNFTTAPAICNDGKAHFPREGVFVSNGTNWFVTQRNFYEPQIITTDNTFVSGNCDVVIGIVNNTVYDPLQPELDSGGGGSDIIKLLNEQVNKEMQSSNLYMSMSSWCYTHSLDGAGLFLFDHAAEEYEHAKKLIIFLNENNVPVQLTSISAPEHKFEGLTQIFQKAYEHEQHISESINNIVDHAIKSKDHATFNFLQWYVAEQHEEEVLFKDILDKIELIGNENHGLYLADQYVKGIAKSRKS

SEQ ID NO: 8926 - protein, 1315 aa, Artificial Sequence
  SARS-CoV-2/Wuhan/HBCDC-HB-02/2020__EPI_ISL_412978 spike protein (1-1147)(K986P_V987P_ H1048Q_H1064N_ H1083N_H1101N) Ferritin construct
MFVFLVLLPLVSSQCVNLTTRTQLPPAYTNSFTRGVYYPDKVFRSSVLHSTQDLFLPFFSNVTWFHAIHVSGTNGTKRFDNPVLPFNDGVYFASTEKSNIIRGWIFGTTLDSKTQSLLIVNNATNVVIKVCEFQFCNDPFLGVYYHKNNKSWMESEFRVYSSANNCTFEYVSQPFLMDLEGKQGNFKNLREFVFKNIDGYFKIYSKHTPINLVRDLPQGFSALEPLVDLPIGINITRFQTLLALHRSYLTPGDSSSGWTAGAAAYYVGYLQPRTFLLKYNENGTITDAVDCALDPLSETKCTLKSFTVEKGIYQTSNFRVQPTESIVRFPNITNLCPFGEVFNATRFASVYAWNRKRISNCVADYSVLYNSASFSTFKCYGVSPTKLNDLCFTNVYADSFVIRGDEVRQIAPGQTGKIADYNYKLPDDFTGCVIAWNSNNLDSKVGGNYNYLYRLFRKSNLKPFERDISTEIYQAGSTPCNGVEGFNCYFPLQSYGFQPTNGVGYQPYRVVVLSFELLHAPATVCGPKKSTNLVKNKCVNFNFNGLTGTGVLTESNKKFLPFQQFGRDIADTTDAVRDPQTLEILDITPCSFGGVSVITPGTNTSNQVAVLYQDVNCTEVPVAIHADQLTPTWRVYSTGSNVFQTRAGCLIGAEHVNNSYECDIPIGAGICASYQTQTNSPRRARSVASQSIIAYTMSLGAENSVAYSNNSIAIPTNFTISVTTEILPVSMTKTSVDCTMYICGDSTECSNFLLQYGSFCTQLNRALTGIAVEQDKNTQEVFAQVKQIYKTPPIKDFGGFNFSQILPDPSKPSKRSFIEDLLFNKVTLADAGFIKQYGDCLGDIAARDLICAQKFNGLTVLPPLLTDEMIAQYTSALLAGTITSGWTFGAGAALQIPFAMQMAYRFNGIGVTQNVLYENQKLIANQFNSAIGKIQDSLSSTASALGKLQDVVNQNAQALNTLVKQLSSNFGAISSVLNDILSRLDPPEAEVQIDRLITGRLQSLQTYVTQQLIRAAEIRASANLAATKMSECVLGQSKRVDFCGKGYQLMSFPQSAPHGVVFLNVTYVPAQEKNFTTAPAICNDGKAHFPREGVFVSNGTNWFVTQRNFYEPQIITTDNTFVSGNCDVVIGIVNNTVYDPLQPELDSGGGGSDIIKLLNEQVNKEMQSSNLYMSMSSWCYTHSLDGAGLFLFDHAAEEYEHAKKLIIFLNENNVPVQLTSISAPEHKFEGLTQIFQKAYEHEQHISESINNIVDHAIKSKDHATFNFLQWYVAEQHEEEVLFKDILDKIELIGNENHGLYLADQYVKGIAKSRKS

SEQ ID NO: 8927 - protein, 1315 aa, Artificial Sequence
  SARS-CoV-2/Australia/QLD02/2020__EPI_ISL_407896 spike protein (1-1147)(K986P_V987P_ H1048Q_H1064N_ H1083N_H1101N) Ferritin construct
MFVFLVLLPLVSSQCVNLTTRTQLPPAYTNSFTRGVYYPDKVFRSSVLHSTQDLFLPFFSNVTWFHAIHVSGTNGTKRFDNPVLPFNDGVYFASTEKSNIIRGWIFGTTLDSKTQSLLIVNNATNVVIKVCEFQFCNDPFLGVYYHKNNKSWMESEFRVYSSANNCTFEYVSQPFLMDLEGKQGNFKNLREFVFKNIDGYFKIYSKHTPINLVRDLPQGFSALEPLVDLPIGINITRFQTLLALHRSYLTPGDSSSGWTAGAAAYYVGYLQPRTFLLKYNENGTITDAVDCALDPLSETKCTLKSFTVEKGIYQTSNFRVQPTESIVRFPNITNLCPFGEVFNATRFASVYAWNRKRISNCVADYSVLYNSASFSTFKCYGVSPTKLNDLCFTNVYADSFVIRGDEVRQIAPGQTGKIADYNYKLPDDFTGCVIAWNSNNLDSKVGGNYNYLYRLFRKSNLKPFERDISTEIYQAGSTPCNGVEGFNCYFPLQSYGFQPTNGVGYQPYRVVVLSFELLHAPATVCGPKKSTNLVKNKCVNFNFNGLTGTGVLTESNKKFLPFQQFGRDIADTTDAVRDPQTLEILDITPCSFGGVSVITPGTNTSNQVAVLYQDVNCTEVPVAIHADQLTPTWRVYSTGSNVFQTRAGCLIGAEHVNNSYECDIPIGAGICASYQTQTNSPRRARSVASQSIIAYTMSLGAENSVAYSNNSIAIPTNFTISVTTEILPVSMTKTSVDCTMYICGDSTECSNLLLQYGSFCTQLNRALTGIAVEQDKNTQEVFAQVKQIYKTPPIKDFGGFNFSQILPDPSKPSKRSFIEDLLFNKVTLADAGFIKQYGDCLGDIAARDLICAQKFNGLTVLPPLLTDEMIAQYTSALLAGTITSGWTFGAGAALQIPFAMQMAYRFNGIGVTQNVLYENQKLIANQFNSAIGKIQDSLSSTASALGKLQDVVNQNAQALNTLVKQLSSNFGAISSVLNDILSRLDPPEAEVQIDRLITGRLQSLQTYVTQQLIRAAEIRASANLAATKMSECVLGQSKRVDFCGKGYQLMSFPQSAPHGVVFLNVTYVPAQEKNFTTAPAICNDGKAHFPREGVFVSNGTNWFVTQRNFYEPQIITTDNTFVSGNCDVVIGIVNNTVYDPLQLELDSGGGGSDIIKLLNEQVNKEMQSSNLYMSMSSWCYTHSLDGAGLFLFDHAAEEYEHAKKLIIFLNENNVPVQLTSISAPEHKFEGLTQIFQKAYEHEQHISESINNIVDHAIKSKDHATFNFLQWYVAEQHEEEVLFKDILDKIELIGNENHGLYLADQYVKGIAKSRKS

SEQ ID NO: 8928 - protein, 1315 aa, Artificial Sequence
  SARS-CoV-2/India/1-31/2020__EPI_ISL_413523 spike protein (1-1147)(K986P_V987P_ H1048Q_H1064N_ H1083N_H1101N) Ferritin construct
MFVFLVLLPLVSSQCVNLTTRTQLPPAYTNSFTRGVYYPDKVFRSSVLHSTQDLFLPFFSNVTWFHAIHVSGTNGTKRFDNPVLPFNDGVYFASTEKSNIIRGWIFGTTLDSKTQSLLIVNNATNVVIKVCEFQFCNDPFLGVYYHKNNKSWMESEFRVYSSANNCTFEYVSQPFLMDLEGKQGNFKNLREFVFKNIDGYFKIYSKHTPINLVRDLPQGFSALEPLVDLPIGINITRFQTLLALHRSYLTPGDSSSGWTAGAAAYYVGYLQPRTFLLKYNENGTITDAVDCALDPLSETKCTLKSFTVEKGIYQTSNFRVQPTESIVRFPNITNLCPFGEVFNATRFASVYAWNRKRISNCVADYSVLYNSASFSTFKCYGVSPTKLNDLCFTNVYADSFVIRGDEVRQIAPGQTGKIADYNYKLPDDFTGCVIAWNSNNLDSKVGGNYNYLYRLFRKSNLKPFERDISTEIYQAGSTPCNGVEGFNCYFPLQSYGFQPTNGVGYQPYRVVVLSFELLHAPATVCGPKKSTNLVKNKCVNFNFNGLTGTGVLTESNKKFLPFQQFGRDIADTTDAVRDPQTLEILDITPCSFGGVSVITPGTNTSNQVAVLYQDVNCTEVPVAIHADQLTPTWRVYSTGSNVFQTRAGCLIGAEHVNNSYECDIPIGAGICASYQTQTNSPRRARSVASQSIIAYTMSLGAENSVAYSNNSIAIPTNFTISVTTEILPVSMTKTSVDCTMYICGDSTECSNLLLQYGSFCTQLNRALTGIAVEQDKNTQEVFAQVKQIYKTPPIKDFGGFNFSQILPDPSKPSKRSFIEDLLFNKVTLADAGFIKQYGDCLGDIAARDLICAQKFNGLTVLPPLLTDEMIAQYTSALLAGTITSGWTFGAGAALQIPFAMQMAYRFNGIGVTQNVLYENQKLIANQFNSVIGKIQDSLSSTASALGKLQDVVNQNAQALNTLVKQLSSNFGAISSVLNDILSRLDPPEAEVQIDRLITGRLQSLQTYVTQQLIRAAEIRASANLAATKMSECVLGQSKRVDFCGKGYQLMSFPQSAPHGVVFLNVTYVPAQEKNFTTAPAICNDGKAHFPREGVFVSNGTNWFVTQRNFYEPQIITTDNTFVSGNCDVVIGIVNNTVYDPLQPELDSGGGGSDIIKLLNEQVNKEMQSSNLYMSMSSWCYTHSLDGAGLFLFDHAAEEYEHAKKLIIFLNENNVPVQLTSISAPEHKFEGLTQIFQKAYEHEQHISESINNIVDHAIKSKDHATFNFLQWYVAEQHEEEVLFKDILDKIELIGNENHGLYLADQYVKGIAKSRKS

SEQ ID NO: 8929 - protein, 1315 aa, Artificial Sequence
  SARS-CoV-2/Guangdong/GD2020087-P0008/2020__EPI_ISL_413863 spike protein (1-1147)(K986P_V987P_ H1048Q_H1064N_ H1083N_H1101N) Ferritin construct
MFVFLVLLPLVSSQCVNLTTRTQLPPAYTNSFTRGVYYPDKVFRSSVLHSTQDLFLPFFSNVTWFHAIHVSGTNGTKRFDNPVLPFNDGVYFASTEKSNIIRGWIFGTTLDSKTQSLLIVNNATNVVIKVCEFQFCNDPFLGVYYHKNNKSWMESEFRVYSSANNCTFEYVSQPFLMDLEGKQGNFKNLREFVFKNIDGYFKIYSKHTPINLVRDLPQGFSALEPLVDLPIGINITRFQTLLALHRSYLTPGDSSSGWTAGAAAYYVGYLQPRTFLLKYNENGTITDAVDCALDPLSETKCTLKSFTVEKGIYQTSNFRVQPTESIVRFPNITNLCPFGEVFNATRFASVYAWNRKRISNCVADYSVLYNSASFSTFKCYGVSPTKLNDLCFTNVYADSFVIRGDEVREIAPGQTGKIADYNYKLPDDFTGCVIAWNSNNLDSKVGGNYNYLYRLFRKSNLKPFERDISTEIYQAGSTPCNGVEGFNCYFPLQSYGFQPTNGVGYQPYRVVVLSFELLHAPATVCGPKKSTNLVKNKCVNFNFNGLTGTGVLTESNKKFLPFQQFGRDIADTTDAVRDPQTLEILDITPCSFGGVSVITPGTNTSNQVAVLYQDVNCTEVPVAIHADQLTPTWRVYSTGSNVFQTRAGCLIGAEHVNNSYECDIPIGAGICASYQTQTNSPRRARSVASQSIIAYTMSLGAENSVAYSNNSIAIPTNFTISVTTEILPVSMTKTSVDCTMYICGDSTECSNLLLQYGSFCTQLNRALTGIAVEQDKNTQEVFAQVKQIYKTPPIKDFGGFNFSQILPDPSKPSKRSFIEDLLFNKVTLADAGFIKQYGDCLGDIAARDLICAQKFNGLTVLPPLLTDEMIAQYTSALLAGTITSGWTFGAGAALQIPFAMQMAYRFNGIGVTQNVLYENQKLIANQFNSAIGKIQDSLSSTASALGKLQDVVNQNAQALNTLVKQLSSNFGAISSVLNDILSRLDPPEAEVQIDRLITGRLQSLQTYVTQQLIRAAEIRASANLAATKMSECVLGQSKRVDFCGKGYQLMSFPQSAPHGVVFLNVTYVPAQEKNFTTAPAICNDGKAHFPREGVFVSNGTNWFVTQRNFYEPQIITTDNTFVSGNCDVVIGIVNNTVYDPLQPELDSGGGGSDIIKLLNEQVNKEMQSSNLYMSMSSWCYTHSLDGAGLFLFDHAAEEYEHAKKLIIFLNENNVPVQLTSISAPEHKFEGLTQIFQKAYEHEQHISESINNIVDHAIKSKDHATFNFLQWYVAEQHEEEVLFKDILDKIELIGNENHGLYLADQYVKGIAKSRKS

SEQ ID NO: 8930 - protein, 1315 aa, Artificial Sequence
  SARS-CoV-2/Sweden/01/2020__EPI_ISL_411951 spike protein (1-1147)(K986P_V987P_ H1048Q_H1064N_ H1083N_H1101N) Ferritin construct
MFVFLVLLPLVSSQCVNLTTRTQLPPAYTNSFTRGVYYPDKVFRSSVLHSTQDLFLPFFSNVTWFHAIHVSGTNGTKRFDNPVLPFNDGVYFASTEKSNIIRGWIFGTTLDSKTQSLLIVNNATNVVIKVCEFQFCNDPFLGVYYHKNNKSWMESEFRVYSSANNCTFEYVSQPFLMDLEGKQGNFKNLREFVFKNIDGYFKIYSKHTPINLVRDLPQGFSALEPLVDLPIGINITRFQTLLALHRSYLTPGDSSSGWTAGAAAYYVGYLQPRTFLLKYNENGTITDAVDCALDPLSETKCTLKSFTVEKGIYQTSNFRVQPTESIVRFPNITNLCPFGEVFNATRFASVYAWNRKRISNCVADYSVLYNSASFSTFKCYGVSPTKLNDLCFTNVYADSFVIRGDEVRQIAPGQTGKIADYNYKLPDDFTGCVIAWNSNNLDSKVGGNYNYLYRLFRKSNLKPFERDISTEIYQAGSTPCNGVEGFNCYFPLQSYGFQPTNGVGYQPYRVVVLSFELLHAPATVCGPKKSTNLVKNKCVNFNFNGLTGTGVLTESNKKFLPFQQFGRDIADTTDAVRDPQTLEILDITPCSFGGVSVITPGTNTSNQVAVLYQDVNCTEVPVAIHADQLTPTWRVYSTGSNVFQTRAGCLIGAEHVNNSYECDIPIGAGICASYQTQTNSPRRARSVASQSIIAYTMSLGAENSVAYSNNSIAIPTNFTISVTTEILPVSMTKTSVDCTMYICGDSTECSNLLLQYGSFCTQLNRALTGIAVEQDKNTQEVFAQVKQIYKTPPIKDCGGFNFSQILPDPSKPSKRSFIEDLLFNKVTLADAGFIKQYGDCLGDIAARDLICAQKFNGLTVLPPLLTDEMIAQYTSALLAGTITSGWTFGAGAALQIPFAMQMAYRFNGIGVTQNVLYENQKLIANQFNSAIGKIQDSLSSTASALGKLQDVVNQNAQALNTLVKQLSSNFGAISSVLNDILSRLDPPEAEVQIDRLITGRLQSLQTYVTQQLIRAAEIRASANLAATKMSECVLGQSKRVDFCGKGYQLMSFPQSAPHGVVFLNVTYVPAQEKNFTTAPAICNDGKAHFPREGVFVSNGTNWFVTQRNFYEPQIITTDNTFVSGNCDVVIGIVNNTVYDPLQPELDSGGGGSDIIKLLNEQVNKEMQSSNLYMSMSSWCYTHSLDGAGLFLFDHAAEEYEHAKKLIIFLNENNVPVQLTSISAPEHKFEGLTQIFQKAYEHEQHISESINNIVDHAIKSKDHATFNFLQWYVAEQHEEEVLFKDILDKIELIGNENHGLYLADQYVKGIAKSRKS

SEQ ID NO: 8931 - protein, 1315 aa, Artificial Sequence
  SARS-CoV-2/Tianmen/HBCDC-HB-07/2020__EPI_ISL_412983 spike protein (1-1147)(K986P_V987P_ H1048Q_H1064N_ H1083N_H1101N) Ferritin construct
MFVFLVLLPLVSSQCVNLTTRTQLPPAYTNSFTRGVYYPDKVFRSSVLHSTQDLFLPFFSNVTWFHAIHVSGTNGTKRFDNPVLPFNDGVYFASTEKSNIIRGWIFGTTLDSKTQSLLIVNNATNVVIKVCEFQFCNDPFLGVYYHKNNKSWMESEFRVYSSANNCTFEYVSQPFLMDLEGKQGNFKNLREFVFKNIDGYFKIYSKHTPINLVRDLPQGFSALEPLVDLPIGINITRFQTLLALHRSYLTPGDSSSGWTAGAAAYYVGYLQPRTFLLKYNENGTITDAVDCALDPLSETKCTLKSFTVEKGIYQTSNFRVQPTESIVRFPNITNLCPFGEVFNATRFASVYAWNRKRISNCVADYSVLYNSASFSTFKCYGVSPTKLNDLCFTNVYADSFVIRGDEVRQIAPGQTGKIADYNYKLPDDFTGCVIAWNSNNLDSKVGGNYNYLYRLFRKSNLKPFERDISTEIYQAGSTPCNGVEGFNCYFPLQSYGFQPTNGVGYQPYRVVVLSFELLHAPATVCGPKKSTNLVKNKCVNFNFNGLTGTGVLTESNKKFLPFQQFGRDIADTTDAVRDPQTLEILDITPCSFGGVSVITPGTNTSNQVAVLYQDLNCTEVPVAIHADQLTPTWRVYSTGSNVFQTRAGCLIGAEHVNNSYECDIPIGAGICASYQTQTNSPRRARSVASQSIIAYTMSLGAENSVAYSNNSIAIPTNFTISVTTEILPVSMTKTSVDCTMYICGDSTECSNLLLQYGSFCTQLNRALTGIAVEQDKNTQEVFAQVKQIYKTPPIKDFGGFNFSQILPDPSKPSKRSFIEDLLFNKVTLADAGFIKQYGDCLGDIAARDLICAQKFNGLTVLPPLLTDEMIAQYTSALLAGTITSGWTFGAGAALQIPFAMQMAYRFNGIGVTQNVLYENQKLIANQFNSAIGKIQDSLSSTASALGKLQDVVNQNAQALNTLVKQLSSNFGAISSVLNDILSRLDPPEAEVQIDRLITGRLQSLQTYVTQQLIRAAEIRASANLAATKMSECVLGQSKRVDFCGKGYQLMSFPQSAPHGVVFLNVTYVPAQEKNFTTAPAICNDGKAHFPREGVFVSNGTNWFVTQRNFYEPQIITTDNTFVSGNCDVVIGIVNNTVYDPLQPELDSGGGGSDIIKLLNEQVNKEMQSSNLYMSMSSWCYTHSLDGAGLFLFDHAAEEYEHAKKLIIFLNENNVPVQLTSISAPEHKFEGLTQIFQKAYEHEQHISESINNIVDHAIKSKDHATFNFLQWYVAEQHEEEVLFKDILDKIELIGNENHGLYLADQYVKGIAKSRKS

SEQ ID NO: 8932 - protein, 1315 aa, Artificial Sequence
  SARS-CoV-2/Hong Kong/case42_VM20002493/2020__EPI_ISL_414527 spike protein (1-1147)(K986P_V987P_ H1048Q_H1064N_ H1083N_H1101N) Ferritin construct
MFVFLVLLPLVSSQCVNLTTRTQLPPAYTNSFTRGVYYPDKVFRSSVLHSTQDLFLPFFSNVTWFHAIHVSGTNGTKRFDNPVLPFNDGVYFASTEKSNIIRGWIFGTTLDSKTQSLLIVNNATNVVIKVCEFQFCNDPFLGVYYHKNNKSWMESEFRVYSSANNCTFEYVSQPFLMDLEGKQGNFKNLREFVFKNIDGYFKIYSKHTPINLVRDLPQGFSALEPLVDLPIGINITRFQTLLALHRSYLTPGDSSSGWTAGAAAYYVGYLQPRTFLLKYNENGTITDAVDCALDPLSETKCTLKSFTVEKGIYQTSNFRVQPTESIVRFPNITNLCPFGEVFNATRFASVYAWNRKRISNCVADYSVLYNSASFSTFKCYGVSPTKLNDLCFTNVYADSFVIRGDEVRQIAPGQTGKIADYNYKLPDDFTGCVIAWNSNNLDSKVGGNYNYLYRLFRKSNLKPFERDISTEIYQAGSTPCNGVEGFNCYFPLQSYGFQPTNGVGYQPYRVVVLSFELLHAPATVCGPKKSTNLVKNKCVNFNFNGLTGTGVLTESNKKFLPFQQFGRDIADTTDAVRDPQTLEILDITPCSFGGVSVITPGTNTSNQVAVLYQDVNCTEVPVAIHADQLTPTWRVYSTGSNVFQTRAGCLIGAEHVNNSYECDIPIGAGICASYQTQTNSPRRARSVASQSIIAYTMSLGAENSVAYSNNSIAIPTNFAISVTTEILPVSMTKTSVDCTMYICGDSTECSNLLLQYGSFCTQLNRALTGIAVEQDKNTQEVFAQVKQIYKTPPIKDFGGFNFSQILPDPSKPSKRSFIEDLLFNKVTLADAGFIKQYGDCLGDIAARDLICAQKFNGLTVLPPLLTDEMIAQYTSALLAGTITSGWTFGAGAALQIPFAMQMAYRFNGIGVTQNVLYENQKLIANQFNSAIGKIQDSLSSTASALGKLQDVVNQNAQALNTLVKQLSSNFGAISSVLNDILSRLDPPEAEVQIDRLITGRLQSLQTYVTQQLIRAAEIRASANLAATKMSECVLGQSKRVDFCGKGYQLMSFPQSAPHGVVFLNVTYVPAQEKNFTTAPAICNDGKAHFPREGVFVSNGTNWFVTQRNFYEPQIITTDNTFVSGNCDVVIGIVNNTVYDPLQPELDSGGGGSDIIKLLNEQVNKEMQSSNLYMSMSSWCYTHSLDGAGLFLFDHAAEEYEHAKKLIIFLNENNVPVQLTSISAPEHKFEGLTQIFQKAYEHEQHISESINNIVDHAIKSKDHATFNFLQWYVAEQHEEEVLFKDILDKIELIGNENHGLYLADQYVKGIAKSRKS

SEQ ID NO: 8933 - protein, 1315 aa, Artificial Sequence
  SARS-CoV-2/USA/CruiseA-23/2020__EPI_ISL_414482 spike protein (1-1147)(K986P_V987P_ H1048Q_H1064N_ H1083N_H1101N) Ferritin construct
MFVFLVLLPLVSSQCVNLTTRTQLPPAYTNSFTRGVYYPDKVFRSSVLHSTQDLFLPFFSNVTWFHAIHVSGTNGTKRFDNPVLPFNDGVYFASTEKSNIIRGWIFGTTLDSKTQSLLIVNNATNVVIKVCEFQFCNDPFLGVYYHKNNKSWMESEFRVYSSANNCTFEYVSQPFLMDLEVKQGNFKNLREFVFKNIDGYFKIYSKHTPINLVRDLPQGFSALEPLVDLPIGINITRFQTLLALHRSYLTPGDSSSGWTAGAAAYYVGYLQPRTFLLKYNENGTITDAVDCALDPLSETKCTLKSFTVEKGIYQTSNFRVQPTESIVRFPNITNLCPFGEVFNATRFASVYAWNRKRISNCVADYSVLYNSASFSTFKCYGVSPTKLNDLCFTNVYADSFVIRGDEVRQIAPGQTGKIADYNYKLPDDFTGCVIAWNSNNLDSKVGGNYNYLYRLFRKSNLKPFERDISTEIYQAGSTPCNGVEGFNCYFPLQSYGFQPTNGVGYQPYRVVVLSFELLHAPATVCGPKKSTNLVKNKCVNFNFNGLTGTGVLTESNKKFLPFQQFGRDIADTTDAVRDPQTLEILDITPCSFGGVSVITPGTNTSNQVAVLYQDVNCTEVPVAIHADQLTPTWRVYSTGSNVFQTRAGCLIGAEHVNNSYECDIPIGAGICASYQTQTNSPRRARSVASQSIIAYTMSLGAENSVAYSNNSIAIPTNFTISVTTEILPVSMTKTSVDCTMYICGDSTECSNLLLQYGSFCTQLNRALTGIAVEQDKNTQEVFAQVKQIYKTPPIKDFGGFNFSQILPDPSKPSKRSFIEDLLFNKVTLADAGFIKQYGDCLGDIAARDLICAQKFNGLTVLPPLLTDEMIAQYTSALLAGTITSGWTFGAGAALQIPFAMQMAYRFNGIGVTQNVLYENQKLIANQFNSAIGKIQDSLSSTASALGKLQDVVNQNAQALNTLVKQLSSNFGAISSVLNDILSRLDPPEAEVQIDRLITGRLQSLQTYVTQQLIRAAEIRASANLAATKMSECVLGQSKRVDFCGKGYQLMSFPQSAPHGVVFLNVTYVPAQEKNFTTAPAICNDGKAHFPREGVFVSNGTNWFVTQRNFYEPQIITTDNTFVSGNCDVVIGIVNNTVYDPLQPELDSGGGGSDIIKLLNEQVNKEMQSSNLYMSMSSWCYTHSLDGAGLFLFDHAAEEYEHAKKLIIFLNENNVPVQLTSISAPEHKFEGLTQIFQKAYEHEQHISESINNIVDHAIKSKDHATFNFLQWYVAEQHEEEVLFKDILDKIELIGNENHGLYLADQYVKGIAKSRKS

SEQ ID NO: 8934 - protein, 1315 aa, Artificial Sequence
  SARS-CoV-2/Hong Kong/case85_VM20002868/2020__EPI_ISL_414519 spike protein (1-1147)(K986P_V987P_ H1048Q_H1064N_ H1083N_H1101N) Ferritin construct
MFVFLVLVPLVSSQCVNLTTRTQLPPAYTNSFTRGVYYPDKVFRSSVLHSTQDLFLPFFSNVTWFHAIHVSGTNGTKRFDNPVLPFNDGVYFASTEKSNIIRGWIFGTTLDSKTQSLLIVNNATNVVIKVCEFQFCNDPFLGVYYHKNNKSWMESEFRVYSSANNCTFEYVSQPFLMDLEGKQGNFKNLREFVFKNIDGYFKIYSKHTPINLVRDLPQGFSALEPLVDLPIGINITRFQTLLALHRSYLTPGDSSSGWTAGAAAYYVGYLQPRTFLLKYNENGTITDAVDCALDPLSETKCTLKSFTVEKGIYQTSNFRVQPTESIVRFPNITNLCPFGEVFNATRFASVYAWNRKRISNCVADYSVLYNSASFSTFKCYGVSPTKLNDLCFTNVYADSFVIRGDEVRQIAPGQTGKIADYNYKLPDDFTGCVIAWNSNNLDSKVGGNYNYLYRLFRKSNLKPFERDISTEIYQAGSTPCNGVEGFNCYFPLQSYGFQPTNGVGYQPYRVVVLSFELLHAPATVCGPKKSTNLVKNKCVNFNFNGLTGTGVLTESNKKFLPFQQFGRDIADTTDAVRDPQTLEILDITPCSFGGVSVITPGTNTSNQVAVLYQDVNCTEVPVAIHADQLTPTWRVYSTGSNVFQTRAGCLIGAEHVNNSYECDIPIGAGICASYQTQTNSPRRARSVASQSIIAYTMSLGAENSVAYSNNSIAIPTNFTISVTTEILPVSMTKTSVDCTMYICGDSTECSNLLLQYGSFCTQLNRALTGIAVEQDKNTQEVFAQVKQIYKTPPIKDFGGFNFSQILPDPSKPSKRSFIEDLLFNKVTLADAGFIKQYGDCLGDIAARDLICAQKFNGLTVLPPLLTDEMIAQYTSALLAGTITSGWTFGAGAALQIPFAMQMAYRFNGIGVTQNVLYENQKLIANQFNSAIGKIQDSLSSTASALGKLQDVVNQNAQALNTLVKQLSSNFGAISSVLNDILSRLDPPEAEVQIDRLITGRLQSLQTYVTQQLIRAAEIRASANLAATKMSECVLGQSKRVDFCGKGYQLMSFPQSAPHGVVFLNVTYVPAQEKNFTTAPAICNDGKAHFPREGVFVSNGTNWFVTQRNFYEPQIITTDNTFVSGNCDVVIGIVNNTVYDPLQPELDSGGGGSDIIKLLNEQVNKEMQSSNLYMSMSSWCYTHSLDGAGLFLFDHAAEEYEHAKKLIIFLNENNVPVQLTSISAPEHKFEGLTQIFQKAYEHEQHISESINNIVDHAIKSKDHATFNFLQWYVAEQHEEEVLFKDILDKIELIGNENHGLYLADQYVKGIAKSRKS

SEQ ID NO: 8935 - protein, 1315 aa, Artificial Sequence; identical to SEQ ID NO: 8925
  SARS-CoV-2/England/200990660/2020__EPI_ISL_414523 spike protein (1-1147)(K986P_V987P_ H1048Q_H1064N_ H1083N_H1101N) Ferritin construct

SEQ ID NO: 8936 - protein, 1315 aa, Artificial Sequence
  SARS-CoV-2/Australia/NSW09/2020__EPI_ISL_413595 spike protein (1-1147)(K986P_V987P_ H1048Q_H1064N_ H1083N_H1101N) Ferritin construct
MFVFLVLLPLVSSQCVNLTTRTQLPPAYTNSFTRGVYYPDKVFRSSVLHSTQDLFLPFFSNVTWFHAIHVSGTNGTKRFDNPVLPFNDGVYFASTEKSNIIRGWIFGTTLDSKTQSLLIVNNATNVVIKVCEFQFCNDPFLGVYYHKNNKSWMESEFRVYSSANNCTFEYVSQPFLMDLEGKQGNFKNLREFVFKNIDGYFKIYSKHTPINLVRDLPQGFSALEPLVDLPIGINITRFQTLLALHRSYLTPGDSSSGWTAGAAAYYVGYLQPRTFLLKYNENGTITDAVDCALDPLSETKCTLKSFTVEKGIYQTSNFRVQPTESIVRFPNITNLCPFGEVFNATRFASVYAWNRKRISNCVADYSVLYNSASFSTFKCYGVSPTKLNDLCFTNVYADSFVIRGDEVRQIAPGQTGKIADYNYKLPDDFTGCVIAWNSNNLDSKVGGNYNYLYRLFRKSNLKPFERDISTEIYQAGSTPCNGVEGFNCYFPLQSYGFQPTNGVGYQPYRVVVLSFELLHAPATVCGPKKSTNLVKNKCVNFNFNGLTGTGVLTESNKKFLPFQQFGRDIADTTDAVRDPQTLEILDITPCSFGGVSVITPGTNTSNQVAVLYQDVNCTEVPVAIHADQLTPTWRVYSTGSNVFQTRAGCLIGAEHVNNSYECDIPIGAGICASYQTQTNSPRRARSVASQSIIAYTMSLGAENSVAYSNNSIAIPTNFTISVTTEILPVSMTKTSVDCTMYICGDSTECSNLLLQYGSFCTQLNRALTGIAVEQDKNTQEVFAQVKQIYKTPPIKDFGGFNFSQILPDPSKPSKRSFIEDLLFNKVTLADAGFIKQYGDCLGDIAARDLICAQKFNGLTVLPPLLTDEMIAQYTSALLAGTITSGWTFGAGAALQIPFAMQMAYRFNGIGVTQNVLYENQKLIANQFNSAIGKIQDSLSFTASALGKLQDVVNQNAQALNTLVKQLSSNFGAISSVLNDILSRLDPPEAEVQIDRLITGRLQSLQTYVTQQLIRAAEIRASANLAATKMSECVLGQSKRVDFCGKGYQLMSFPQSAPHGVVFLNVTYVPAQEKNFTTAPAICNDGKAHFPREGVFVSNGTNWFVTQRNFYEPQIITTDNTFVSGNCDVVIGIVNNTVYDPLQPELDSGGGGSDIIKLLNEQVNKEMQSSNLYMSMSSWCYTHSLDGAGLFLFDHAAEEYEHAKKLIIFLNENNVPVQLTSISAPEHKFEGLTQIFQKAYEHEQHISESINNIVDHAIKSKDHATFNFLQWYVAEQHEEEVLFKDILDKIELIGNENHGLYLADQYVKGIAKSRKS

SEQ ID NO: 8937 - protein, 1315 aa, Artificial Sequence; identical to SEQ ID NO: 8917
  SARS-CoV-2/Australia/NSW10/2020__EPI_ISL_413596 spike protein (1-1147)(K986P_V987P_ H1048Q_H1064N_ H1083N_H1101N) Ferritin construct

SEQ ID NO: 8938 - protein, 1315 aa, Artificial Sequence
  SARS-CoV-2/Switzerland/1000477797/2020__EPI_ISL_413023 spike protein (1-1147)(K986P_V987P_ H1048Q_H1064N_ H1083N_H1101N) Ferritin construct
MFVFLVLLPLVSSQCVNLTTRTQLPPAYTNSFTRGVYYPDKVFRSSVLHSTQDLFLPFFSNVTWFHAIHVSGTNGTKRFDNPVLPFNDGVYFASTEKSNIIRGWIFGTTLDSKTQSLLIVNNATNVVIKVCEFQFCNDPFLGVYYHKNNKSWMESEFRVYSSANNCTFEYVSQPFLMDLEGKQGNFKNLREFVFKNIDGYFNIYSKHTPINLVRDLPQGFSALEPLVDLPIGINITRFQTLLALHRSYLTPGDSSSGWTAGAAAYYVGYLQPRTFLLKYNENGTITDAVDCALDPLSETKCTLKSFTVEKGIYQTSNFRVQPTESIVRFPNITNLCPFGEVFNATRFASVYAWNRKRISNCVADYSVLYNSASFSTFKCYGVSPTKLNDLCFTNVYADSFVIRGDEVRQIAPGQTGKIADYNYKLPDDFTGCVIAWNSNNLDSKVGGNYNYLYRLFRKSNLKPFERDISTEIYQAGSTPCNGVEGFNCYFPLQSYGFQPTNGVGYQPYRVVVLSFELLHAPATVCGPKKSTNLVKNKCVNFNFNGLTGTGVLTESNKKFLPFQQFGRDIADTTDAVRDPQTLEILDITPCSFGGVSVITPGTNTSNQVAVLYQGVNCTEVPVAIHADQLTPTWRVYSTGSNVFQTRAGCLIGAEHVNNSYECDIPIGAGICASYQTQTNSPRRARSVASQSIIAYTMSLGAENSVAYSNNSIAIPTNFTISVTTEILPVSMTKTSVDCTMYICGDSTECSNLLLQYGSFCTQLNRALTGIAVEQDKNTQEVFAQVKQIYKTPPIKDFGGFNFSQILPDPSKPSKRSFIEDLLFNKVTLADAGFIKQYGDCLGDIAARDLICAQKFNGLTVLPPLLTDEMIAQYTSALLAGTITSGWTFGAGAALQIPFAMQMAYRFNGIGVTQNVLYENQKLIANQFNSAIGKIQDSLSSTASALGKLQDVVNQNAQALNTLVKQLSSNFGAISSVLNDILSRLDPPEAEVQIDRLITGRLQSLQTYVTQQLIRAAEIRASANLAATKMSECVLGQSKRVDFCGKGYQLMSFPQSAPHGVVFLNVTYVPAQEKNFTTAPAICNDGKAHFPREGVFVSNGTNWFVTQRNFYEPQIITTDNTFVSGNCDVVIGIVNNTVYDPLQPELDSGGGGSDIIKLLNEQVNKEMQSSNLYMSMSSWCYTHSLDGAGLFLFDHAAEEYEHAKKLIIFLNENNVPVQLTSISAPEHKFEGLTQIFQKAYEHEQHISESINNIVDHAIKSKDHATFNFLQWYVAEQHEEEVLFKDILDKIELIGNENHGLYLADQYVKGIAKSRKS

SEQ ID NO: 8939 - protein, 1315 aa, Artificial Sequence
  SARS-CoV-2/Belgium/BA-02291/2020__EPI_ISL_415159 spike protein (1-1147)(K986P_V987P_ H1048Q_H1064N_ H1083N_H1101N) Ferritin construct
MFVFLVLLPLVSSQCVNLTTRTQLPPAYTNSFTRGVYYPDKVFRSSVLHSTQDLFLPFFSNVTWFHAIHVSGTNGTKRFDNPVLPFNDGVYFASTEKSNIIRGWIFGTTLDSKTQSLLIVNNATNVVIKVCEFQFCNDPFLGVYYHKNNKSWMESEFRVYSSANNCTFEYVSQPFLMDLEGKQGNFKNLREFVFKNIDGYFKIYSKHTPINLVRDLPQGFSALEPLVDLPIGINITRFQTLLALHRSYLTPGDSSSGWTAGAAAYYVGYLQPRTFLLKYNENGTITDAVDCALDPLSETKCTLKSFTVEKGIYQTSNFRVQPTESIVRFPNITNLCPFGEVFNATRFASVYAWNRKRISNCVADYSVLYNSASFSTFKCYGVSPTKLNDLCFTNVYADSFVIRGDEVRQIAPGQTGKIADYNYKLPDDFTGCVIAWNSNNLDSKVGGNYNYLYRLFRRSNLKPFERDISTEIYQAGSTPCNGVEGFNCYFPLQSYGFQPTNGVGYQPYRVVVLSFELLPAPATVCGPKKSTNLVKNKCVNFNFNGLTGTGVLTESNKKFLPFQQFGRDIADTTDAVRDPQTLEILDITPCSFGGVSVITPGTNTSNQVAVLYQGVNCTEVPVAIHADQLTPTWRVYSTGSNVFQTRAGCLIGAEHVNNSYECDIPIGAGICASYQTQTNSPRRARSVASQSIIAYTMSLGAENSVAYSNNSIAIPTNFTISVTTEILPVSMTKTSVDCTMYICGDSTECSNLLLQYGSFCTQLNRALTGIAVEQDKNTQEVFAQVKQIYKTPPIKDFGGFNFSQILPDPSKPSKRSFIEDLLFNKVTLADAGFIKQYGDCLGDIAARDLICAQKFNGLTVLPPLLTDEMIAQYTSALLAGTITSGWTFGAGAALQIPFAMQMAYRFNGIGVTQNVLYENQKLIANQFNSAIGKIQDSLSSAAPALGKLQDVVNQNAQALNTLVKQLSSNFGAISSVLNDILSRLDPPEAEVQIDRLITGRLQSLQTYVTQQLIRAAEIRASANLAATKMSECVLGQSKRVDFCGKGYQLMSFPQSAPHGVVFLNVTYVPAQEKNFTTAPAICNDGKAHFPREGVFVSNGTNWFVTQRNFYEPQIITTDNTFVSGNCDVVIGIVNNTVYDPLQPELDSGGGGSDIIKLLNEQVNKEMQSSNLYMSMSSWCYTHSLDGAGLFLFDHAAEEYEHAKKLIIFLNENNVPVQLTSISAPEHKFEGLTQIFQKAYEHEQHISESINNIVDHAIKSKDHATFNFLQWYVAEQHEEEVLFKDILDKIELIGNENHGLYLADQYVKGIAKSRKS

SEQ ID NO: 8940 - protein, 1315 aa, Artificial Sequence
  SARS-CoV-2/USA/WA8-UW5/2020__EPI_ISL_413486 spike protein (1-1147)(K986P_V987P_ H1048Q_H1064N_ H1083N_H1101N) Ferritin construct
MFVFLVLLPLVSSQCVNLTTRTQLPPAYTNSFTRGVYYPDKVFRSSVLHSTQDLFLPFFSNVTWFHAIHVSGTNGTKRFDNPVLPFNDGVYFASTEKSNIIRGWIFGTTLDSKTQSLLIVNNATNVVIKVCEFQFCNDPFLGVYYHKNNKSWMESEFRVYSSANNCTFEYVSQPFLMDLEGKQGNFKNLREFVFKNIDGYFKIYSKHTPINLVRDLPQGFSALEPLVDLPIGINITRFQTLLALHRSYLTPGDSSSGWTAGAAAYYVGYLQPRTFLLKYNENGTITDAVDCALDPLSETKCTLKSFTVEKGIYQTSNFRVQPTESIVRFPNITNLCPFGEVFNATRFASVYAWNRKRISNCVADYSVLYNSASFSTFKCYGVSPTKLNDLCFTNVYADSFVIRGDEVRQIAPGQTGKIADYNYKLPDDFTGCVIAWNSNNLDSKVGGNYNYLYRLFRKSNLKPFERDISTEIYQAGSTPCNGVEGFNCYFPLQSYGFQPTNGVGYQPYRVVVLSFELLHAPATVCGPKKSTNLVKNKCVNFNFNGLTGTGVLTESNKKFLPFQQFGRDIADTTDAVRDPQTLEILDITPCSFGGVSVITPGTNTSNQVAVLYQDVNCTEVPVAIHADQLTPTWRVYSTGSNVFQTRAGCLIGAEYVNNSYECDIPIGAGICASYQTQTNSPRRARSVASQSIIAYTMSLGAENSVAYSNNSIAIPTNFTISVTTEILPVSMTKTSVDCTMYICGDSTECSNLLLQYGSFCTQLNRALTGIAVEQDKNTQEVFAQVKQIYKTPPIKDFGGFNFSQILPDPSKPSKRSFIEDLLFNKVTLADAGFIKQYGDCLGDIAARDLICAQKFNGLTVLPPLLTDEMIAQYTSALLAGTITSGWTFGAGAALQIPFAMQMAYRFNGIGVTQNVLYENQKLIANQFNSAIGKIQDSLSSTASALGKLQDVVNQNAQALNTLVKQLSSNFGAISSVLNDILSRLDPPEAEVQIDRLITGRLQSLQTYVTQQLIRAAEIRASANLAATKMSECVLGQSKRVDFCGKGYQLMSFPQSAPHGVVFLNVTYVPAQEKNFTTAPAICNDGKAHFPREGVFVSNGTNWFVTQRNFYEPQIITTDNTFVSGNCDVVIGIVNNTVYDPLQPELDSGGGGSDIIKLLNEQVNKEMQSSNLYMSMSSWCYTHSLDGAGLFLFDHAAEEYEHAKKLIIFLNENNVPVQLTSISAPEHKFEGLTQIFQKAYEHEQHISESINNIVDHAIKSKDHATFNFLQWYVAEQHEEEVLFKDILDKIELIGNENHGLYLADQYVKGIAKSRKS

SEQ ID NO: 8941 - protein, 1315 aa, Artificial Sequence
  SARS-CoV-2/England/20102000506/2020__EPI_ISL_415147 spike protein (1-1147)(K986P_V987P_ H1048Q_H1064N_ H1083N_H1101N) Ferritin construct
MFVFLVLLPLVSSQCVNLTTRTQLPPAYTNSFTRGVYYPDKVFRSSVLHSTQDLFLPFFSNVTWFHAIHVSGTNGTKRFDNPVLPFNDGVYFASTEKSNIIRGWIFGTTLDSKTQSLLIVNNATNVVIKVCEFQFCNDPFLGVYYHKNNKSWMESEFRVYSSANNCTFEYVSQPFLMDLEGKQGNFKNLREFVFKNIDGYFKIYSKHTPINLVRDLPQGFSALEPLVDLPIGINITRFQTLLALHRSYLTPGDSSSGWTAGAAAYYVGYLQPRTFLLKYNENGTITDAVDCALDPLSETKCTLKSFTVEKGIYQTSNFRVQPTESIVRFPNITNLCPFGEVFNATRFASVYAWNRKRISNCVADYSVLYNSASFSTFKCYGVSPTKLNDLCFTNVYADSFVIRGDEVRQIAPGQTGKIADYNYKLPDDFTGCVIAWNSNNLDSKVGGNYNYLYRLFRKSNLKPFERDISTEIYQAGSTPCNGVEGFNCYFPLQSYGFQPTNGVGYQPYRVVVLSFELLHAPATVCGPKKSTNLVKNKCVNFNFNGLTGTGVLTESNKKFLPFQQFGRDIADTTDAVRDPQTLEILDITPCSFGGVSVITPGTNTSNQVAVLYQGVNCTEVPVAIHADQLTPTWRVYSTGSNVFQTRAGCLIGAEHVNNSYECDIPIGAGICASYQTQTNSPRRARSVASQSIIAYTMSLGAENSVAYSNNSIAIPTNFTISVTTEILPVSMTKTSVDCTMYICGDSTECSNLLLQYGSFCTQLNRALTGIAVEQDKNTQEVFAQVKQIYKTPPIKDFGGFNFSQILPDPSKPSKRSFIEDLLFNKVTLADAGFIKQYGYCLGDIAARDLICAQKFNGLTVLPPLLTDEMIAQYTSALLAGTITSGWTFGAGAALQIPFAMQMAYRFNGIGVTQNVLYENQKLIANQFNSAIGKIQDSLSSTASALGKLQDVVNQNAQALNTLVKQLSSNFGAISSVLNDILSRLDPPEAEVQIDRLITGRLQSLQTYVTQQLIRAAEIRASANLAATKMSECVLGQSKRVDFCGKGYQLMSFPQSAPHGVVFLNVTYVPAQEKNFTTAPAICNDGKAHFPREGVFVSNGTNWFVTQRNFYEPQIITTDNTFVSGNCDVVIGIVNNTVYDPLQPELDSGGGGSDIIKLLNEQVNKEMQSSNLYMSMSSWCYTHSLDGAGLFLFDHAAEEYEHAKKLIIFLNENNVPVQLTSISAPEHKFEGLTQIFQKAYEHEQHISESINNIVDHAIKSKDHATFNFLQWYVAEQHEEEVLFKDILDKIELIGNENHGLYLADQYVKGIAKSRKS

SEQ ID NO: 8942 - protein, 1315 aa, Artificial Sequence
  SARS-CoV-2/Belgium/VAG-03013/2020__EPI_ISL_415155 spike protein (1-1147)(K986P_V987P_ H1048Q_H1064N_ H1083N_H1101N) Ferritin construct
MFVFLVLLPLVSSQCVNLTTRTQLPPAYTNSFTRGVYYPDKVFRSSVLHSTQDLFLPFFSNVTWFHAIHVSGTNGTKRFDNPVLPFNDGVYFASTEKSNIIRGWIFGTTLDSKTQSLLIVNNATNVVIKVCEFQFCNDPFLGVYYHKNNKSWMESEFRVYSSANNCTFEYVSQPFLMDLEGKQGNFKNLREFVFKNIDGYFKIYSKHTPINLVRDLPQGFSALEPLVDLPIGINITRFQTLLALHRSYLTPGDSSSGWTAGAAAYYVGYLQPRTFLLKYNENGTITDAVDCALDPLSETKCTLKSFTVEKGIYQTSNFRVQPTESIVRFPNITNLCPFGEVFNATRFASVYAWNRKRISNCVADYSVLYNSASFSTFKCYGVSPTKLNDLCFTNVYADSFVIRGDEVRQIAPGQTGKIADYNYKLPDDFTGCVIAWNSNNLDSKVGGNYNYLYRLFRKSNLKPFERDISTEIYQAGSTPCNGVEGFNCYFPLQSYGFQPTNGVGYQPYRVVVLSFELLHAPATVCGPKKSTNLVKNKCVNFNFNGLTGTGVLTESNKKFLPFQQFGRDIADTTDAVRDPQTLEILDITPCSFGGVSVITPGTNTSNQVAVLYQGVNCTEVPVAIHADQLTPTWRVYSTGSNVFQTRAGCLIGAEHVNNSYECDIPIGAGICASYQTQTNSPRRARSVASQSIIAYTMSLGAENSVAYSNNSIAIPTNFTISVTTEILPVSMTKTSVDCTMYICGDSTECSNLLLQYGSFCTQLNRALTGIAVEQDKNTQEVFAQVKQIYKTPPIKDFGGFNFSQILPDPSKPSKRSFIEDLLFNKVTLADAGFIKQYGDCLGDIAARDLICAQKFNGLTVLPPLLTDEMIAQYTSALLAGTITSGWTFGAGAALQIPFAMQMAYRFNGIGVTQNVLYENQKLIANQFNSAIGKIQDSLSSTATALGKLQDVVNQNAQALNTLVKQLSSNFGAISSVLNDILSRLDPPEAEVQIDRLITGRLQSLQTYVTQQLIRAAEIRASANLAATKMSECVLGQSKRVDFCGKGYQLMSFPQSAPHGVVFLNVTYVPAQEKNFTTAPAICNDGKAHFPREGVFVSNGTNWFVTQRNFYEPQIITTDNTFVSGNCDVVIGIVNNTVYDPLQPELDSGGGGSDIIKLLNEQVNKEMQSSNLYMSMSSWCYTHSLDGAGLFLFDHAAEEYEHAKKLIIFLNENNVPVQLTSISAPEHKFEGLTQIFQKAYEHEQHISESINNIVDHAIKSKDHATFNFLQWYVAEQHEEEVLFKDILDKIELIGNENHGLYLADQYVKGIAKSRKS

SEQ ID NO: 8943 - protein, 1315 aa, Artificial Sequence
  SARS-CoV-2/Belgium/BC-03016/2020__EPI_ISL_415157 spike protein (1-1147)(K986P_V987P_ H1048Q_H1064N_ H1083N_H1101N) Ferritin construct
MFVFLVLLPLVSSQCVNLTTRTQLPPAYTNSFTRGVYYPDKVFRSSVLHSTQDLFLPFFSNVTWFHAIHVSGTNGTKRFDNPVLPFNDGVYFASTEKSNIIRGWIFGTTLDSKTQSLLIVNNATNVVIKVCEFQFCNDPFLGVYYHKNNKSWMESEFRVYSSANNCTFEYVSQPFLMDLEGKQGNFKNLREFVFKNIDGYFKIYSKHTPINLVRDLPQGFSALEPLVDLPIGINITRFQTLLALHRSYLTPGDSSSGWTAGAAAYYVGYLQPRTFLLKYNENGTITDAVDCALDPLSETKCTLKSFTVEKGIYQTSNFRVQPTESIVRFPNITNLCPFGEVFNATRFASVYAWNRKRISNCVADYSVLYNSASFSTFKCYGVSPTKLNDLCFTNVYADSFVIRGDEVRQIAPGQTGKIADYNYKLPDDFTGCVIAWNSNNLDSKVGGNYNYLYRLFRKSNLKPFERDISTEIYQAGSTPCNGVEGFNCYFPLQSYGFQPTNGVGYQPYRVVVLSFELLHAPATVCGPKKSTNLVKNKCVNFNFNGLTGTGVLTESNKKFLPFQQFGRDIADTTDAVRDPQTLEILDITPCSFGGVSVITPGTNTSNQVAVLYQGVNCTEVPVAIHADQLTPTWRVYSTGSNVFQTRAGCLIGAEHVNNSYECDIPIGAGICASYQTQTNSPRRARSVASQSIIAYTMSLGAENSVAYSNNSIAIPTNFTISVTTEILPVSMTKTSVDCTMYICGDSTECSNLLLQYGSFCTQLNRALTGIAVEQDKNTQEVFAQVKQIYKTPPIKDFGGFNFSQILPDPSKPSKRSFIEDLLFNKVTLADAGFIKQYGDCLGDIAARDLICAQKFNGLTVLPPLLTDEMIAQYTSALLAGTITSGWTFGAGAALQIPFAMQMAYRFNGIGVTQNVLYENQKLIANQFNSAIGKIQDSLSSTAPALGKLQDVVNQNAQALNTLVKQLSSNFGAISSVLNDILSRLDPPEAEVQIDRLITGRLQSLQTYVTQQLIRAAEIRASANLAATKMSECVLGQSKRVDFCGKGYQLMSFPQSAPHGVVFLNVTYVPAQEKNFTTAPAICNDGKAHFPREGVFVSNGTNWFVTQRNFYEPQIITTDNTFVSGNCDVVIGIVNNTVYDPLQPELDSGGGGSDIIKLLNEQVNKEMQSSNLYMSMSSWCYTHSLDGAGLFLFDHAAEEYEHAKKLIIFLNENNVPVQLTSISAPEHKFEGLTQIFQKAYEHEQHISESINNIVDHAIKSKDHATFNFLQWYVAEQHEEEVLFKDILDKIELIGNENHGLYLADQYVKGIAKSRKS

SEQ ID NO: 8944 - protein, 1315 aa, Artificial Sequence
  SARS-CoV-2/Germany/BavPat3/2020__EPI_ISL_414521 spike protein (1-1147)(K986P_V987P_ H1048Q_H1064N_ H1083N_H1101N) Ferritin construct
MFVFLVLLPLVSSQCVNLTTRTQLPPAYTNSFTRGVYYPDKVFRSSVLHSTQDLFLPFFSNVTWFHAIHVSGTNGTKRFDNPVLPFNDGVYFASTEKSNIIRGWIFGTTLDSKTQSLLIVNNATNVVIKVCEFQFCNDPFLGVYYHKNNKSWMESEFRVYSSANNCTFEYVSQPFLMDLEGKQGNFKNLREFVFKNIDGYFKIYSKHTPINLVRDLPQGFSALEPLVDLPIGINITRFQTLLALHRSYLTPGDSSSGWTAGAAAYYVGYLQPRTFLLKYNENGTITDAVDCALDPLSETKCTLKSFTVEKGIYQTSNFRVQPTESIVRFPNITNLCPFGEVFNATRFASVYAWNRKRISNCVADYSVLYNSASFSTFKCYGVSPTKLNDLCFTNVYADSFVIRGDEVRQIAPGQTGKIADYNYKLPDDFTGCVIAWNSNNLDSKVGGNYNYLYRLFRKSNLKPFERDISTEIYQAGSTPCNGVEGFNCYFPLQSYGFQPTNGVGYQPYRVVVLSFELLHAPATVCGPKKSTNLVKNKCVNFNFNGLTGTGVLTESNKKFLPFQQFGRDIADTTDAVRDPQTLEILDITPCSFGGVSVITPGTNTSNQVAVLYQDVNCTEVPVAIHADQLTPTWRVYSTGSNVFQTRAGCLIGAEHVNNSYECDIPIGAGICASYQTQTNSPRRARSVASQSIIAYTMSLGAENSVAYSNNSIAIPTNFTISVTTEILPVSMTKTSVDCTMYICGDSTECSNLLLQYGSFCTQLNRALTGIAVEQDKNTQQVFAQVKQIYKTPPIKDFGGFNFSQILPDPSKPSKRSFIEDLLFNKVTLADAGFIKQYGDCLGDIAARDLICAQKFNGLTVLPPLLTDEMIAQYTSALLAGTITSGWTFGAGAALQIPFAMQMAYRFNGIGVTQNVLYENQKLIANQFNSAIGKIQDSLSSTASALGKLQDVVNQNAQALNTLVKQLSSNFGAISSVLNDILSRLDPPEAEVQIDRLITGRLQSLQTYVTQQLIRAAEIRASANLAATKMSECVLGQSKRVDFCGKGYQLMSFPQSAPHGVVFLNVTYVPAQEKNFTTAPAICNDGKAHFPREGVFVSNGTNWFVTQRNFYEPQIITTDNTFVSGNCDVVIGIVNNTVYDPLQPELDSGGGGSDIIKLLNEQVNKEMQSSNLYMSMSSWCYTHSLDGAGLFLFDHAAEEYEHAKKLIIFLNENNVPVQLTSISAPEHKFEGLTQIFQKAYEHEQHISESINNIVDHAIKSKDHATFNFLQWYVAEQHEEEVLFKDILDKIELIGNENHGLYLADQYVKGIAKSRKS

SEQ ID NO: 8945 - protein, 1315 aa, Artificial Sequence
  SARS-CoV-2/France/HF1805/2020__EPI_ISL_414628 spike protein (1-1147)(K986P_V987P_ H1048Q_H1064N_ H1083N_H1101N) Ferritin construct
MFVFLVLLPLVSSQCVNLTTRTQLPPAYTNSFTRGVYYPDKVFRSSVLHSTQDLFLPFFSNVTWFHAIHVSGTNGTKRFDNPVLPFNDGVYFASTEKSNIIRGWIFGTTLDSKTQSLLIVNNATNVVIKVCEFQFCNDPFLGVYYHKNNKSWMESEFRVYSSANNCTFEYVSQPFLMDLEGKQGNFKNLREFVFKNIDGYFKIYSKHTPINLVRDLPQGFSALEPLVDLPIGINITRFQTLLALHRSYLTPGDSSSGWTAGAAAYYVGYLQPRTFLLKYNENGTITDAVDCALDPLSETKCTLKSFTVEKGIYQTSNFRVQPTESIVRFPNITNLCPFGEVFNATRFASVYAWNRKRISNCVADYSVLYNSASFSTFKCYGVSPTKLNDLCFTNVYADSFVIRGDEVRQIAPGQTGKIADYNYKLPDDFTGCVIAWNSNNLDSKVGGNYNYLYRLFRKSNLKPFERDISTEIYQAGSTPCNGVEGFNCYFPLQSYGFQPTNGVGYQPYRVVVLSFELLHAPATVCGPKKSTNLVKNKCVNFNFNGLTGTGVLTESNKKFLPFQQFGRDIADTTDAVRDPQTLEILDITPCSFGGVSVITPGTNTSNQVAVLYQGVNCTEVPVAIHADQLTPTWRVYSTGSNVFQTRAGCLIGAEHVNNSYECDIPIGAGICASYQTQTNSPRRARSVASQSIIAYTMSLGAENSVAYSNNSIAIPTNFTISVTTEILPVSMTKTSVDCTMYICGDSTECSNLLLQYGSFCTQLNRALTGIAVEQDKNTQEVFAQVKQIYKTPPIKDFGGFNFSQILPDPSKPSKRSFIEDLLFNKVTLADAGFIKQYGDCLGDIAARDLICAQKFNGLTVLPPLLTDEMIAQYTSALLAGTITSGWTFGAGAALQIPFAMQMAYRFNGIGVTQNVLYENQKLIANQFNSAIGKIQDSLSSTASALGKLQDVVNQNAQALNTLVKQLSSNFGAISSVLNDILSRLDPPEAEVQIDRLITGRLQSLQTYVTQQLIRAAEIRASANLAATKMSECVLGQSKRVDFCGKGYQLMSFPQSAPHGVVFLNVTYVPAQEKNFTTAPAICNDGKAHFPREGVFVSNGTNWFVTQRNFYEPQIITTDNTFVSGNCDVVIGVVNNTVYDPLQPELDSGGGGSDIIKLLNEQVNKEMQSSNLYMSMSSWCYTHSLDGAGLFLFDHAAEEYEHAKKLIIFLNENNVPVQLTSISAPEHKFEGLTQIFQKAYEHEQHISESINNIVDHAIKSKDHATFNFLQWYVAEQHEEEVLFKDILDKIELIGNENHGLYLADQYVKGIAKSRKS

SEQ ID NO: 8946 - protein, 1315 aa, Artificial Sequence
  SARS-CoV-2/Netherlands/ZuidHolland_9/2020__EPI_ISL_414445 spike protein (1-1147)(K986P_V987P_ H1048Q_H1064N_ H1083N_H1101N) Ferritin construct
MFVFLVLLPLVSSQCVNLTTRTQLPPAYTNSFTRGVYYPDKVFRSSVLHSTQDLFLPFFSNVTWFHAIHVSGTNGTKRFDNPVLPFNDGVYFASTEKSNIIRGWIFGTTLDSKTQSLLIVNNATNVVIKVCEFQFCNDPFLGVYYHKNNKSWMESEFRVYSSANNCTFEYVSQPFLMDLEGKQGNFKNLREFVFKNIDGYFKIYSKHTPINLVRDLPQGFSALEPLVDLPIGINITRFQTLLALHRSYLTPGDSSSGWTAGAAAYYVGYLQPRTFLLKYNENGTITDAVDCALDPLSETKCTLKSFTVEKGIYQTSNFRVQPTESIVRFPNITNLCPFGEVFNATRFASVYAWNRKRISNCVADYSVLYNSASFSTFKCYGVSPTKLNDLCFTNVYADSFVIRGDEVRQIAPGQTGKIADYNYKLPDDFTGCVIAWNSNNLDSKVGGNYNYLYRLFRKSNLKPFERDISTEIYQAGSTPCNGVEGFNCYFPLQSYGFQPTNGVGYQPYRVVVLSFELLHAPATVCGPKKSTNLVKNKCVNFNFNGLTGTGVLTESNKKFLPFQQFGRDIADTTDAVRDPQTLEILDITPCSFGGVSVITPGTNTSNQVAVLYQGVNCTEVPVAIHADQLTPTWRVYSTGSNVFQTRAGCLIGAEHVNNSYECDIPIGAGICASYQTQTNSPRRARSVASQSIIAYTMSLGAENSVAYSNNSIAIPTNFTISVTTEILPVSMTKTSVDCTMYICGDSTECSNLLLQYGSFCTQLNRALTGIAVEQDKNTQEVFAQVKQIYKTPPIKDFGGFNFSQILPDPSKPSKRSFIEDLLFNKVTLADAGFIKQYGDCLGDIAARDLICVQKFNGLTVLPPLLTDEMIAQYTSALLAGTITSGWTFGAGAALQIPFAMQMAYRFNGIGVTQNVLYENQKLIANQFNSAIGKIQDSLSSTASALGKLQDVVNQNAQALNTLVKQLSSNFGAISSVLNDILSRLDPPEAEVQIDRLITGRLQSLQTYVTQQLIRAAEIRASANLAATKMSECVLGQSKRVDFCGKGYQLMSFPQSAPHGVVFLNVTYVPAQEKNFTTAPAICNDGKAHFPREGVFVSNGTNWFVTQRNFYEPQIITTDNTFVSGNCDVVIGIVNNTVYDPLQPELDSGGGGSDIIKLLNEQVNKEMQSSNLYMSMSSWCYTHSLDGAGLFLFDHAAEEYEHAKKLIIFLNENNVPVQLTSISAPEHKFEGLTQIFQKAYEHEQHISESINNIVDHAIKSKDHATFNFLQWYVAEQHEEEVLFKDILDKIELIGNENHGLYLADQYVKGIAKSRKS

SEQ ID NO: 8947 - protein, 1315 aa, Artificial Sequence
  SARS-CoV-2/Finland/FIN03032020A/2020__EPI_ISL_413602 spike protein (1-1147)(K986P_V987P_ H1048Q_H1064N_ H1083N_H1101N) Ferritin construct
MFVFLVLLPLVSSQCVNLTTRTQLPPAYTNSFTRGVYYPDKVFRSSVLHSTQDLFLPFFSNVTWFHAIHVSGTNGTKRFDNPVLPFNDGVYFASTEKSNIIRGWIFGTTLDSKTQSLLIVNNATNVVIKVCEFQFCNDPFLGVYYHKNNKSWMESEFRVYSSANNCTFEYVSQPFLMDLEGKQGNFKNLREFVFKNIDGYFKIYSKHTPINLVRDLPQGFSALEPLVDLPIGINITRFQTLLALHRSYLTPGDSSSGWTAGAAAYYVGYLQPRTFLLKYNENGTITDAVDCALDPLSETKCTLKSFTVEKGIYQTSNFRVQPTESIVRFPNITNLCPFGEVFNATRFASVYAWNRKRISNCVADYSVLYNSASFSTFKCYGVSPTKLNDLCFTNVYADSFVIRGDEVRQIAPGQTGKIADYNYKLPDDFTGCVISWNSNNLDSKVGGNYNYLYRLFRKSNLKPFERDISTEIYQAGSTPCNGVEGFNCYFPLQSYGFQPTNGVGYQPYRVVVLSFELLHAPATVCGPKKSTNLVKNKCVNFNFNGLTGTGVLTESNKKFLPFQQFGRDIADTTDAVRDPQTLEILDITPCSFGGVSVITPGTNTSNQVAVLYQGVNCTEVPVAIHADQLTPTWRVYSTGSNVFQTRAGCLIGAEHVNNSYECDIPIGAGICASYQTQTNSPRRARSVASQSIIAYTMSLGAENSVAYSNNSIAIPTNFTISVTTEILPVSMTKTSVDCTMYICGDSTECSNLLLQYGSFCTQLNRALTGIAVEQDKNTQEVFAQVKQIYKTPPIKDFGGFNFSQILPDPSKPSKRSFIEDLLFNKVTLADAGFIKQYGDCLGDIAARDLICAQKFNGLTVLPPLLTDEMIAQYTSALLAGTITSGWTFGAGAALQIPFAMQMAYRFNGIGVTQNVLYENQKLIANQFNSAIGKIQDSLSSTASALGKLQDVVNQNAQALNTLVKQLSSNFGAISSVLNDILSRLDPPEAEVQIDRLITGRLQSLQTYVTQQLIRAAEIRASANLAATKMSECVLGQSKRVDFCGKGYQLMSFPQSAPHGVVFLNVTYVPAQEKNFTTAPAICNDGKAHFPREGVFVSNGTNWFVTQRNFYEPQIITTDNTFVSGNCDVVIGIVNNTVYDPLQPELDSGGGGSDIIKLLNEQVNKEMQSSNLYMSMSSWCYTHSLDGAGLFLFDHAAEEYEHAKKLIIFLNENNVPVQLTSISAPEHKFEGLTQIFQKAYEHEQHISESINNIVDHAIKSKDHATFNFLQWYVAEQHEEEVLFKDILDKIELIGNENHGLYLADQYVKGIAKSRKS

SEQ ID NO: 8948 - protein, 1315 aa, Artificial Sequence
  SARS-CoV-2/France/GE1977/2020__EPI_ISL_414632 spike protein (1-1147)(K986P_V987P_ H1048Q_H1064N_ H1083N_H1101N) Ferritin construct
MFVFLVLLPLVSSQCVNLTTRTQLPPAYTNSFTRGVYYPDKVFRSSVLHSTQDLFLPFFSNVTWFHAIHVSGTNGTKRFDNPVLPFNDGVYFASTEKSNIIRGWIFGTTLDSKTQSLLIVNNATNVVIKVCEFQFCNDPFLGVYYHKNNKSWMESEFRVYSSANNCTFEYVSQPFLMDLEGKQGNFKNLREFVFKNIDGYFKIYSKHTPINLVRDLPQGFSALEPLVDLPIGINITRFQTLLALHRSYLTPGDSSSGWTAGAAAYYVGYLQPRTFLLKYNENGTITDAVDCALDPLSETKCTLKSFTVEKGIYQTSNFRVQPTESIVRFPNITNLCPFGEVFNATRFASVYAWNRKRISNCVADYSVLYNSASFSTFKCYGVSPTKLNDLCFTNVYADSFVIRGDEVRQIAPGQTGKIADYNYKLPDDFTGCVIAWNSNNLDSKVGGNYNYLYRLFRKSNLKPFERDISTEIYQAGSTPCNGVEGFNCYFPLQSYGFQPTNGVGYQPYRVVVLSFELLHAPATVCGPKKSTNLVKNKCVNFNFNGLTGTGVLTESNKKFLPFQQFGRDIADTTDAVRDPQTLEILDITPCSFGGVSVITPGTNTSNQVAVLYQGVNCTEVPVAIHADQLTPTWRVYSTGSNVFQTRAGCLIGAEHVNNSYECDIPIGAGICASYQTQTNSPRRARSVASQSIIAYTMSLGAENSVAYSNNSIAIPTNFTISVTTEILPVSMTKTSVDCTMYICGDSTECSNLLLQYGSFCTQLNRALTGIAVEQDKNTQEVFAQVKQIYKTPPIKDFGGFNFSQILPDPSKPSKRSFIEDLLFNKVTLADAGFIKQYGDCLGDIAARDLICAQKFNGLTVLPPLLTDEMIAQYTSALLAGTITSGWTFGAGAALQIPFAMQMAYRFNGIGVTQNVLYENQKLIANQFNSAIGKIQDSLFSTASALGKLQDVVNQNAQALNTLVKQLSSNFGAISSVLNDILSRLDPPEAEVQIDRLITGRLQSLQTYVTQQLIRAAEIRASANLAATKMSECVLGQSKRVDFCGKGYQLMSFPQSAPHGVVFLNVTYVPAQEKNFTTAPAICNDGKAHFPREGVFVSNGTNWFVTQRNFYEPQIITTDNTFVSGNCDVVIGIVNNTVYDPLQPELDSGGGGSDIIKLLNEQVNKEMQSSNLYMSMSSWCYTHSLDGAGLFLFDHAAEEYEHAKKLIIFLNENNVPVQLTSISAPEHKFEGLTQIFQKAYEHEQHISESINNIVDHAIKSKDHATFNFLQWYVAEQHEEEVLFKDILDKIELIGNENHGLYLADQYVKGIAKSRKS

SEQ ID NO: 8949 - protein, 1315 aa, Artificial Sequence
  SARS-CoV-2/Finland/FIN-313/2020__EPI_ISL_414641 spike protein (1-1147)(K986P_V987P_ H1048Q_H1064N_ H1083N_H1101N) Ferritin construct
MFVFLVLLPLVSSQCVNLTTRTQLPPAYTNSFTRGVYYPDKVFRSSVLHSTQDLFLPFFSNVTWFHAIHVSGTNGTKRFDNPVLPFNDGVYFASTEKSNIIRGWIFGTTLDSKTQSLLIVNNATNVVIKVCEFQFCNDPFLGVYYHKNNKSWMESEFRVYSSANNCTFEYVSQPFLMDLEGKQGNFKNLREFVFKNIDGYFKIYSKHTPINLVRDLPQGFSALEPLVDLPIGINITRFKTLLALHRSYLTPGDSSSGWTAGAAAYYVGYLQPRTFLLKYNENGTITDAVDCALDPLSETKCTLKSFTVEKGIYQTSNFRVQPTESIVRFPNITNLCPFGEVFNATRFASVYAWNRKRISNCVADYSVLYNSASFSTFKCYGVSPTKLNDLCFTNVYADSFVIRGDEVRQIAPGQTGKIADYNYKLPDDFTGCVIAWNSNNLDSKVGGNYNYLYRLFRKSNLKPFERDISTEIYQAGSTPCNGVEGFNCYFPLQSYGFQPTNGVGYQPYRVVVLSFELLHAPATVCGPKKSTNLVKNKCVNFNFNGLTGTGVLTESNKKFLPFQQFGRDIADTTDAVRDPQTLEILDITPCSFGGVSVITPGTNTSNQVAVLYQGVNCTEVPVAIHADQLTPTWRVYSTGSNVFQTRAGCLIGAEHVNNSYECDIPIGAGICASYQTQTNSPRRARSVASQSIIAYTMSLGAENSVAYSNNSIAIPTNFTISVTTEILPVSMTKTSVDCTMYICGDSTECSNLLLQYGSFCTQLNRALTGIAVEQDKNTQEVFAQVKQIYKTPPIKDFGGFNFSQILPDPSKPSKRSFIEDLLFNKVTLADAGFIKQYGDCLGDIAARDLICAQKFNGLTVLPPLLTDEMIAQYTSALLAGTITSGWTFGAGAALQIPFAMQMAYRFNGIGVTQNVLYENQKLIANQFNSAIGKIQDSLSSTASALGKLQDVVNQNAQALNTLVKQLSSNFGAISSVLNDILSRLDPPEAEVQIDRLITGRLQSLQTYVTQQLIRAAEIRASANLAATKMSECVLGQSKRVDFCGKGYQLMSFPQSAPHGVVFLNVTYVPAQEKNFTTAPAICNDGKAHFPREGVFVSNGTNWFVTQRNFYEPQIITTDNTFVSGNCDVVIGIVNNTVYDPLQPELDSGGGGSDIIKLLNEQVNKEMQSSNLYMSMSSWCYTHSLDGAGLFLFDHAAEEYEHAKKLIIFLNENNVPVQLTSISAPEHKFEGLTQIFQKAYEHEQHISESINNIVDHAIKSKDHATFNFLQWYVAEQHEEEVLFKDILDKIELIGNENHGLYLADQYVKGIAKSRKS

SEQ ID NO: 8950 - protein, 1315 aa, Artificial Sequence
  SARS-CoV-2/Netherlands/ZuidHolland_2/2020__EPI_ISL_414556 spike protein (1-1147)(K986P_V987P_ H1048Q_H1064N_ H1083N_H1101N) Ferritin construct
MFVFLVLLPLVSSQCVNLTTRTQLPPAYTNSFTRGVYYPDKVFRSSVLHSTQDLFLPFFSNVTWFHAIHVSGTNGTKRFDNPVLPFNDGVYFASTEKSNIIRGWIFGTTLDSKTQSLLIVNNATNVVIKVCEFQFCNDPFLGVYYHKNNKSWMESEFRVYSSANNCTFEYVSQPFLMDLEGKQGNFKNLREFVFKNIDGYFKIYSKHTPINLVRDLPQGFSALEPLVDLPIGINITRFQTLLALHRSYLTPGDSSSGWTAGAAAYYVGYLQPRTFLLKYNENGTITDAVDCALDPLSETKCTLKSFTVEKGIYQTSNFRVQPTESIVRFPNITNLCPFGEVFNATRFASVYAWNRKRISNCVADYSVLYNSASFSTFKCYGVSPTKLNDLCFTNVYADSFVIRGDEVRQIAPGQTGKIADYNYKLPDDFTGCVIAWNSNNLDSKVGGNYNYLYRLFRKSNLKPFERDISTEIYQAGSTPCNGVEGFNCYFPLQSYGFQPTNGVGYQPYRVVVLSFELLHAPATVCGPKKSTNLVKNKCVNFNFNGLTGTGVLTESNKKFLPFQQFGRDIADTTDAVRDPQTLEILDITPCSFGGVSVITPGTNTSNQVAVLYQGVNCTEVPVAIHADQLTPTWRVYSTGSNVFQTRAGCLIGAEHVNNSYECDIPIGAGICASYQTQTNSPRRARSVASQSIIAYTMSLGAENSVAYSNNSIAIPTNFTISVTTEILPVSMTKTSVDCTMYICGDSTECSNLLLQYGSFCTQLNRALTGIALEQDKNTQEVFAQVKQIYKTPPIKDFGGFNFSQILPDPSKPSKRSFIEDLLFNKVTLADAGFIKQYGDCLGDIAARDLICAQKFNGLTVLPPLLTDEMIAQYTSALLAGTITSGWTFGAGAALQIPFAMQMAYRFNGIGVTQNVLYENQKLIANQFNSAIGKIQDSLSSTASALGKLQDVVNQNAQALNTLVKQLSSNFGAISSVLNDILSRLDPPEAEVQIDRLITGRLQSLQTYVTQQLIRAAEIRASANLAATKMSECVLGQSKRVDFCGKGYQLMSFPQSAPHGVVFLNVTYVPAQEKNFTTAPAICNDGKAHFPREGVFVSNGTNWFVTQRNFYEPQIITTDNTFVSGNCDVVIGIVNNTVYDPLQPELDSGGGGSDIIKLLNEQVNKEMQSSNLYMSMSSWCYTHSLDGAGLFLFDHAAEEYEHAKKLIIFLNENNVPVQLTSISAPEHKFEGLTQIFQKAYEHEQHISESINNIVDHAIKSKDHATFNFLQWYVAEQHEEEVLFKDILDKIELIGNENHGLYLADQYVKGIAKSRKS

SEQ ID NO: 8951 - protein, 1315 aa, Artificial Sequence
  SARS-CoV-2/USA/WA-UW31/2020__EPI_ISL_414618 spike protein (1-1147)(K986P_V987P_ H1048Q_H1064N_ H1083N_H1101N) Ferritin construct
MFVFLVLLPLVSSQCVNLTTRTQLPPAYTNSFTRGVYYPDKVFRSSVLHSTQDLFLPFFSNVTWFHAIHVSGTNGTKRFDNPVLPFNDGVYFASTEKSNIIRGWIFGTTLDSKTQSLLIVNNATNVVIKVCEFQFCNDPFLGVYYHKNNKSWMESEFRVYSSANNCTFEYVSQPFLMDLEGKQGNFKNLREFVFKNIDGYFKIYSKHTPINLVRDLPQGFSALEPLVDLPIGINITRFQTLLALHRSYLTPGDSSSGWTAGAAAYYVGYLQPRTFLLKYNENGTITDAVDCALDPLSETKCTLKSFTVEKGIYQTSNFRVQPTESIVRFPNITNLCPFGEVFNATRFASVYAWNRKRISNCVADYSVLYNSASFSTFKCYGVSPTKLNDLCFTNVYADSFVIRGDEVRQIAPGQTGKIADYNYKLPDDFTGCVIAWNSNNLDSKVGGNYNYLYRLFRKSNLKPFERDISTEIYQAGSTPCNGAEGFNCYFPLQSYGFQPTNGVGYQPYRVVVLSFELLHAPATVCGPKKSTNLVKNKCVNFNFNGLTGTGVLTESNKKFLPFQQFGRDIADTTDAVRDPQTLEILDITPCSFGGVSVITPGTNTSNQVAVLYQDVNCTEVPVAIHADQLTPTWRVYSTGSNVFQTRAGCLIGAEHVNNSYECDIPIGAGICASYQTQTNSPRRARSVASQSIIAYTMSLGAENSVAYSNNSIAIPTNFTISVTTEILPVSMTKTSVDCTMYICGDSTECSNLLLQYGSFCTQLNRALTGIAVEQDKNTQEVFAQVKQIYKTPPIKDFGGFNFSQILPDPSKPSKRSFIEDLLFNKVTLADAGFIKQYGDCLGDIAARDLICAQKFNGLTVLPPLLTDEMIAQYTSALLAGTITSGWTFGAGAALQIPFAMQMAYRFNGIGVTQNVLYENQKLIANQFNSAIGKIQDSLSSTASALGKLQDVVNQNAQALNTLVKQLSSNFGAISSVLNDILSRLDPPEAEVQIDRLITGRLQSLQTYVTQQLIRAAEIRASANLAATKMSECVLGQSKRVDFCGKGYQLMSFPQSAPHGVVFLNVTYVPAQEKNFTTAPAICNDGKAHFPREGVFVSNGTNWFVTQRNFYEPQIITTDNTFVSGNCDVVIGIVNNTVYDPLQPELDSGGGGSDIIKLLNEQVNKEMQSSNLYMSMSSWCYTHSLDGAGLFLFDHAAEEYEHAKKLIIFLNENNVPVQLTSISAPEHKFEGLTQIFQKAYEHEQHISESINNIVDHAIKSKDHATFNFLQWYVAEQHEEEVLFKDILDKIELIGNENHGLYLADQYVKGIAKSRKS

SEQ ID NO: 8952 - protein, 1315 aa, Artificial Sequence
  SARS-CoV-2/South Korea/SNU01/2020__EPI_ISL_411929 spike protein (1-1147)(K986P_V987P_ H1048Q_H1064N_ H1083N_H1101N) Ferritin construct
MFVFLVLLPLVSSQCVNLTTRTQLPPAYTNSFTRGVYYPDKVFRSSVLHSTQDLFLPFFSNVTWFHAIHVSGTNGTKRFDNPVLPFNDGVYFASTEKSNIIRGWIFGTTLDSKTQSLLIVNNATNVVIKVCEFQFCNDPFLGVYYHKNNKSWMESEFRVYSSANNCTFEYVSQPFLMDLEGKQGNFKNLREFVFKNIDGYFKIYSKHTPINLVRDLPQGFWALEPLVDLPIGINITRFQTLLALHRSYLTPGDSSSGWTAGAAAYYVGYLQPRTFLLKYNENGTITDAVDCALDPLSETKCTLKSFTVEKGIYQTSNFRVQPTESIVRFPNITNLCPFGEVFNATRFASVYAWNRKRISNCVADYSVLYNSASFSTFKCYGVSPTKLNDLCFTNVYADSFVIRGDEVRQIAPGQTGKIADYNYKLPDDFTGCVIAWNSNNLDSKVGGNYNYLYRLFRKSNLKPFERDISTEIYQAGSTPCNGVEGFNCYFPLQSYGFQPTNGVGYQPYRVVVLSFELLHAPATVCGPKKSTNLVKNKCVNFNFNGLTGTGVLTESNKKFLPFQQFGRDIADTTDAVRDPQTLEILDITPCSFGGVSVITPGTNTSNQVAVLYQDVNCTEVPVAIHADQLTPTWRVYSTGSNVFQTRAGCLIGAEHVNNSYECDIPIGAGICASYQTQTNSPRRARSVASQSIIAYTMSLGAENSVAYSNNSIAIPTNFTISVTTEILPVSMTKTSVDCTMYICGDSTECSNLLLQYGSFCTQLNRALTGIAVEQDKNTQEVFAQVKQIYKTPPIKDFGGFNFSQILPDPSKPSKRSFIEDLLFNKVTLADAGFIKQYGDCLGDIAARDLICAQKFNGLTVLPPLLTDEMIAQYTSALLAGTITSGWTFGAGAALQIPFAMQMAYRFNGIGVTQNVLYENQKLIANQFNSAIGKIQDSLSSTASALGKLQDVVNQNAQALNTLVKQLSSNFGAISSVLNDILSRLDPPEAEVQIDRLITGRLQSLQTYVTQQLIRAAEIRASANLAATKMSECVLGQSKRVDFCGKGYQLMSFPQSAPHGVVFLNVTYVPAQEKNFTTAPAICNDGKAHFPREGVFVSNGTNWFVTQRNFYEPQIITTDNTFVSGNCDVVIGIVNNTVYDPLQPELDSGGGGSDIIKLLNEQVNKEMQSSNLYMSMSSWCYTHSLDGAGLFLFDHAAEEYEHAKKLIIFLNENNVPVQLTSISAPEHKFEGLTQIFQKAYEHEQHISESINNIVDHAIKSKDHATFNFLQWYVAEQHEEEVLFKDILDKIELIGNENHGLYLADQYVKGIAKSRKS

SEQ ID NO: 8953 - protein, 1315 aa, Artificial Sequence
  SARS-CoV-2/China/WF0004/2020__EPI_ISL_413694 spike protein (1-1147)(K986P_V987P_ H1048Q_H1064N_ H1083N_H1101N) Ferritin construct
MFVFLVLLPLVSSQCVNLTTRTQLPPAYTNSFTRGVYYPDKVFRSSVLHSTQDLFLPFFSNVTWFHAIHVSGTNGTKRFDNPVLPFNDGVYFASTEKSNIIRGWIFGTTLDSKTQSLLIVNNATNVVIKVCEFQFCNDPFLGVYYHKNNKSWTESEFRVYSSANNCTFEYVSQPFLMDLEGKQGNFKNLREFVFKNIDGYFKIYSKHTPINLVRDLPQGFSALEPLVDLPIGINITRFQTLLALHRSYLTPGDSSSGWTAGAAAYYVGYLQPRTFLLKYNENGTITDAVDCALDPLSETKCTLKSFTVEKGIYQTSNFRVQPTESIVRFPNITNLCPFGEVFNATRFASVYAWNRKRISNCVADYSVLYNSASFSTFKCYGVSPTKLNDLCFTNVYADSFVIRGDEVRQIAPGQTGKIADYNYKLPDDFTGCVIAWNSNNLDSKVGGNYNYLYRLFRKSNLKPFERDISTEIYQAGSTPCNGVEGFNCYFPLQSYGFQPTNGVGYQPYRVVVLSFELLHAPATVCGPKKSTNLVKNKCVNFNFNGLTGTGVLTESNKKFLPFQQFGRDIADTTDAVRDPQTLEILDITPCSFGGVSVITPGTNTSNQVAVLYQDVNCTEVPVAIHADQLTPTWRVYSTGSNVFQTRAGCLIGAEHVNNSYECDIPIGAGICASYQTQTNSPRRARSVASQSIIAYTMSLGAENSVAYSNNSIAIPTNFTISVTTEILPVSMTKTSVDCTMYICGDSTECSNLLLQYGSFCTQLNRALTGIAVEQDKNTQEVFAQVKQIYKTPPIKDFGGFNFSQILPDPSKPSKRSFIEDLLFNKVTLADAGFIKQYGDCLGDIAARDLICAQKFNGLTVLPPLLTDEMIAQYTSALLAGTITSGWTFGAGAALQIPFAMQMAYRFNGIGVTQNVLYENQKLIANQFNSAIGKIQDSLSSTASALGKLQDVVNQNAQALNTLVKQLSSNFGAISSVLNDILSRLDPPEAEVQIDRLITGRLQSLQTYVTQQLIRAAEIRASANLAATKMSECVLGQSKRFDFCGKGYQLMSFPQSAPHGVVFLNVTYVPAQEKNFTTAPAICNDGKAHFPREGVFVSNGTNWFVTQRNFYEPQIITTDNTFVSGNCDVVIGIVNNTVYDPLQPELDSGGGGSDIIKLLNEQVNKEMQSSNLYMSMSSWCYTHSLDGAGLFLFDHAAEEYEHAKKLIIFLNENNVPVQLTSISAPEHKFEGLTQIFQKAYEHEQHISESINNIVDHAIKSKDHATFNFLQWYVAEQHEEEVLFKDILDKIELIGNENHGLYLADQYVKGIAKSRKS

SEQ ID NO: 8954 - protein, 1315 aa, Artificial Sequence
  SARS-CoV-2/China/WF0028/2020__EPI_ISL_413791 spike protein (1-1147)(K986P_V987P_ H1048Q_H1064N_ H1083N_H1101N) Ferritin construct
MFVFLVLLPLVSSQCVNLTTRTQLPPAYTNSFTRGVYYPDKVFRSSVLHSTQDLFLPFFSNVTWFHAIHVSGTNGTKRFDNPVLPFNDGVYFASTEKSNIIRGWIFGTTLDSKTQSLLIVNNATNVVIKVCEFQFCNDPFLGVYYHKNNKSWMESEFRVYSSANNCTFEYVSQPFLMDLEGKQGNFKNLREFVFKNIDGYFKIYSKHTPINLVRDLPQGFSALEPLVDLPIGINITRFQTLLALHRSYLTPGDSSSGWTAGAAAYYVGYLQPRTFLLKYNENGTITDAVDCALDPLSETKCTLKSFTVEKGIYQTSNFRVQPTESIVRFPNITNLCPFGEVFNATRFASVYAWNRKRISNCVADYSVLYNSASFSTFKCYGVSPTKLNDLCFTNVYADSFVIRGDEVRQIAPGQTGKIADYNYKLPDDFTGCVIAWNSNNLDSKVGGNYNYLYRLFRKSNLKPFERDISTEIYQAGSTPCNGVEGFNCYFPLQSYGFQPTNGVGYQPYRVVVLSFELLHAPATVCGPKKSTNLVKNKCVNFNFNGLTGTGVLTESNKKFLPFQQFGRDIADTTDAVRDPQTLEILDITPCSFGGVSVITPGTNTSNQVAVLYQDVNCTEVPVAIHADQLTPTWRVYSTGSNVFQTRAGCLIGAEHVNNSYECDIPIGAGICASYQTQTNSPRRARSVASQSIIAYTMSLGAENSVAYSNNSIAIPTNFTISVTTEILPVSMTKTSVDCTMYICGDSTECSNLLLQYGSFCTQLNRALTGIAVEQDKNTQEVFAQVKQIYKTPPIKDFGGFNFSQILPDPSKPSKRSFIEDLLFNKVTLADAGFIKQYGDCLGDIAARDLICAQKFNGLTVLPPLLTDEMIAQYTSALLAGTITSGWTFGAGAALQIPFAMQMAYRFNGIGVTQNVLYENQKLIANQFNSAIGKIQDSLSSTASALGKLQDVVNQNAQALNTLVKQLSSNFGAISSVLNDILSRLDPPEAEVQIDRLITGRLQSLQTYVTQQLIRAAEIRASANLAATKMSECVLGQSKRVDFCGKGYQLMSFPQSAPHGVVFLNVTYVPAQEKNFTTAPAICNDGKAHFPREGVFVSNGTNWFVTQRNFYEPQIITTDNTFVSGNCDVVIGIVNNTVYDPLQPELESGGGGSDIIKLLNEQVNKEMQSSNLYMSMSSWCYTHSLDGAGLFLFDHAAEEYEHAKKLIIFLNENNVPVQLTSISAPEHKFEGLTQIFQKAYEHEQHISESINNIVDHAIKSKDHATFNFLQWYVAEQHEEEVLFKDILDKIELIGNENHGLYLADQYVKGIAKSRKS

SEQ ID NO: 8955 - protein, 1315 aa, Artificial Sequence
  SARS-CoV-2/2019-nCoV/USA-CruiseA-18/2020__MT159716.1 spike protein (1-1147)(K986P_V987P_ H1048Q_H1064N_ H1083N_H1101N) Ferritin construct
MFVFLVLLPLVSSQCVNLTTRTQLPPAYTNSFTRGVYYPDKVFRSSVLHSTQDLFLPFFSNVTWFHAIHVSGTNGTKRFDNPVLPFNDGVYFASTEKSNIIRGWIFGTTLDSKTQSLLIVNNATNVVIKVCEFQFCNDPFLGVYYHKNNKSWMESELRVYSSANNCTFEYVSQPFLMDLEGKQGNFKNLREFVFKNIDGYFKIYSKHTPINLVRDLPQGFSALEPLVDLPIGINITRFQTLLALHRSYLTPGDSSSGWTAGAAAYYVGYLQPRTFLLKYNENGTITDAVDCALDPLSETKCTLKSFTVEKGIYQTSNFRVQPTESIVRFPNITNLCPFGEVFNATRFASVYAWNRKRISNCVADYSVLYNSASFSTFKCYGVSPTKLNDLCFTNVYADSFVIRGDEVRQIAPGQTGKIADYNYKLPDDFTGCVIAWNSNNLDSKVGGNYNYLYRLFRKSNLKPFERDISTEIYQAGSTPCNGVEGFNCYFPLQSYGFQPTNGVGYQPYRVVVLSFELLHAPATVCGPKKSTNLVKNKCVNFNFNGLTGTGVLTESNKKFLPFQQFGRDIADTTDAVRDPQTLEILDITPCSFGGVSVITPGTNTSNQVAVLYQDVNCTEVPVAIHADQLTPTWRVYSTGSNVFQTRAGCLIGAEHVNNSYECDIPIGAGICASYQTQTNSPRRARSVASQSIIAYTMSLGAENSVAYSNNSIAIPTNFTISVTTEILPVSMTKTSVDCTMYICGDSTECSNLLLQYGSFCTQLNRALTGIAVEQDKNTQEVFAQVKQIYKTPPIKDFGGFNFSQILPDPSKPSKRSFIEDLLFNKVTLADAGFIKQYGDCLGDIAARDLICAQKFNGLTVLPPLLTDEMIAQYTSALLAGTITSGWTFGAGAALQIPFAMQMAYRFNGIGVTQNVLYENQKLIANQFNSAIGKIQDSLSSTASALGKLQDVVNQNAQALNTLVKQLSSNFGAISSVLNDILSRLDPPEAEVQIDRLITGRLQSLQTYVTQQLIRAAEIRASANLAATKMSECVLGQSKRVDFCGKGYQLMSFPQSAPHGVVFLNVTYVPAQEKNFTTAPAICNDGKAHFPREGVFVSNGTNWFVTQRNFYEPQIITTDNTFVSGNCDVVIGIVNNTVYDPLQPELDSGGGGSDIIKLLNEQVNKEMQSSNLYMSMSSWCYTHSLDGAGLFLFDHAAEEYEHAKKLIIFLNENNVPVQLTSISAPEHKFEGLTQIFQKAYEHEQHISESINNIVDHAIKSKDHATFNFLQWYVAEQHEEEVLFKDILDKIELIGNENHGLYLADQYVKGIAKSRKS

SEQ ID NO: 8956 - protein, 1315 aa, Artificial Sequence
  SARS-CoV-2/SARS-CoV-2/Yunnan-01/human/2020/CHN__MT049951.1 spike protein (1-1147)(K986P_V987P_ H1048Q_H1064N_ H1083N_H1101N) Ferritin construct
MFVFLVLLPLVSSQCVNLTTRTQLPPANTNSFTRGVYYPDKVFRSSVLHSTQDLFLPFFSNVTWFHAIHVSGTNGTKRFDNPVLPFNDGVYFASTEKSNIIRGWIFGTTLDSKTQSLLIVNNATNVVIKVCEFQFCNDPFLGVYYHKNNKSWMESEFRVYSSANNCTFEYVSQPFLMDLEGKQGNFKNLREFVFKNIDGYFKIYSKHTPINLVRDLPQGFSALEPLVDLPIGINITRFQTLLALHRSYLTPGDSSSGWTAGAAAYYVGYLQPRTFLLKYNENGTITDAVDCALDPLSETKCTLKSFTVEKGIYQTSNFRVQPTESIVRFPNITNLCPFGEVFNATRFASVYAWNRKRISNCVADYSVLYNSASFSTFKCYGVSPTKLNDLCFTNVYADSFVIRGDEVRQIAPGQTGKIADYNYKLPDDFTGCVIAWNSNNLDSKVGGNYNYLYRLFRKSNLKPFERDISTEIYQAGSTPCNGVEGFNCYFPLQSYGFQPTNGVGYQPYRVVVLSFELLHAPATVCGPKKSTNLVKNKCVNFNFNGLTGTGVLTESNKKFLPFQQFGRDIADTTDAVRDPQTLEILDITPCSFGGVSVITPGTNTSNQVAVLYQDVNCTEVPVAIHADQLTPTWRVYSTGSNVFQTRAGCLIGAEHVNNSYECDIPIGAGICASYQTQTNSPRRARSVASQSIIAYTMSLGAENSVAYSNNSIAIPTNFTISVTTEILPVSMTKTSVDCTMYICGDSTECSNLLLQYGSFCTQLNRALTGIAVEQDKNTQEVFAQVKQIYKTPPIKDFGGFNFSQILPDPSKPSKRSFIEDLLFNKVTLADAGFIKQYGDCLGDIAARDLICAQKFNGLTVLPPLLTDEMIAQYTSALLAGTITSGWTFGAGAALQIPFAMQMAYRFNGIGVTQNVLYENQKLIANQFNSAIGKIQDSLSSTASALGKLQDVVNQNAQALNTLVKQLSSNFGAISSVLNDILSRLDPPEAEVQIDRLITGRLQSLQTYVTQQLIRAAEIRASANLAATKMSECVLGQSKRVDFCGKGYQLMSFPQSAPHGVVFLNVTYVPAQEKNFTTAPAICNDGKAHFPREGVFVSNGTNWFVTQRNFYEPQIITTDNTFVSGNCDVVIGIVNNTVYDPLQPELDSGGGGSDIIKLLNEQVNKEMQSSNLYMSMSSWCYTHSLDGAGLFLFDHAAEEYEHAKKLIIFLNENNVPVQLTSISAPEHKFEGLTQIFQKAYEHEQHISESINNIVDHAIKSKDHATFNFLQWYVAEQHEEEVLFKDILDKIELIGNENHGLYLADQYVKGIAKSRKS

SEQ ID NO: 8957 - protein, 1315 aa, Artificial Sequence
  SARS-CoV-2/USA/WA-UW292/2020__EPI_ISL_418077 spike protein (1-1147)(K986P_V987P_ H1048Q_H1064N_ H1083N_H1101N) Ferritin construct
MFVFLVLLPLVSSQCVNLTTRTQLPPAYTNSFTRGVYYPDKVFRSSVLHSTQDLFLPFFSNVTWFHAIHVSGTNGTKRFDNPVLPFNDGVYFASTEKSNIIRGWIFGTTLDSKTQSLLIVNNATNVVIKVCEFQFCNDPFLGVYYHKNNKSWMESEFRVYSSANNCTFEYVSQPFLMDLEGKQGNFKNLREFVFKNIDGYFKIYSKHTPINLVRDLPQGFSALEPLVDLPIGINITRFQTLLALHRSYLTPGDSSSGWTAGAAAYYVGYLQPRTFLLKYNENGTITDAVDCALDPLSETKCTLKSFTVEKGIYQTSNFRVQPTESIVRFPNITNLCPFGEVFNATRFASVYAWNRKRISNCVADYSVLYNSASFSTFKCYGVSPTKLNDLCFTNVYADSFVIRGDEVRQIAPGQTGKIADYNYKLPDDFTGCVIAWNSNNLDSKVGGNYNYLYRLFRKSNLKPFERDISTEIYQASSTPCNGVEGFNCYFPLQSYGFQPTNGVGYQPYRVVVLSFELLHAPATVCGPKKSTNLVKNKCVNFNFNGLTGTGVLTESNKKFLPFQQFGRDIADTTDAVRDPQTLEILDITPCSFGGVSVITPGTNTSNQVAVLYQDVNCTEVPVAIHADQLTPTWRVYSTGSNVFQTRAGCLIGAEHVNNSYECDIPIGAGICASYQTQTNSPRRARSVASQSIIAYTMSLGAENSVAYSNNSIAIPTNFTISVTTEILPVSMTKTSVDCTMYICGDSTECSNLLLQYGSFCTQLNRALTGIAVEQDKNTQEVFAQVKQIYKTPPIKDFGGFNFSQILPDPSKPSKRSFIEDLLFNKVTLADAGFIKQYGDCLGDIAARDLICAQKFNGLTVLPPLLTDEMIAQYTSALLAGTITSGWTFGAGAALQIPFAMQMAYRFNGIGVTQNVLYENQKLIANQFNSAIGKIQDSLSSTASALGKLQDVVNQNAQALNTLVKQLSSNFGAISSVLNDILSRLDPPEAEVQIDRLITGRLQSLQTYVTQQLIRAAEIRASANLAATKMSECVLGQSKRVDFCGKGYQLMSFPQSAPHGVVFLNVTYVPAQEKNFTTAPAICNDGKAHFPREGVFVSNGTNWFVTQRNFYEPQIITTDNTFVSGNCDVVIGIVNNTVYDPLQPELDSGGGGSDIIKLLNEQVNKEMQSSNLYMSMSSWCYTHSLDGAGLFLFDHAAEEYEHAKKLIIFLNENNVPVQLTSISAPEHKFEGLTQIFQKAYEHEQHISESINNIVDHAIKSKDHATFNFLQWYVAEQHEEEVLFKDILDKIELIGNENHGLYLADQYVKGIAKSRKS

SEQ ID NO: 8958 - protein, 1315 aa, Artificial Sequence
  SARS-CoV-2/Iceland/192/2020__EPI_ISL_417819 spike protein (1-1147)(K986P_V987P_ H1048Q_H1064N_ H1083N_H1101N) Ferritin construct
MFVFFVLLPLVSSQCVNLTTRTQLPPAYTNSFTRGVYYPDKVFRSSVLHSTQDLFLPFFSNVTWFHAIHVSGTNGTKRFDNPVLPFNDGVYFASTEKSNIIRGWIFGTTLDSKTQSLLIVNNATNVVIKVCEFQFCNDPFLGVYYHKNNKSWMESEFRVYSSANNCTFEYVSQPFLMDLEGKQGNFKNLREFVFKNIDGYFKIYSKHTPINLVRDLPQGFSALEPLVDLPIGINITRFQTLLALHRSYLTPGDSSSGWTAGAAAYYVGYLQPRTFLLKYNENGTITDAVDCALDPLSETKCTLKSFTVEKGIYQTSNFRVQPTESIVRFPNITNLCPFGEVFNATRFASVYAWNRKRISNCVADYSVLYNSASFSTFKCYGVSPTKLNDLCFTNVYADSFVIRGDEVRQIAPGQTGKIADYNYKLPDDFTGCVIAWNSNNLDSKVGGNYNYLYRLFRKSNLKPFERDISTEIYQAGSTPCNGVEGFNCYFPLQSYGFQPTNGVGYQPYRVVVLSFELLHAPATVCGPKKSTNLVKNKCVNFNFNGLTGTGVLTESNKKFLPFQQFGRDIADTTDAVRDPQTLEILDITPCSFGGVSVITPGTNTSNQVAVLYQGVNCTEVPVAIHADQLTPTWRVYSTGSNVFQTRAGCLIGAEHVNNSYECDIPIGAGICASYQTQTNSPRRARSVASQSIIAYTMSLGAENSVAYSNNSIAIPTNFTISVTTEILPVSMTKTSVDCTMYICGDSTECSNLLLQYGSFCTQLNRALTGIAVEQDKNTQEVFAQVKQIYKTPPIKDFGGFNFSQILPDPSKPSKRSFIEDLLFNKVTLADAGFIKQYGDCLGDIAARDLICAQKFNGLTVLPPLLTDEMIAQYTSALLAGTITSGWTFGAGAALQIPFAMQMAYRFNGIGVTQNVLYENQKLIANQFNSAIGKIQDSLSSTASALGKLQDVVNQNAQALNTLVKQLSSNFGAISSVLNDILSRLDPPEAEVQIDRLITGRLQSLQTYVTQQLIRAAEIRASANLAATKMSECVLGQSKRVDFCGKGYQLMSFPQSAPHGVVFLNVTYVPAQEKNFTTAPAICNDGKAHFPREGVFVSNGTNWFVTQRNFYEPQIITTDNTFVSGNCDVVIGIVNNTVYDPLQPELDSGGGGSDIIKLLNEQVNKEMQSSNLYMSMSSWCYTHSLDGAGLFLFDHAAEEYEHAKKLIIFLNENNVPVQLTSISAPEHKFEGLTQIFQKAYEHEQHISESINNIVDHAIKSKDHATFNFLQWYVAEQHEEEVLFKDILDKIELIGNENHGLYLADQYVKGIAKSRKS

SEQ ID NO: 8959 - protein, 1315 aa, Artificial Sequence
  SARS-CoV-2/Belgium/ULG-6939/2020__EPI_ISL_417020 spike protein (1-1147)(K986P_V987P_ H1048Q_H1064N_ H1083N_H1101N) Ferritin construct
MFVFLVLLPLVSSQCVNLTTRTQLPPAYTNSFTRGVYYPDKVFRSSVLHSTQDLFLPFFSNVTWFHAIHVSGTNGTKRFDNPVLPFNDGVYFASTEKSNIIRGWIFGTTLDSKTQSLLIVNNATNVVIKVCEFQFCNDPFLGVYYHKNNKSWMESEFRVYSSANNCTFEYVSQPFLMDLEGKQGNFKNLREFVFKNIDGYFKIYSKHTPINLVRDLPQGFSALEPLVDLPIGINITRFQTLLALHRSYLTPGDSSSGWTAGAAAYYVGYLQPRTFLLKYNENGTITDAVDCALDPLSETKCTLKSFTVEKGIYQTSNFRVQPTESIVRFPNITNLCPFGEVFNATRFASVYAWNRKRISNCVADYSVLYNSASFSTFKCYGVSPTKLNDLCFTNVYADSFVIRGDEVRQIAPGQTGKIADYNYKLPDDFTGCVIAWNSNNLDSKVGGNYNYLYRLFRKSNLKPFERDISTEIYQAGSTPCNGVEGFNCYFPLQSYGFQPTNGVGYQPYRVVVLSFELLHAPATVCGPKKSTNLVKNKCVNFNFNGLTGTGVLTESNKKFLPFQQFGRDIADTTDAVRDPQTLEILDITPCSFGGVSVITPGTNTSNQVAVLYQGVNCTEVPVAIHADQLTPTWRVYSTGSNVFQTRAGCLIGAEHVNNSYECDIPIGAGICASYQTQTNSPRRARSVASQSIIAYTMSLGAENSVVYSNNSIAIPTNFTISVTTEILPVSMTKTSVDCTMYICGDSTECSNLLLQYGSFCTQLNRALTGIAVEQDKNTQEVFAQVKQIYKTPPIKDFGGFNFSQILPDPSKPSKRSFIEDLLFNKVTLADAGFIKQYGDCLGDIAARDLICAQKFNGLTVLPPLLTDEMIAQYTSALLAGTITSGWTFGAGAALQIPFAMQMAYRFNGIGVTQNVLYENQKLIANQFNSAIGKIQDSLSSTASALGKLQDVVNQNAQALNTLVKQLSSNFGAISSVLNDILSRLDPPEAEVQIDRLITGRLQSLQTYVTQQLIRAAEIRASANLAATKMSECVLGQSKRVDFCGKGYQLMSFPQSAPHGVVFLNVTYVPAQEKNFTTAPAICNDGKAHFPREGVFVSNGTNWFVTQRNFYEPQIITTDNTFVSGNCDVVIGIVNNTVYDPLQPELDSGGGGSDIIKLLNEQVNKEMQSSNLYMSMSSWCYTHSLDGAGLFLFDHAAEEYEHAKKLIIFLNENNVPVQLTSISAPEHKFEGLTQIFQKAYEHEQHISESINNIVDHAIKSKDHATFNFLQWYVAEQHEEEVLFKDILDKIELIGNENHGLYLADQYVKGIAKSRKS

SEQ ID NO: 8960 - protein, 1315 aa, Artificial Sequence
  SARS-CoV-2/France/HF2496/2020__EPI_ISL_418231 spike protein (1-1147)(K986P_V987P_ H1048Q_H1064N_ H1083N_H1101N) Ferritin construct
MFVFLVLLPLVSSQCVNLTTRTQLPPAYTNSFTRGVYYPDKVFRSSVLHSTQDLFLPFFSNVTWFHAIHVSGTNGTKRFDNPVLPFNDGVYFASTEKSNIIRGWIFGTTLDSKTQSLLIVNNATNVVIKVCEFQFCNDPFLGVYYHKNNKSWMESEFRVYSSANNCTFEYVSQPFLMDLEGKQGNFKNLREFVFKNIDGYFKIYSKHTPINLVRDLPQGFSALEPLVDLPIGINITRFQTLLALHRSYLTPGDSSSGWTAGAAAYYVGYLQPRTFLLKYNENGTITDAVDCALDPLSETKCTLKSFTVEKGIYQTSNFRVQPTESIVRFPNITNLCPFGEVFNATRFASVYAWNRKRISNCVADYSVLYNSASFSTFKCYGVSPTKLNDLCFTNVYADSFVIRGDEVRQIAPGQTGKIADYNYKLPDDFTGCVIAWNSNNLDSKVGGNYNYLYRLFRKSNLKPFERDISTEIYQAGSTPCNGVEGFNCYFPLQSYGFQPTNGVGYQPYRVVVLSFELLHAPATVCGPKKSTNLVKNKCVNFNFNGLTGTGVLTESNKKFLPFQQFGRDIADTTDAVRDPQTLEILDITPCSFGGVSVITPGTNTSNQVAVLYQGVNCTEVPVAIHADQLTPTWRVYSTGSNVFQTRAGCLIGAEHVNNSYECDIPIGAGICASYQTQTNSPRRARSVASQSIIAYTMSLGAENSVAYSNNSIAIPTNFTISVTTEILPVSMTKTSVDCTMYICGDSTECSNLLLQYGSFCTQLNRALTGIAVEQDKNTQEVFAQVKQIYKTPPIKDFGGFNFSQILPDPSKPSKRSFIEDLLFNKVTLADAGFIKQYGDCLGDIVARDLICAQKFNGLTVLPPLLTDEMIAQYTSALLAGTITSGWTFGAGAALQIPFAMQMAYRFNGIGVTQNVLYENQKLIANQFNSAIGKIQDSLSSTASALGKLQDVVNQNAQALNTLVKQLSSNFGAISSVLNDILSRLDPPEAEVQIDRLITGRLQSLQTYVTQQLIRAAEIRASANLAATKMSECVLGQSKRVDFCGKGYQLMSFPQSAPHGVVFLNVTYVPAQEKNFTTAPAICNDGKAHFPREGVFVSNGTNWFVTQRNFYEPQIITTDNTFVSGNCDVVIGIVNNTVYDPLQPELDSGGGGSDIIKLLNEQVNKEMQSSNLYMSMSSWCYTHSLDGAGLFLFDHAAEEYEHAKKLIIFLNENNVPVQLTSISAPEHKFEGLTQIFQKAYEHEQHISESINNIVDHAIKSKDHATFNFLQWYVAEQHEEEVLFKDILDKIELIGNENHGLYLADQYVKGIAKSRKS

SEQ ID NO: 8961 - protein, 1315 aa, Artificial Sequence
  SARS-CoV-2/USA/WA-UW291/2020__EPI_ISL_418076 spike protein (1-1147)(K986P_V987P_ H1048Q_H1064N_ H1083N_H1101N) Ferritin construct
MFVFLVLLPLVSSQCVNLTTRTQLPPAYTNSFTRGVYYPDKVFRSSVLHSTQDLFLPFFSNVTWFHAIHVSGTNGTKRFDNPVLPFNDGVYFASTEKSNIIRGWIFGTTLDSKTQSLLIVNNATNVVIKVCEFQFCNDPFLGVYYHKNNKSWMESEFRVYSSANNCTFEYVSQPFLMDLEGKQGNFKNLREFVFKNIDGYFKIYSKHTPINLVRDLPQGFSALEPLVDLPIGINITRFQTLLALHRSYLTPGDSSSGWTAGAAAYYVGYLQPRTFLLKYNENGTITDAVDCALDPLSETKCTLKSFTVEKGIYQTSNFRVQPTESIVRFPNITNLCPFGEVFNATRFASVYAWNRKRISNCVADYSVLYNSASFSTFKCYGVSPTKLNDLCFTNVYADSFVIRGDEVRQIAPGQTGKIADYNYKLPDDFTGCVIAWNSNNLDSKVGGNYNYLYRLFRKSNLKPFERDISTEIYQAGSTPCNGVEGFNCYFPLQSYGFQPTNGVGYQPYRVVVLSFELLHAPATVCGPKKSTNLVKNKCVNFNFNGLTGTGVLTESNKKFLPFQQFGRDIADTTDAVRDPQTLEILDITPCSFGGVSVITPGTNTSNQVAVLYQGVNCTEVPVAIHADQLTPTWRVYSTGSNVFQTRAGCLIGAEHVNNSYECDIPIGAGICASYQTQTNSPRRARSVASQSIIAYTMSLGAENSVAYSNNSIAIPTNFTISVTTEILPVSMTKTSVDCTMYICGDSTECSNLLLQYGSFCTQLNRALTGIAVEQDKNTQEVFAQVKQIYKTPPIKDFGGFNFSQILPDPSKPSKRSFIEDLLFNKVTLADAGFIKQYGDCLGDIAARDLICAQKFNGLTVLPPLLTDEMIAQYTSALLAGTITSGWTFGAGAALQIPFAMQMAYRFNGIGVTQNVLYENQKLIANQFNSAIGKIQYSLSSTASALGKLQDVVNQNAQALNTLVKQLSSNFGAISSVLNDILSRLDPPEAEVQIDRLITGRLQSLQTYVTQQLIRAAEIRASANLAATKMSECVLGQSKRVDFCGKGYQLMSFPQSAPHGVVFLNVTYVPAQEKNFTTAPAICNDGKAHFPREGVFVSNGTNWFVTQRNFYEPQIITTDNTFVSGNCDVVIGIVNNTVYDPLQPELDSGGGGSDIIKLLNEQVNKEMQSSNLYMSMSSWCYTHSLDGAGLFLFDHAAEEYEHAKKLIIFLNENNVPVQLTSISAPEHKFEGLTQIFQKAYEHEQHISESINNIVDHAIKSKDHATFNFLQWYVAEQHEEEVLFKDILDKIELIGNENHGLYLADQYVKGIAKSRKS

SEQ ID NO: 8962 - protein, 1315 aa, Artificial Sequence; identical to SEQ ID NO: 8925
  SARS-CoV-2/Portugal/PT0034/2020__EPI_ISL_418019 spike protein (1-1147)(K986P_V987P_ H1048Q_H1064N_ H1083N_H1101N) Ferritin construct

SEQ ID NO: 8963 - protein, 1315 aa, Artificial Sequence; identical to SEQ ID NO: 8917
  SARS-CoV-2/Iceland/202/2020__EPI_ISL_417750 spike protein (1-1147)(K986P_V987P_ H1048Q_H1064N_ H1083N_H1101N) Ferritin construct

SEQ ID NO: 8964 - protein, 1315 aa, Artificial Sequence
  SARS-CoV-2/USA/WA-UW261/2020__EPI_ISL_418046 spike protein (1-1147)(K986P_V987P_ H1048Q_H1064N_ H1083N_H1101N) Ferritin construct
MFVFLVLLPLVSSQCVNLTTRTQLPPAYTNSFTRGVYYPDKVFRSSVLHSTQDLFLPFFSNVTWFHAIHVSGTNGTKRFDNPVLPFNDGVYFASTEKSNIIRGWIFGTTLDSKTQSLLIVNNATNVVIKVCEFQFCNDPFLGVYYHKNNKSWMESEFRVYSSANNCTFEYVSQPFLMDLEGKQGNFKNLREFVFKNIDGYFKIYSKHTPINLVRDLPQGFSALEPLVDLPIGINITRFQTLLALHRSYLTPGDSSSGWTAGAAAYYVGYLQPRTFLLKYNENGTITDAVDCALDPLSETKCTLKSFTVEKGIYQTSNFRVQPTESIVRFPNITNLCPFGEVFNATRFTSVYAWNRKRISNCVADYSVLYNSASFSTFKCYGVSPTKLNDLCFTNVYADSFVIRGDEVRQIAPGQTGKIADYNYKLPDDFTGCVIAWNSNNLDSKVGGNYNYLYRLFRKSNLKPFERDISTEIYQAGSTPCNGVEGFNCYFPLQSYGFQPTNGVGYQPYRVVVLSFELLHAPATVCGPKKSTNLVKNKCVNFNFNGLTGTGVLTESNKKFLPFQQFGRDIADTTDAVRDPQTLEILDITPCSFGGVSVITPGTNTSNQVAVLYQDVNCTEVPVAIHADQLTPTWRVYSTGSNVFQTRAGCLIGAEHVNNSYECDIPIGAGICASYQTQTNSPRRARSVASQSIIAYTMSLGAENSVAYSNNSIAIPTNFTISVTTEILPVSMTKTSVDCTMYICGDSTECSNLLLQYGSFCTQLNRALTGIAVEQDKNTQEVFAQVKQIYKTPPIKDFGGFNFSQILPDPSKPSKRSFIEDLLFNKVTLADAGFIKQYGDCLGDIAARDLICAQKFNGLTVLPPLLTDEMIAQYTSALLAGTITSGWTFGAGAALQIPFAMQMAYRFNGIGVTQNVLYENQKLIANQFNSAIGKIQDSLSSTASALGKLQDVVNQNAQALNTLVKQLSSNFGAISSVLNDILSRLDPPEAEVQIDRLITGRLQSLQTYVTQQLIRAAEIRASANLAATKMSECVLGQSKRVDFCGKGYQLMSFPQSAPHGVVFLNVTYVPAQEKNFTTAPAICNDGKAHFPREGVFVSNGTNWFVTQRNFYEPQIITTDNTFVSGNCDVVIGIVNNTVYDPLQPELDSGGGGSDIIKLLNEQVNKEMQSSNLYMSMSSWCYTHSLDGAGLFLFDHAAEEYEHAKKLIIFLNENNVPVQLTSISAPEHKFEGLTQIFQKAYEHEQHISESINNIVDHAIKSKDHATFNFLQWYVAEQHEEEVLFKDILDKIELIGNENHGLYLADQYVKGIAKSRKS

SEQ ID NO: 8965 - protein, 1315 aa, Artificial Sequence
  SARS-CoV-2/Portugal/PT0035/2020__EPI_ISL_418020 spike protein (1-1147)(K986P_V987P_ H1048Q_H1064N_ H1083N_H1101N) Ferritin construct
MFVFLVLLPLVSSQCVNLTTRTQLPPAYTNSFTRGVYYPDKVFRSSVLHSTQDLFLPFFSNVTWFHAIHVSGTNGTKRFDNPVLPFNDGVYFASTEKSNIIRGWIFGTTLDSKTQSLLIVNNATNVVIKVCEFQFCNDPFLGVYYHKNNKSWMESEFRVYSSANNCTFEYVSQPFLMDLEGKQGNFKNLREFVFKNIDGYFKIYSKHTPINLVRDLPQGFSALEPLVDLPIGINITRFQTLLALHRSYLTPGDSSSGWTAGAAAYYVGYLQPRTFLLKYNENGTITDAVDCALDPLSETKCTLKSFTVEKGIYQTSNFRVQPTESIVRFPNITNLCPFGEVFNATRFASVYAWNRKRISNCVADYSVLYNSASFSTFKCYGVSPTKLNDLCFTNVYADSFVIRGDEVRQIAPGQTGKIADYNYKLPDDFTGCVIAWNSNNLDSKVGGNYNYLYRLFRKSNLKPFERDISTEIYQAGSTPCNGVEGFNCYFPLQSYGFQPTNGVGYQPYRVVVLSFELLHAPATVCGPKKSTNLVKNKCVNFNFNGLTGTGVLTESNKKFLPFQQFGRDIADTTDAVRDPQTLEILDITPCSFGGVSVITPGTNTSNQVAVLYQDVNCTEVPVAIHADQLTPTWRVYSTGSNVFQTRAGCLIGAEHVNNSYECDIPIGAGICASYQTQTNSPRRARSVASQSIIAYTMSLGAENSVAYSNNSIAIPTNFTISVTTEILPVSMTKTSVDCTMYICGDSTECSNLLLQYGSFCTQLNRALTGIAVEQDKNTQEVFAQVKQIYKTPPIKDFGGFNFSQILPDPSKPSKRSFIEDLLFNKVTLADAGFIKQYGDCLGDISARDLICAQKFNGLTVLPPLLTDEMIAQYTSALLAGTITSGWTFGAGAALQIPFAMQMAYRFNGIGVTQNVLYENQKLIANQFNSAIGKIQDSLSSTASALGKLQDVVNQNAQALNTLVKQLSSNFGAISSVLNDILSRLDPPEAEVQIDRLITGRLQSLQTYVTQQLIRAAEIRASANLAATKMSECVLGQSKRVDFCGKGYQLMSFPQSAPHGVVFLNVTYVPAQEKNFTTAPAICNDGKAHFPREGVFVSNGTNWFVTQRNFYEPQIITTDNTFVSGNCDVVIGIVNNTVYDPLQPELDSGGGGSDIIKLLNEQVNKEMQSSNLYMSMSSWCYTHSLDGAGLFLFDHAAEEYEHAKKLIIFLNENNVPVQLTSISAPEHKFEGLTQIFQKAYEHEQHISESINNIVDHAIKSKDHATFNFLQWYVAEQHEEEVLFKDILDKIELIGNENHGLYLADQYVKGIAKSRKS

SEQ ID NO: 8966 - protein, 1315 aa, Artificial Sequence
  SARS-CoV-2/USA/NY-NYUMC7/2020__EPI_ISL_418192 spike protein (1-1147)(K986P_V987P_ H1048Q_H1064N_ H1083N_H1101N) Ferritin construct
MFVFLVLLPLVSSQCVNLTTRTQLPPAYTNSFTRGVYYPDKVFRSSVLHSTQDLFLPFFSNVTWFHAIHVSGTNGTKRFDNPVLPFNDGVYFASTEKSNIIRGWIFGTTLDSKTQSLLIVNNATNVVIKVCEFQFCNDPFLGVYHHKNNKSWMESEFRVYSSANNCTFEYVSQPFLMDLEGKQGNFKNLREFVFKNIDGYFKIYSKHTPINLVRDLPQGFSALEPLVDLPIGINITRFQTLLALHRSYLTPGDSSSGWTAGAAAYYVGYLQPRTFLLKYNENGTITDAVDCALDPLSETKCTLKSFTVEKGIYQTSNFRVQPTESIVRFPNITNLCPFGEVFNATRFASVYAWNRKRISNCVADYSVLYNSASFSTFKCYGVSPTKLNDLCFTNVYADSFVIRGDEVRQIAPGQTGKIADYNYKLPDDFTGCVIAWNSNNLDSKVGGNYNYLYRLFRKSNLKPFERDISTEIYQAGSTPCNGVEGFNCYFPLQSYGFQPTNGVGYQPYRVVVLSFELLHAPATVCGPKKSTNLVKNKCVNFNFNGLTGTGVLTESNKKFLPFQQFGRDIADTTDAVRDPQTLEILDITPCSFGGVSVITPGTNTSNQVAVLYQGVNCTEVPVAIHADQLTPTWRVYSTGSNVFQTRAGCLIGAEHVNNSYECDIPIGAGICASYQTQTNSPRRARSVASQSIIAYTMSLGAENSVAYSNNSIAIPTNFTISVTTEILPVSMTKTSVDCTMYICGDSTECSNLLLQYGSFCTQLNRALTGIAVEQDKNTQEVFAQVKQIYKTPPIKDFGGFNFSQILPDPSKPSKRSFIEDLLFNKVTLADAGFIKQYGDCLGDIAARDLICAQKFNGLTVLPPLLTDEMIAQYTSALLAGTITSGWTFGAGAALQIPFAMQMAYRFNGIGVTQNVLYENQKLIANQFNSAIGKIQDSLSSTASALGKLQDVVNQNAQALNTLVKQLSSNFGAISSVLNDILSRLDPPEAEVQIDRLITGRLQSLQTYVTQQLIRAAEIRASANLAATKMSECVLGQSKRVDFCGKGYQLMSFPQSAPHGVVFLNVTYVPAQEKNFTTAPAICNDGKAHFPREGVFVSNGTNWFVTQRNFYEPQIITTDNTFVSGNCDVVIGIVNNTVYDPLQPELDSGGGGSDIIKLLNEQVNKEMQSSNLYMSMSSWCYTHSLDGAGLFLFDHAAEEYEHAKKLIIFLNENNVPVQLTSISAPEHKFEGLTQIFQKAYEHEQHISESINNIVDHAIKSKDHATFNFLQWYVAEQHEEEVLFKDILDKIELIGNENHGLYLADQYVKGIAKSRKS

SEQ ID NO: 8967 - protein, 1315 aa, Artificial Sequence
  SARS-CoV-2/Iceland/189/2020__EPI_ISL_417709 spike protein (1-1147)(K986P_V987P_ H1048Q_H1064N_ H1083N_H1101N) Ferritin construct
MFVFLVLLPLVSSQCVNLTTRTQLPPAYTNSFTRGVYYPDKVFRSSVLHSTQDLFLPFFSNVTWFHAIHVSGTNGTKRFDNPVLPFNDGVYFASTEKSNIIRGWIFGTTLDSKTQSLLIVNNATNVVIKVCEFQFCNDPFLGVYYHKNNKSWMESEFRVYSSANNCTFEYVSQPFLMDLEGKQGNFKNLREFVFKNIDGYFKIYSKHTPINLVRDLPQGFSALEPLVDLPIGINITRFQTLLALHRSYLTPGDSSSGWTAGAAAYYVGYLQPRTFLLKYNENGTITDAVDCALDPLSETKCTLKSFTVEKGIYQTSNFRVQPTESIVRFPNITNLCPFGEVFNATRFASVYAWNRKRISNCVADYSVLYNSASFSTFKCYGVSPTKLNDLCFTNVYADSFVIRGDEVRQIAPGQTGKIADYNYKLPDDFTGCVIAWNSNNLDSKVGGNYNYLYRLFRKSNLKPFERDISTEIYQAGSTPCNGVEGFNCYFPLQSYGFQPTNGVGYQPYRVVVLSFELLHAPATVCGPKKSTNLVKNKCVNFNFNGLTGTGVLTESNKKFLPFQQFGRDIADTTDAVRDPQTLEILDITPCSFGGVSVITPGTNTSNQVAVLYQGVNCTEVPVAIHADQLTPTWRVYSTGSNVFQTRAGCLIGAEHVNNSYECDIPIGAGICASYQTQTNSPRRARSVASQSIIAYTMSLGAENSVAYSNNSIAIPTNFTISVTTEILPVSMTKTSVDCTMYICGDSTECSNLLLQYGSFCTQLNRALTGIAVEQDKNTQEVFAQVKQIYKTPPIKDFGGFNFSQILPDPSKPSKRSFIEDLLFNKVTLADAGFTKQYGDCLGDIAARDLICAQKFNGLTVLPPLLTDEMIAQYTSALLAGTITSGWTFGAGAALQIPFAMQMAYRFNGIGVTQNVLYENQKLIANQFNSAIGKIQDSLSSTASALGKLQDVVNQNAQALNTLVKQLSSNFGAISSVLNDILSRLDPPEAEVQIDRLITGRLQSLQTYVTQQLIRAAEIRASANLAATKMSECVLGQSKRVDFCGKGYQLMSFPQSAPHGVVFLNVTYVPAQEKNFTTAPAICNDGKAHFPREGVFVSNGTNWFVTQRNFYEPQIITTDNTFVSGNCDVVIGIVNNTVYDPLQPELDSGGGGSDIIKLLNEQVNKEMQSSNLYMSMSSWCYTHSLDGAGLFLFDHAAEEYEHAKKLIIFLNENNVPVQLTSISAPEHKFEGLTQIFQKAYEHEQHISESINNIVDHAIKSKDHATFNFLQWYVAEQHEEEVLFKDILDKIELIGNENHGLYLADQYVKGIAKSRKS

SEQ ID NO: 8968 - protein, 1315 aa, Artificial Sequence
  SARS-CoV-2/Australia/NSW56/2020__EPI_ISL_417408 spike protein (1-1147)(K986P_V987P_ H1048Q_H1064N_ H1083N_H1101N) Ferritin construct
MFVFLVLLPLVSSQCVNLTTRTQLPPAYTNSFTRGVYYPDKVFRSSVLHSTQDLFLPFFSNVTWFHAIHVSGTNGTKRFDNPVLPFNDGVYFASTEKSNIIRGWIFGTTLDSKTQSLLIVNNATNVVIKVCEFQFCNDPFLGVYYHKNNKSWMESEFRVYSSANNCTFEYVSQPFLMDLEGKQGNFKNLREFVFKNIDGYFKIYSKHTPINLVRDLPQGFSALEPLVDLPIGINITRFQTLLALHRSYLTPGDSSSGWTAGAAAYYVGYLQPRTFLLKYNENGTITDAVDCALDPLSETKCTLKSFTVEKGIYQTSNFRVQPTESIVRFPNITNLCPFGEVFNATRFASVYAWNRKRISNCVADYSVLYNSASFSTFKCYGVSPTKLNDLCFTNVYADSFVIRGDEVRQIAPGQTGKIADYNYKLPDDFTGCVIAWNSNNLDSKVGGNYNYLYRLFRKSNLKPFERDISTEIYQAGSTPCNGVEGFNCYFPLQSYGFQPTNGVGYQPYRVVVLSFELLHAPATVCGPKKSTNLVKNKCVNFNFNGLTGTGVLTESNKKFLPFQQFGRDIADTTDAVRDPQTLEILDITPCSFGGVSVITPGTNTSNQVAVLYQDVNCTEVPVAIHADQLTPTWRVYSTGSNVFQTRAGCLIGAEHVNNSYECDIPIGAGICASYQTQTNSPRRARSVASQSIIAYTMSLGAENSVAYSNNSIAIPTNFTISVTTEILPVSMTKTSVDCTMYICGDSTECSNLLLQYGSFCTQLNRALTGIAVEQDKNTQEVFAQVKQIYKTPPIKDFGGFNFSQILPDSSKPSKRSFIEDLLFNKVTLADAGFIKQYGDCLGDIAARDLICAQKFNGLTVLPPLLTDEMIAQYTSALLAGTITSGWTFGAGAALQIPFAMQMAYRFNGIGVTQNVLYENQKLIANQFNSAIGKIQDSLSSTASALGKLQDVVNQNAQALNTLVKQLSSNFGAISSVLNDILSRLDPPEAEVQIDRLITGRLQSLQTYVTQQLIRAAEIRASANLAATKMSECVLGQSKRVDFCGKGYQLMSFPQSAPHGVVFLNVTYVPAQEKNFTTAPAICNDGKAHFPREGVFVSNGTNWFVTQRNFYEPQIITTDNTFVSGNCDVVIGIVNNTVYDPLQPELDSGGGGSDIIKLLNEQVNKEMQSSNLYMSMSSWCYTHSLDGAGLFLFDHAAEEYEHAKKLIIFLNENNVPVQLTSISAPEHKFEGLTQIFQKAYEHEQHISESINNIVDHAIKSKDHATFNFLQWYVAEQHEEEVLFKDILDKIELIGNENHGLYLADQYVKGIAKSRKS

SEQ ID NO: 8969 - protein, 1315 aa, Artificial Sequence
  SARS-CoV-2/Iceland/280/2020__EPI_ISL_417608 spike protein (1-1147)(K986P_V987P_ H1048Q_H1064N_ H1083N_H1101N) Ferritin construct
MFVFLVLLPLVSSQCVNLTTRTQLPPAYTNSFTRGVYYPDKVFRSSVLHSTQDLFLPFFSNVTWFHAIHVSGTNGTKRFDNPVLPFNDGVYFASTEKSNIIRGWIFGTTLDSKTQSLLIVNNATNVVIKVCEFQFCNDPFLGVYYHKNNKSWMESEFRVYSSANNCTFEYVSQPFLMDLEGKQGNFKNLREFVFKNIDGYFKIYSKHTPINLVRDLPQGFSALEPLVDLPIGINITRFQTLLALHRSYLTPGDSSSGWTAGAAAYYVGYLQPRTFLLKYNENGTITDAVDCALDPLSETKCTLKSFTVEKGIYQTSNFRVQPTESIVRFPNITNLCPFGEVFNATRFASVYAWNRKRISNCVADYSVLYNSASFSTFKCYGVSPTKLNDLCFTNVYADSFVIRGDEVRQIAPGQTGKIADYNYKLPDDFTGCVIAWNSNNLDSKVGGNYNYLYRLFRKSNLKPFERDISTEIYQAGSTPCNGVEGFNCYFPLQSYGFQPTNGVGYQPYRVVVLSFELLHAPATVCGPKKSTNLVKNKCVNFNFNGLTGTGVLTESNKKFLPFQQFGRDIADTTDAVRDPQTLEILDITPCSFGGVSVITPGTNTSNQVAVLYQGVNCTEVPVAIHADQLTPTWRVYSTGSNVFQTRAGCLIGAEHVNNSYECDIPIGAGICASYHTQTNSPRRARSVASQSIIAYTMSLGAENSVAYSNNSIAIPTNFTISVTTEILPVSMTKTSVDCTMYICGDSTECSNLLLQYGSFCTQLNRALTGIAVEQDKNTQEVFAQVKQIYKTPPIKDFGGFNFSQILPDPSKPSKRSFIEDLLFNKVTLADAGFIKQYGDCLGDIAARDLICAQKFNGLTVLPPLLTDEMIAQYTSALLAGTITSGWTFGAGAALQIPFAMQMAYRFNGIGVTQNVLYENQKLIANQFNSAIGKIQDSLSSTASALGKLQDVVNQNAQALNTLVKQLSSNFGAISSVLNDILSRLDPPEAEVQIDRLITGRLQSLQTYVTQQLIRAAEIRASANLAATKMSECVLGQSKRVDFCGKGYQLMSFPQSAPHGVVFLNVTYVPAQEKNFTTAPAICNDGKAHFPREGVFVSNGTNWFVTQRNFYEPQIITTDNTFVSGNCDVVIGIVNNTVYDPLQPELDSGGGGSDIIKLLNEQVNKEMQSSNLYMSMSSWCYTHSLDGAGLFLFDHAAEEYEHAKKLIIFLNENNVPVQLTSISAPEHKFEGLTQIFQKAYEHEQHISESINNIVDHAIKSKDHATFNFLQWYVAEQHEEEVLFKDILDKIELIGNENHGLYLADQYVKGIAKSRKS

SEQ ID NO: 8970 - protein, 1315 aa, Artificial Sequence; identical to SEQ ID NO: 8925
  SARS-CoV-2/Iceland/247/2020__EPI_ISL_417575 spike protein (1-1147)(K986P_V987P_ H1048Q_H1064N_ H1083N_H1101N) Ferritin construct

SEQ ID NO: 8971 - protein, 1315 aa, Artificial Sequence
  SARS-CoV-2/Iceland/238/2020__EPI_ISL_417566 spike protein (1-1147)(K986P_V987P_ H1048Q_H1064N_ H1083N_H1101N) Ferritin construct
MFVFLVLLPLVSSQCVNLTTRTQLPPAYTNSFTRGVYYPDKVFRSSVLHSTQDLFLPFFSNVTWFHAIHVSGTNGTKRFDNPVLPFNDGVYFASTEKSNIIRGWIFGTTLDSKTQSLLIVNNATNVVIKVCEFQFCNDPFLGVYYHKNNKSWMESEFRVYSSANNCTFEYVSQPFLMDLEGKQGNFKNLREFVFKNIDGYFKIYSKHTPINLVRDLPQGFSALEPLVDLPIGINITRFQTLLALHRSYLTPGDSSSGWTAGAAAYYVGYLQPRTFLLKYNENGTITDAVDCALDPLSETKCTLKSFTVEKGIYQTSNFRVQPTESIVRFPNITNLCPFGEVFNATRFASVYAWNRKRISNCVADYSVLYNSASFSTFKCYGVSPTKLNDLCFTNVYADSFVIRGDEVRQIAPGQTGKIADYNYKLPDDFTGCVIAWNSNNLDSKVGGNYNYLYRLFRKSNLKPFERDISTEIYQAGSTPCNGVEGFNCYFPLQSYGFQPTNGVGYQPYRVVVLSFELLHAPATVCGPKKSTNLVKNKCVNFNFNGLTGTGVLTESNKKFLPFQQFGRDIADTTDAVRDPQTLEILDITPCSFGGVSVITPGTNTSNQVAVLYQGVNCTEVPVAIHADQLTPTWRVYSTGSNVFQTRAGCLIGAEHVNNSYECDIPIGAGICASYQTQTNSPRRARSVASQSIIAYTMSLGAENSVAYSNNSIAIPTNFTISVTTEILPVSMTKTSVDCTMYICGDSTECSNLLLQYGSFCTQLNRALTGIAVEQDKNTQEVFAQVKQIYKTPPIKDFGGFNFSQILPDPSKPSKRSFIEDLLFNKVTLADVGFIKQYGDCLGDIAARDLICAQKFNGLTVLPPLLTDEMIAQYTSALLAGTITSGWTFGAGAALQIPFAMQMAYRFNGIGVTQNVLYENQKLIANQFNSAIGKIQDSLSSTASALGKLQDVVNQNAQALNTLVKQLSSNFGAISSVLNDILSRLDPPEAEVQIDRLITGRLQSLQTYVTQQLIRAAEIRASANLAATKMSECVLGQSKRVDFCGKGYQLMSFPQSAPHGVVFLNVTYVPAQEKNFTTAPAICNDGKAHFPREGVFVSNGTNWFVTQRNFYEPQIITTDNTFVSGNCDVVIGIVNNTVYDPLQPELDSGGGGSDIIKLLNEQVNKEMQSSNLYMSMSSWCYTHSLDGAGLFLFDHAAEEYEHAKKLIIFLNENNVPVQLTSISAPEHKFEGLTQIFQKAYEHEQHISESINNIVDHAIKSKDHATFNFLQWYVAEQHEEEVLFKDILDKIELIGNENHGLYLADQYVKGIAKSRKS

SEQ ID NO: 8972 - protein, 1315 aa, Artificial Sequence
  SARS-CoV-2/Greece/16/2020__EPI_ISL_418265 spike protein (1-1147)(K986P_V987P_ H1048Q_H1064N_ H1083N_H1101N) Ferritin construct
MFVFLVLLPLVSSQCVNLTTRTQLPPAYTNSFTRGVYYPDKVFRSSVLHSTQDLFLPFFSNVTWFHAIHVSGTNGTKRFDNPVLPFNDGVYFASTEKSNIIRGWIFGTTLDSKTQSLLIVNNATNVVIKVCEFQFCNDPFLGVYYHKNNKSWMESEFRVYSSANNCTFEYVSQPFLMDLEGKQGNFKNLREFVFKNVDGYFKIYSKHTPINLVRDLPQGFSALEPLVDLPIGINITRFQTLLALHRSYLTPGDSSSGWTAGAAAYYVGYLQPRTFLLKYNENGTITDAVDCALDPLSETKCTLKSFTVEKGIYQTSNFRVQPTESIVRFPNITNLCPFGEVFNATRFASVYAWNRKRISNCVADYSVLYNSASFSTFKCYGVSPTKLNDLCFTNVYADSFVIRGDEVRQIAPGQTGKIADYNYKLPDDFTGCVIAWNSNNLDSKVGGNYNYLYRLFRKSNLKPFERDISTEIYQAGSTPCNGVEGFNCYFPLQSYGFQPTNGVGYQPYRVVVLSFELLHAPATVCGPKKSTNLVKNKCVNFNFNGLTGTGVLTESNKKFLPFQQFGRDIADTTDAVRDPQTLEILDITPCSFGGVSVITPGTNTSNQVAVLYQDVNCTEVPVAIHADQLTPTWRVYSTGSNVFQTRAGCLIGAEHVNNSYECDIPIGAGICASYQTQTNSPRRARSVASQSIIAYTMSLGAENSVAYSNNSIAIPTNFTISVTTEILPVSMTKTSVDCTMYICGDSTECSNLLLQYGSFCTQLNRALTGIAVEQDKNTQEVFAQVKQIYKTPPIKDFGGFNFSQILPDPSKPSKRSFIEDLLFNKVTLADAGFIKQYGDCLGDIAARDLICAQKFNGLTVLPPLLTDEMIAQYTSALLAGTITSGWTFGAGAALQIPFAMQMAYRFNGIGVTQNVLYENQKLIANQFNSAIGKIQDSLSSTASALGKLQDVVNQNAQALNTLVKQLSSNFGAISSVLNDILSRLDPPEAEVQIDRLITGRLQSLQTYVTQQLIRAAEIRASANLAATKMSECVLGQSKRVDFCGKGYQLMSFPQSAPHGVVFLNVTYVPAQEKNFTTAPAICNDGKAHFPREGVFVSNGTNWFVTQRNFYEPQIITTDNTFVSGNCDVVIGIVNNTVYDPLQPELDSGGGGSDIIKLLNEQVNKEMQSSNLYMSMSSWCYTHSLDGAGLFLFDHAAEEYEHAKKLIIFLNENNVPVQLTSISAPEHKFEGLTQIFQKAYEHEQHISESINNIVDHAIKSKDHATFNFLQWYVAEQHEEEVLFKDILDKIELIGNENHGLYLADQYVKGIAKSRKS

SEQ ID NO: 8973 - protein, 1315 aa, Artificial Sequence
  SARS-CoV-2/Iceland/319/2020__EPI_ISL_417648 spike protein (1-1147)(K986P_V987P_ H1048Q_H1064N_ H1083N_H1101N) Ferritin construct
MFVFLVLLPLVSSQCVNLTTRTQLPPAYTNSFTRGVYYPDKVFRSSVLHSTQDLFLPFFSNVTWFHAIHVSGTNGTKRFDNPVLPFNDGVYFASTEKSNIIRGWIFGTTLDSKTQSLLIVNNATNVVIKVCEFQFCNDPFLGVYYHKNNKSWMESEFRVYSSANNCTFEYVSQPFLIDLEGKQGNFKNLREFVFKNIDGYFKIYSKHTPINLVRDLPQGFSALEPLVDLPIGINITRFQTLLALHRSYLTPGDSSSGWTAGAAAYYVGYLQPRTFLLKYNENGTITDAVDCALDPLSETKCTLKSFTVEKGIYQTSNFRVQPTESIVRFPNITNLCPFGEVFNATRFASVYAWNRKRISNCVADYSVLYNSASFSTFKCYGVSPTKLNDLCFTNVYADSFVIRGDEVRQIAPGQTGKIADYNYKLPDDFTGCVIAWNSNNLDSKVGGNYNYLYRLFRKSNLKPFERDISTEIYQAGSTPCNGVEGFNCYFPLQSYGFQPTNGVGYQPYRVVVLSFELLHAPATVCGPKKSTNLVKNKCVNFNFNGLTGTGVLTESNKKFLPFQQFGRDIADTTDAVRDPQTLEILDITPCSFGGVSVITPGTNTSNQVAVLYQGVNCTEVPVAIHADQLTPTWRVYSTGSNVFQTRAGCLIGAEHVNNSYECDIPIGAGICASYQTQTNSPRRARSVASQSIIAYTMSLGAENSVAYSNNSIAIPTNFTISVTTEILPVSMTKTSVDCTMYICGDSTECSNLLLQYGSFCTQLNRALTGIAVEQDKNTQEVFAQVKQIYKTPPIKDFGGFNFSQILPDPSKPSKRSFIEDLLFNKVTLADAGFIKQYGDCLGDIAARDLICAQKFNGLTVLPPLLTDEMIAQYTSALLAGTITSGWTFGAGAALQIPFAMQMAYRFNGIGVTQNVLYENQKLIANQFNSAIGKIQDSLSSTASALGKLQDVVNQNAQALNTLVKQLSSNFGAISSVLNDILSRLDPPEAEVQIDRLITGRLQSLQTYVTQQLIRAAEIRASANLAATKMSECVLGQSKRVDFCGKGYQLMSFPQSAPHGVVFLNVTYVPAQEKNFTTAPAICNDGKAHFPREGVFVSNGTNWFVTQRNFYEPQIITTDNTFVSGNCDVVIGIVNNTVYDPLQPELDSGGGGSDIIKLLNEQVNKEMQSSNLYMSMSSWCYTHSLDGAGLFLFDHAAEEYEHAKKLIIFLNENNVPVQLTSISAPEHKFEGLTQIFQKAYEHEQHISESINNIVDHAIKSKDHATFNFLQWYVAEQHEEEVLFKDILDKIELIGNENHGLYLADQYVKGIAKSRKS

SEQ ID NO: 8974 - protein, 1315 aa, Artificial Sequence
  SARS-CoV-2/Congo/94/2020__EPI_ISL_417947 spike protein (1-1147)(K986P_V987P_ H1048Q_H1064N_ H1083N_H1101N) Ferritin construct
MFVFLVLLPLVSSQCVNLTTRTQLPPAYTNSFTRGVYYPDKVFRSSVLHSTQDLFLPFFSNVTWFHAIHVSGTNGTKRFDNPVLPFNDGVYFASTEKSNIIRGWIFGTTLDSKTQSLLIVNNATNVVIKVCEFQFCNDPFLGVYYHKNNKSWMESEFRVYSSANNCTFEYVSQPFLMDLEGKQGNFKNLREFVFKNIDGYFKIYSKHTPINLVRDLPQGFSALEPLVDLPIGINITRFQTLLALHRSYLTPGDSSSGWTAGAAAYYVGYLQPRTFLLKYNENGTITDAVDCALDPLSETKCTLKSFTVEKGIYQTSNFRVQPTESIVRFPNITNLCPFGEVFNATRFASVYAWNRKRISNCVADYSVLYNSASFSTFKCYGVSPTKLNDLCFTNVYADSFVIRGDEVRQIAPGQTGKIADYNYKLPDDFTGCVIAWNSNNLDSKVGGNYNYLYRLFRKSNLKPFERDISTEIYQAGSTPCNGVEGFNCYFPLQSYGFQPTNGVGYQPYRVVVLSFELLHAPATVCGPKKSTNLVKNKCVNFNFNGLTGTGVLTESNKKFLPFQQFGRDIADTTDAVRDPQTLEILDITPCSFGGVSVITPGTNTSNQVAVLYQGVNCTEVPVAIHADQLTPTWRVYSTGSNVFQTRAGCLIGAEHVNNSYECDIPIGAGICASYQTQTNSPRRARSVASQSIIAYTMSLGAENSVAYSNNSIAIPTNFTISVTTEILPVSMTKTSVDCTMYICGDSTECSNLLLQYGSFCTQLNRALTGIAVEQDKNTQEVFAQVKQIYKTPPIKDFGGFNFSQILPDPSKPSKRSFIEDILFNKVTLADAGFIKQYGDCLGDIAARDLICAQKFNGLTVLPPLLTDEMIAQYTSALLAGTITSGWTFGAGAALQIPFAMQMAYRFNGIGVTQNVLYENQKLIANQFNSAIGKIQDSLSSTASALGKLQDVVNQNAQALNTLVKQLSSNFGAISSVLNDILSRLDPPEAEVQIDRLITGRLQSLQTYVTQQLIRAAEIRASANLAATKMSECVLGQSKRVDFCGKGYQLMSFPQSAPHGVVFLNVTYVPAQEKNFTTAPAICNDGKAHFPREGVFVSNGTNWFVTQRNFYEPQIITTDNTFVSGNCDVVIGIVNNTVYDPLQPELDSGGGGSDIIKLLNEQVNKEMQSSNLYMSMSSWCYTHSLDGAGLFLFDHAAEEYEHAKKLIIFLNENNVPVQLTSISAPEHKFEGLTQIFQKAYEHEQHISESINNIVDHAIKSKDHATFNFLQWYVAEQHEEEVLFKDILDKIELIGNENHGLYLADQYVKGIAKSRKS

SEQ ID NO: 8975 - protein, 1315 aa, Artificial Sequence
  SARS-CoV-2/Congo/158/2020__EPI_ISL_417950 spike protein (1-1147)(K986P_V987P_ H1048Q_H1064N_ H1083N_H1101N) Ferritin construct
MFVFLVLLPLVSSQCVNLTTRTQLPPAYTNSFTRGVYYPDKVFRSSVLHSTQDLFLPFFSNVTWFHAIHVSGTNGTKRFDNPVLPFNDGVYFASTEKSNIIRGWIFGTTLDSKTQSLLIVNNATNVVIKVCEFQFCNDPFLGVYYHKNNKSWMESEFRVYSSANNCTFEYVSQPFLMDLEGKQGNFKNLREFVFKNIDGYFKIYSKHTPINLVRDLPQGFSALEPLVDLPIGINITRFQTLLALHRSYLTPGDSSSGWTAGAAAYYVGYLQPRTFLLKYNENGTITDAVDCALDPLSETKCTLKSFTVEKGIYQTSNFRVQPTESIVRFPNITNLCPFGEVFNATRFASVYAWNRKRISNCVADYSVLYNSASFSTFKCYGVSPTKLNDLCFTNVYADSFVIRGDEVRQIAPGQTGKIADYNYKLPDDFTGCVIAWNSNNLDSKVGGNYNYLYRLFRKSNLKPFERDISTEIYQAGSTPCNGVEGFNCYFPLQSYGFQPTNGVGYQPYRVVVLSFELLHAPATVCGPKKSTNLVKNKCVNFNFNGLTGTGVLTESNKKFLPFQQFGRDIADTTDAVRDPQTLEILDITPCSFGGVSVITPGTNTSNQVAVLYQDVNCTEVPVAIHADQLTPTWRVYSTGSNVFQTRAGCLIGAEHVNNSYECDIPIGAGICASYQTQTNSPRRARSVASQSIIAYTMSLGAENSVAYSNNSIAIPTNFTISVTTEILPVSMTKTSVDCTMYICGDSTECSNLLLQYGSFCTQLNRALTGIAVEQDKNTQEVFAQVKQIYKTPPIKDFGGFNFSQILPDPSKPSKRSFIEDLLFNKVTLADAGFIKQYGDCLGDIAARDLICAQKFNGLTVLPPLLTDEMIAQYTSALLAGTITSGWTFGAGAALQIPFAMQMAYRFNGIGVTQNVLYENQKLIANQFNSAIGKIQDSLSSTASALGKLQDVVNQNAQALNTLVKQLSSNFGAISSVLNDILSRLDPPEAEVQIDRLITGRLQSLQTYVTQQLIRAAEIRASANLAATKMSECVLGQSKRVDFCGKGYQLMSFPQSAPHGVVFLNVTYVPAQEKNFTTAPAICNDGKAHFPREGVFVSNGTNWFVTQRNFYEPQIITTDNTFLSGNCDVVIGIVNNTVYDPLQPELDSGGGGSDIIKLLNEQVNKEMQSSNLYMSMSSWCYTHSLDGAGLFLFDHAAEEYEHAKKLIIFLNENNVPVQLTSISAPEHKFEGLTQIFQKAYEHEQHISESINNIVDHAIKSKDHATFNFLQWYVAEQHEEEVLFKDILDKIELIGNENHGLYLADQYVKGIAKSRKS

SEQ ID NO: 8976 - protein, 1315 aa, Artificial Sequence
  SARS-CoV-2/USA/UT-00034/2020__EPI_ISL_417977 spike protein (1-1147)(K986P_V987P_ H1048Q_H1064N_ H1083N_H1101N) Ferritin construct
MFVFLVLLPLVSSQCVNLTTRTQLPPAYTNSFTRGVYYPDKVFRSSVLHSTQDLFLPFFSNVTWFHAIHVSGTNGTKRFDNPVLPFNDGVYFASTEKSNIIRGWIFGTTLDSKTQSLLIVNNATNVVIKVCEFQFCNDPFLGVYYYKNNKSWMESEFRVYSSANNCTFEYVSQPFLMDLEGKQGNFKNLREFVFKNIDGYFKIYSKHTPINLVRDLPQGFSALEPLVDLPIGINITRFQTLLALHRSYLTPGDSSSGWTAGAAAYYVGYLQPRTFLLKYNENGTITDAVDCALDPLSETKCTLKSFTVEKGIYQTSNFRVQPTESIVRFPNITNLCPFGEVFNATRFASVYAWNRKRISNCVADYSVLYNSASFSTFKCYGVSPTKLNDLCFTNVYADSFVIRGDEVRQIAPGQTGKIADYNYKLPDDFTGCVIAWNSNNLDSKVGGNYNYLYRLFRKSNLKPFERDISTEIYQAGSTPCNGVEGFNCYFPLQSYGFQPTNGVGYQPYRVVVLSFELLHAPATVCGPKKSTNLVKNKCVNFNFNGLTGTGVLTESNKKFLPFQQFGRDIADTTDAVRDPQTLEILDITPCSFGGVSVITPGTNTSNQVAVLYQGVNCTEVPVAIHADQLTPTWRVYSTGSNVFQTRAGCLIGAEHVNNSYECDIPIGAGICASYQTQTNSPRRARSVASQSIIAYTMSLGAENSVAYSNNSIAIPTNFTISVTTEILPVSMTKTSVDCTMYICGDSTECSNLLLQYGSFCTQLNRALTGIAVEQDKNTQEVFAQVKQIYKTPPIKDFGGFNFSQILPDPSKPSKRSFIEDLLFNKVTLADAGFIKQYGDCLGDIAARDLICAQKFNGLTVLPPLLTDEMIAQYTSALLAGTITSGWTFGAGAALQIPFAMQMAYRFNGIGVTQNVLYENQKLIANQFNSAIGKIQDSLSSTASALGKLQDVVNQNAQALNTLVKQLSSNFGAISSVLNDILSRLDPPEAEVQIDRLITGRLQSLQTYVTQQLIRAAEIRASANLAATKMSECVLGQSKRVDFCGKGYQLMSFPQSAPHGVVFLNVTYVPAQEKNFTTAPAICNDGKAHFPREGVFVSNGTNWFVTQRNFYEPQIITTDNTFVSGNCDVVIGIVNNTVYDPLQPELDSGGGGSDIIKLLNEQVNKEMQSSNLYMSMSSWCYTHSLDGAGLFLFDHAAEEYEHAKKLIIFLNENNVPVQLTSISAPEHKFEGLTQIFQKAYEHEQHISESINNIVDHAIKSKDHATFNFLQWYVAEQHEEEVLFKDILDKIELIGNENHGLYLADQYVKGIAKSRKS

SEQ ID NO: 8977 - protein, 1315 aa, Artificial Sequence
  SARS-CoV-2/USA/UT-00033/2020__EPI_ISL_417976 spike protein (1-1147)(K986P_V987P_ H1048Q_H1064N_ H1083N_H1101N) Ferritin construct
MFVFLVLLPLVSSQCVNLTTRTQLPPAYTNSFTRGVYYPDKVFRSSVLHSTQDLFLPFFSNVTWFHAIHVSGTNGTKRFDNPVLPFNDGVYFASTEKSNIIRGWIFGTTLDSKTQSLLIVNNATNVVIKVCEFQFCNDPFLGVYYHKNNKSWMESEFRVYSSANNCTFEYVSQPFLMDLEGKQGNFKNLREFVFKNIDGYFKIYSKHTPINLVRDLPQGFSALEPLVDLPIGINITRFQTLLALHRSYLTPGDSSSGLTAGAAAYYVGYLQPRTFLLKYNENGTITDAVDCALDPLSETKCTLKSFTVEKGIYQTSNFRVQPTESIVRFPNITNLCPFGEVFNATRFASVYAWNRKRISNCVADYSVLYNSASFSTFKCYGVSPTKLNDLCFTNVYADSFVIRGDEVRQIAPGQTGKIADYNYKLPDDFTGCVIAWNSNNLDSKVGGNYNYLYRLFRKSNLKPFERDISTEIYQAGSTPCNGVEGFNCYFPLQSYGFQPTNGVGYQPYRVVVLSFELLHAPATVCGPKKSTNLVKNKCVNFNFNGLTGTGVLTESNKKFLPFQQFGRDIADTTDAVRDPQTLEILDITPCSFGGVSVITPGTNTSNQVAVLYQGVNCTEVPVAIHADQLTPTWRVYSTGSNVFQTRAGCLIGAEHVNNSYECDIPIGAGICASYQTQTNSPRRARSVASQSIIAYTMSLGAENSVAYSNNSIAIPTNFTISVTTEILPVSMTKTSVDCTMYICGDSTECSNLLLQYGSFCTQLNRALTGIAVEQDKNTQEVFAQVKQIYKTPPIKDFGGFNFSQILPDPSKPSKRSFIEDLLFNKVTLADAGFIKQYGDCLGDIAARDLICAQKFNGLTVLPPLLTDEMIAQYTSALLAGTITSGWTFGAGAALQIPFAMQMAYRFNGIGVTQNVLYENQKLIANQFNSAIGKIQDSLSSTASALGKLQDVVNQNAQALNTLVKQLSSNFGAISSVLNDILSRLDPPEAEVQIDRLITGRLQSLQTYVTQQLIRAAEIRASANLAATKMSECVLGQSKRVDFCGKGYQLMSFPQSAPHGVVFLNVTYVPAQEKNFTTAPAICNDGKAHFPREGVFVSNGTNWFVTQRNFYEPQIITTDNTFVSGNCDVVIGIVNNTVYDPLQPELDSGGGGSDIIKLLNEQVNKEMQSSNLYMSMSSWCYTHSLDGAGLFLFDHAAEEYEHAKKLIIFLNENNVPVQLTSISAPEHKFEGLTQIFQKAYEHEQHISESINNIVDHAIKSKDHATFNFLQWYVAEQHEEEVLFKDILDKIELIGNENHGLYLADQYVKGIAKSRKS

SEQ ID NO: 8978 - protein, 1315 aa, Artificial Sequence
  SARS-CoV-2/USA/WI-13/2020__EPI_ISL_417516 spike protein (1-1147)(K986P_V987P_ H1048Q_H1064N_ H1083N_H1101N) Ferritin construct
MFVFLVLLPLVSSQCVNLTTRTQLPPAYTNSFTRGVYYPDKVFRSSVLHSTQDLFLPFFSNVTWFHAIHVSGTNGTKRFDNPVLPFNDGVYFASTEKSNIIRGWIFGTTLDSKTQSLLIVNNATNVVIKVCEFQFCNDPFLGVYYHKNNKSWMESEFRVYSSANNCTFEYVSQPFLMDLEGKQGNFKNLREFVFKNIDGYFKIYSKHTPINLVRDLPQGFSALEPLVDLPIGINITRFQTLLALHRSYLTPGDSSSGWTAGAAAYYVGYLQPRTFLLKYNENGTITDAVDCALDPLSETKCTLKSFTVEKGIYQTSNFRVLPTESIVRFPNITNLCPFGEVFNATRFASVYAWNRKRISNCVADYSVLYNSASFSTFKCYGVSPTKLNDLCFTNVYADSFVIRGDEVRQIAPGQTGKIADYNYKLPDDFTGCVIAWNSNNLDSKVGGNYNYLYRLFRKSNLKPFERDISTEIYQAGSTPCNGVEGFNCYFPLQSYGFQPTNGVGYQPYRVVVLSFELLHAPATVCGPKKSTNLVKNKCVNFNFNGLTGTGVLTESNKKFLPFQQFGRDIADTTDAVRDPQTLEILDITPCSFGGVSVITPGTNTSNQVAVLYQGVNCTEVPVAIHADQLTPTWRVYSTGSNVFQTRAGCLIGAEHVNNSYECDIPIGAGICASYQTQTNSPRRARSVASQSIIAYTMSLGAENSVAYSNNSIAIPTNFTISVTTEILPVSMTKTSVDCTMYICGDSTECSNLLLQYGSFCTQLNRALTGIAVEQDKNTQEVFAQVKQIYKTPPIKDFGGFNFSQILPDPSKPSKRSFIEDLLFNKVTLADAGFIKQYGDCLGDIAARDLICAQKFNGLTVLPPLLTDEMIAQYTSALLAGTITSGWTFGAGAALQIPFAMQMAYRFNGIGVTQNVLYENQKLIANQFNSAIGKIQDSLSSTASALGKLQDVVNQNAQALNTLVKQLSSNFGAISSVLNDILSRLDPPEAEVQIDRLITGRLQSLQTYVTQQLIRAAEIRASANLAATKMSECVLGQSKRVDFCGKGYQLMSFPQSAPHGVVFLNVTYVPAQEKNFTTAPAICNDGKAHFPREGVFVSNGTNWFVTQRNFYEPQIITTDNTFVSGNCDVVIGIVNNTVYDPLQPELDSGGGGSDIIKLLNEQVNKEMQSSNLYMSMSSWCYTHSLDGAGLFLFDHAAEEYEHAKKLIIFLNENNVPVQLTSISAPEHKFEGLTQIFQKAYEHEQHISESINNIVDHAIKSKDHATFNFLQWYVAEQHEEEVLFKDILDKIELIGNENHGLYLADQYVKGIAKSRKS

SEQ ID NO: 8979 - protein, 1314 aa, Artificial Sequence
  SARS-CoV-2/India/1-27/2020__EPI_ISL_413522 spike protein (1-1146)(K985P_V986P_ H1047Q_H1063N_ H1082N_H1100N) Ferritin construct
MFVFLVLLPLVSSQCVNLTTRTQLPPAYTNSFTRGVYYPDKVFRSSVLHSTQDLFLPFFSNVTWFHAIHVSGTNGTKRFDNPVLPFNDGVYFASTEKSNIIRGWIFGTTLDSKTQSLLIVNNATNVVIKVCEFQFCNDPFLGVYHKNNKSWMESEFRVYSSANNCTFEYVSQPFLMDLEGKQGNFKNLREFVFKNIDGYFKIYSKHTPINLVRDLPQGFSALEPLVDLPIGINITRFQTLLALHRSYLTPGDSSSGWTAGAAAYYVGYLQPRTFLLKYNENGTITDAVDCALDPLSETKCTLKSFTVEKGIYQTSNFRVQPTESIVRFPNITNLCPFGEVFNATRFASVYAWNRKRISNCVADYSVLYNSASFSTFKCYGVSPTKLNDLCFTNVYADSFVIRGDEVIQIAPGQTGKIADYNYKLPDDFTGCVIAWNSNNLDSKVGGNYNYLYRLFRKSNLKPFERDISTEIYQAGSTPCNGVEGFNCYFPLQSYGFQPTNGVGYQPYRVVVLSFELLHAPATVCGPKKSTNLVKNKCVNFNFNGLTGTGVLTESNKKFLPFQQFGRDIADTTDAVRDPQTLEILDITPCSFGGVSVITPGTNTSNQVAVLYQDVNCTEVPVAIHADQLTPTWRVYSTGSNVFQTRAGCLIGAEHVNNSYECDIPIGAGICASYQTQTNSPRRARSVASQSIIAYTMSLGAENSVAYSNNSIAIPTNFTISVTTEILPVSMTKTSVDCTMYICGDSTECSNLLLQYGSFCTQLNRALTGIAVEQDKNTQEVFAQVKQIYKTPPIKDFGGFNFSQILPDPSKPSKRSFIEDLLFNKVTLADAGFIKQYGDCLGDIAARDLICAQKFNGLTVLPPLLTDEMIAQYTSALLAGTITSGWTFGAGAALQIPFAMQMAYRFNGIGVTQNVLYENQKLIANQFNSAIGKIQDSLSSTASALGKLQDVVNQNAQALNTLVKQLSSNFGAISSVLNDILSRLDPPEAEVQIDRLITGRLQSLQTYVTQQLIRAAEIRASANLAATKMSECVLGQSKRVDFCGKGYQLMSFPQSAPHGVVFLNVTYVPAQEKNFTTAPAICNDGKAHFPREGVFVSNGTNWFVTQRNFYEPQIITTDNTFVSGNCDVVIGIVNNTVYDPLQPELDSGGGGSDIIKLLNEQVNKEMQSSNLYMSMSSWCYTHSLDGAGLFLFDHAAEEYEHAKKLIIFLNENNVPVQLTSISAPEHKFEGLTQIFQKAYEHEQHISESINNIVDHAIKSKDHATFNFLQWYVAEQHEEEVLFKDILDKIELIGNENHGLYLADQYVKGIAKSRKS

SEQ ID NO: 8980 - protein, 1309 aa, Artificial Sequence
  SARS-CoV-2/pangolin/Guangxi/P4L/2017__EPI_ISL_410538 spike protein (1-1141)(K980P_V981P_ H1042Q_H1058N_ H1077N_H1095N) Ferritin construct
MFVFLFVLPLVSSQCVNLTTRTGIPPGYTNSSTRGVYYPDKVFRSSILHLTQDLFLPFFSNVTWFNTINYQGGFKKFDNPVLPFNDGVYFASTEKSNIIRGWIFGTTLDARTQSLLIVNNATNVVIKVCEFQFCTDPFLGVYYHNNNKTWVENEFRVYSSANNCTFEYISQPFLMDLEGKQGNFKNLREFVFKNVDGYFKIYSKHTPIDLVRDLPRGFAALEPLVDLPIGINITRFQTLLALHRSYLTPGNLESGWTTGAAAYYVGYLQQRTFLLSYNQNGTITDAVDCSLDPLSETKCTLKSLTVEKGIYQTSNFRVQPTISIVRFPNITNLCPFGEVFNASKFASVYAWNRKRISNCVADYSVLYNSTSFSTFKCYGVSPTKLNDLCFTNVYADSFVVKGDEVRQIAPGQTGVIADYNYKLPDDFTGCVIAWNSVKQDALTGGNYGYLYRLFRKSKLKPFERDISTEIYQAGSTPCNGQVGLNCYYPLERYGFHPTTGVNYQPFRVVVLSFELLNGPATVCGPKLSTTLVKDKCVNFNFNGLTGTGVLTTSKKQFLPFQQFGRDISDTTDAVRDPQTLEILDITPCSFGGVSVITPGTNTSNQVAVLYQDVNCTEVPMAIHAEQLTPAWRVYSAGANVFQTRAGCLVGAEHVNNSYECDIPVGAGICASYHSMSSLRSVNQRSIIAYTMSLGAENSVAYSNNSIAIPTNFTISVTTEILPVSMTKTSVDCTMYICGDSIECSNLLLQYGSFCTQLNRALTGIAVEQDKNTQEVFAQVKQIYKTPPIKDFGGFNFSQILPDPSKPSKRSFIEDLLFNKVTLADAGFIKQYGDCLGDIAARDLICAQKFNGLTVLPPLLTDEMIAQYTSALLAGTITSGWTFGAGAALQIPFAMQMAYRFNGIGVTQNVLYENQKLIANQFNSAIGKIQDSLSSTASALGKLQDVVNQNAQALNTLVKQLSSNFGAISSVLNDILSRLDPPEAEVQIDRLITGRLQSLQTYVTQQLIRAAEIRASANLAATKMSECVLGQSKRVDFCGKGYQLMSFPQSAPHGVVFLNVTYVPAQEKNFTTAPAICNEGKAHFPREGVFVSNGTNWFITQRNFYEPQIITTDNTFVSGSCDVVIGIVNNTVYDPLQPELDSGGGGSDIIKLLNEQVNKEMQSSNLYMSMSSWCYTHSLDGAGLFLFDHAAEEYEHAKKLIIFLNENNVPVQLTSISAPEHKFEGLTQIFQKAYEHEQHISESINNIVDHAIKSKDHATFNFLQWYVAEQHEEEVLFKDILDKIELIGNENHGLYLADQYVKGIAKSRKS

SEQ ID NO: 8981 - protein, 1309 aa, Artificial Sequence
  SARS-CoV-2/pangolin/Guangxi/P5L/2017__EPI_ISL_410540 spike protein (1-1141)(K980P_V981P_ H1042Q_H1058N_ H1077N_H1095N) Ferritin construct
MFVFLFVLPLVSSQCVNLTTRTGIPPGYTNSSTRGVYYPDKVFRSSILHLTQDLFLPFFSNVTWFNTINYQGGFKKFDNPVLPFNDGVYFASTEKSNIIRGWIFGTTLDARTQSLLIVNNATNVVIKVCEFQFCTDPFLGVYYHNNNKTWVENEFRVYSSANNCTFEYISQPFLMDLEGKQGNFKNLREFVFKNVDGYFKIYSKHTPIDLVRDLPRGFAALEPLVDLPIGINITRFQTLLALHRSYLTPGKLESGWTTGAAAYYVGYLQQRTFLLSYNQNGTITDAVDCSLDPLSETKCTLKSLTVEKGIYQTSNFRVQPTISIVRFPNITNLCPFGEVFNASKFASVYAWNRKRISNCVADYSVLYNSTSFSTFKCYGVSPTKLNDLCFTNVYADSFVVKGDEVRQIAPGQTGVIADYNYKLPDDFTGCVIAWNSVKQDALTGGNYGYLYRLFRKSKLKPFERDISTEIYQAGSTPCNGQVGLNCYYPLERYGFHPTTGVNYQPFRVVVLSFELLNGPATVCGPKLSTTLVKDKCVNFNFNGLTGTGVLTTSKKQFLPFQQFGRDISDTTDAVRDPQTLEILDITPCSFGGVSVITPGTNTSNQVAVLYQDVNCTEVPMAIHAEQLTPAWRVYSAGANVFQTRAGCLVGAEHVNNSYECDIPVGAGICASYHSMSSFRSVNQRSIIAYTMSLGAENSVAYSNNSIAIPTNFTISVTTEILPVSMTKTSVDCTMYICGDSIECSNLLLQYGSFCTQLNRALTGIAVEQDKNTQEVFAQVKQIYKTPPIKDFGGFNFSQILPDPSKPSKRSFIEDLLFNKVTLADAGFIKQYGDCLGDIAARDLICAQKFNGLTVLPPLLTDEMIAQYTSALLAGTITSGWTFGAGAALQIPFAMQMAYRFNGIGVTQNVLYENQKLIANQFNSAIGKIQDSLSSTASALGKLQDVVNQNAQALNTLVKQLSSNFGAISSVLNDILSRLDPPEAEVQIDRLITGRLQSLQTYVTQQLIRAAEIRASANLAATKMSECVLGQSKRVDFCGKGYQLMSFPQSAPHGVVFLNVTYVPAQEKNFTTAPAICNEGKAHFPREGVFVSNGTNWFITQRNFYEPQIITTDNTFVSGSCDVVIGIVNNTVYDPLQPELDSGGGGSDIIKLLNEQVNKEMQSSNLYMSMSSWCYTHSLDGAGLFLFDHAAEEYEHAKKLIIFLNENNVPVQLTSISAPEHKFEGLTQIFQKAYEHEQHISESINNIVDHAIKSKDHATFNFLQWYVAEQHEEEVLFKDILDKIELIGNENHGLYLADQYVKGIAKSRKS

SEQ ID NO: 8982 - protein, 1309 aa, Artificial Sequence
  SARS-CoV-2/pangolin/Guangxi/P5E/2017__EPI_ISL_410541 spike protein (1-1141)(K980P_V981P_ H1042Q_H1058N_ H1077N_H1095N) Ferritin construct
MFVFLFVLPLVSSQCVNLTTRTGIPPGYTNSSTRGVYYPDKVFRSSILHLTQDLFLPFFSNVTWFNTITYQGGSKKFDNPVLPFNDGVYFASTEKSNIIRGWIFGTTLDARTQSLLIVNNATNVVIKVCEFQFCTDPFLGVYYHNNNKTWVENEFRVYSSANNCTFEYISQPFLMDLEGKQGNFKNLREFVFKNVDGYFKIYSKHTPIDLVRDLPRGFAALEPLVDLPIGINITRFQTLLALHRSYLTPGKLESGWTTGAAAYYVGYLQQRTFLLSYNQNGTITDAVDCSLDPLSETKCTLKSLTVEKGIYQTSNFRVQPTISIVRFPNITNLCPFGEVFNASKFASVYAWNRKRISNCVADYSVLYNSTSFSTFKCYGVSPTKLNDLCFTNVYADSFVVKGDEVRQIAPGQTGVIADYNYKLPDDFTGCVIAWNSVKQDALTGDNYGYLYRLFRKSKLKPFERDISTEIYQAGSTPCNGQVGLNCYYPLERYGFHPTTGVNYQPFRVVVLSFELLNGPATVCGPKLSTTLVKDKCVNFNFNGLTGTGVLTTSKKQFLPFQQFGRDISDTTDAVRDPQTLEILDITPCSFGGVSVITPGTNTSNQVAVLYQDVNCTEVPMAIHAEQLTPAWRVYSAGANVFQTRAGCLVGAEHVNNSYECDIPVGAGICASYHSMSSFRSVNQRSIIAYTMSLGAENSVAYSNNSIAIPTNFTISVTTEILPVSMTKTSVDCTMYICGDSIECSNLLLQYGSFCTQLNRALTGIAVEQDKNTQEVFAQVKQIYKTPPIKDFGGFNFSQILPDPSKPSKRSFIEDLLFNKVTLADAGFIKQYGDCLGDIAARDLICAQKFNGLTVLPPLLTDEMIAQYTSALLAGTITSGWTFGAGAALQIPFAMQMAYRFNGIGVTQNVLYENQKLIANQFNSAIGKIQDSLSSTASALGKLQDVVNQNAQALNTLVKQLSSNFGAISSVLNDILSRLDPPEAEVQIDRLITGRLQSLQTYVTQQLIRAAEIRASANLAATKMSECVLGQSKRVDFCGKGYQLMSFPQSAPHGVVFLNVTYVPAQEKNFTTAPAICNEGKAHFPREGVFVSNGTNWFITQRNFYEPQIITTDNTFVSGSCDVVIGIVNNTVYDPLQPELDSGGGGSDIIKLLNEQVNKEMQSSNLYMSMSSWCYTHSLDGAGLFLFDHAAEEYEHAKKLIIFLNENNVPVQLTSISAPEHKFEGLTQIFQKAYEHEQHISESINNIVDHAIKSKDHATFNFLQWYVAEQHEEEVLFKDILDKIELIGNENHGLYLADQYVKGIAKSRKS

SEQ ID NO: 8983 - protein, 1307 aa, Artificial Sequence
  SARS-CoV-2/pangolin/Guangxi/P1E/2017__EPI_ISL_410539 spike protein (1-1139)(K978P_V979P_ H1040Q_H1056N_ H1075N_H1093N) Ferritin construct
MFVFLFVLPLVSSQCVNLTTRTGIQPGYTNSSTRGVYYPDKVFRSSILHLTQDLFLPFFSNVTWFNTINYQGGFKKFDNPVLPFNDGVYFASTEKSNIIRGWIFGTTLDARTQSLLIVNNATNVVIKVCEFQFCTDPFLGVYYHNNNKTWVENEFRVYSSANNCTFEYISQPFLMDLEGKQGNFKNLREFVFKNVDGYFKIYSKHTPIDLVRDLPRGFAALEPLVDLPIGINITRFQTLLALHRSYLTPGKLESGWTTGAAAYYVGYLQQRTFLLSYNQNGTITDAVDCSLDPLSETKCTLKSLTVEKGIYQTSNFRVQPTISIVRFPNITNLCPFGEVFNASKFASVYAWNRKRISNCVADYSVLYNSTSFSTFKCYGVSPTKLNDLCFTNVYADSFVVKGDEVRQIAPGQTGVIADYNYKLPDDFTGCVIAWNSVKQDALTGGNYLYRLFRKSKLKPFERDISTEIYQAGSTPCNGQVGLNCYYPLERYGFHPTTGVNYQPFRVVVLSFELLNGPATVCGPKLSTTLVKDKCVNFNFNGLTGTGVLTTSKKQFLPFQQFGRDISDTTDAVRDPQTLEILDITPCSFGGVSVITPGTNTSNQVAVLYQDVNCTEVPMAIHAEQLTPAWRVYSAGANVFQTRAGCLVGAEHVNNSYECDIPVGAGICASYHSMSSLRSVNQRSIIAYTMSLGAENSVAYSNNSIAIPTNFTISVTTEILPVSMTKTSVDCTMYICGDSIECSNLLLQYGSFCTQLNRALTGIAVEQDKNTQEVFAQVKQIYKTPPIKDFGGFNFSQILPDPSKPSKRSFIEDLLFNKVTLADAGFIKQYGDCLGDIAARDLICAQKFNGLTVLPPLLTDEMIAQYTSALLAGTITSGWTFGAGAALQIPFAMQMAYRFNGIGVTQNVLYENQKLIANQFNSAIGKIQDSLSSTASALGKLQDVVNQNAQALNTLVKQLSSNFGAISSVLNDILSRLDPPEAEVQIDRLITGRLQSLQTYVTQQLIRAAEIRASANLAATKMSECVLGQSKRVDFCGKGYQLMSFPQSAPHGVVFLNVTYVPAQEKNFTTAPAICNEGKAHFPREGVFVSNGTNWFITQRNFYEPQIITTDNTFVSGSCDVVIGIVNNTVYDPLQPELDSGGGGSDIIKLLNEQVNKEMQSSNLYMSMSSWCYTHSLDGAGLFLFDHAAEEYEHAKKLIIFLNENNVPVQLTSISAPEHKFEGLTQIFQKAYEHEQHISESINNIVDHAIKSKDHATFNFLQWYVAEQHEEEVLFKDILDKIELIGNENHGLYLADQYVKGIAKSRKS

SEQ ID NO: 8984 - protein, 1315 aa, Artificial Sequence
  SARS-CoV-2/Wuhan/WIV05/2019__EPI_ISL_402128 spike protein (1-1147)(I712C_T1077C) Ferritin construct
MFVFLVLLPLVSSQCVNLTTRTQLPPAYTNSFTRGVYYPDKVFRSSVLHSTQDLFLPFFSNVTWFHAIHVSGTNGTKRFDNPVLPFNDGVYFASTEKSNIIRGWIFGTTLDSKTQSLLIVNNATNVVIKVCEFQFCNDPFLGVYYHKNNKSWMESEFRVYSSANNCTFEYVSQPFLMDLEGKQGNFKNLREFVFKNIDGYFKIYSKHTPINLVRDLPQGFSALEPLVDLPIGINITRFQTLLALHRSYLTPGDSSSGWTAGAAAYYVGYLQPRTFLLKYNENGTITDAVDCALDPLSETKCTLKSFTVEKGIYQTSNFRVQPTESIVRFPNITNLCPFGEVFNATRFASVYAWNRKRISNCVADYSVLYNSASFSTFKCYGVSPTKLNDLCFTNVYADSFVIRGDEVRQIAPGQTGKIADYNYKLPDDFTGCVIAWNSNNLDSKVGGNYNYLYRLFRKSNLKPFERDISTEIYQAGSTPCNGVEGFNCYFPLQSYGFQPTNGVGYQPYRVVVLSFELLHAPATVCGPKKSTNLVKNKCVNFNFNGLTGTGVLTESNKKFLPFQQFGRDIADTTDAVRDPQTLEILDITPCSFGGVSVITPGTNTSNQVAVLYQDVNCTEVPVAIHADQLTPTWRVYSTGSNVFQTRAGCLIGAEHVNNSYECDIPIGAGICASYQTQTNSPRRARSVASQSIIAYTMSLGAENSVAYSNNSCAIPTNFTISVTTEILPVSMTKTSVDCTMYICGDSTECSNLLLQYGSFCTQLNRALTGIAVEQDKNTQEVFAQVKQIYKTPPIKDFGGFNFSQILPDPSKPSKRSFIEDLLFNKVTLADAGFIKQYGDCLGDIAARDLICAQKFNGLTVLPPLLTDEMIAQYTSALLAGTITSGWTFGAGAALQIPFAMQMAYRFNGIGVTQNVLYENQKLIANQFNSAIGKIQDSLSSTASALGKLQDVVNQNAQALNTLVKQLSSNFGAISSVLNDILSRLDKVEAEVQIDRLITGRLQSLQTYVTQQLIRAAEIRASANLAATKMSECVLGQSKRVDFCGKGYHLMSFPQSAPHGVVFLHVTYVPAQEKNFTCAPAICHDGKAHFPREGVFVSNGTHWFVTQRNFYEPQIITTDNTFVSGNCDVVIGIVNNTVYDPLQPELDSGGGGSDIIKLLNEQVNKEMQSSNLYMSMSSWCYTHSLDGAGLFLFDHAAEEYEHAKKLIIFLNENNVPVQLTSISAPEHKFEGLTQIFQKAYEHEQHISESINNIVDHAIKSKDHATFNFLQWYVAEQHEEEVLFKDILDKIELIGNENHGLYLADQYVKGIAKSRKS

SEQ ID NO: 8985 - protein, 1311 aa, Artificial Sequence
  SARS-CoV-2/bat/Yunnan/RaTG13/2013__EPI_ISL_402131 spike protein (1-1143)(I708C_T1073C) Ferritin construct
MFVFLVLLPLVSSQCVNLTTRTQLPPAYTNSSTRGVYYPDKVFRSSVLHLTQDLFLPFFSNVTWFHAIHVSGTNGIKRFDNPVLPFNDGVYFASTEKSNIIRGWIFGTTLDSKTQSLLIVNNATNVVIKVCEFQFCNDPFLGVYYHKNNKSWMESEFRVYSSANNCTFEYVSQPFLMDLEGKQGNFKNLREFVFKNIDGYFKIYSKHTPINLVRDLPPGFSALEPLVDLPIGINITRFQTLLALHRSYLTPGDSSSGWTAGAAAYYVGYLQPRTFLLKYNENGTITDAVDCALDPLSETKCTLKSFTVEKGIYQTSNFRVQPTDSIVRFPNITNLCPFGEVFNATTFASVYAWNRKRISNCVADYSVLYNSTSFSTFKCYGVSPTKLNDLCFTNVYADSFVITGDEVRQIAPGQTGKIADYNYKLPDDFTGCVIAWNSKHIDAKEGGNFNYLYRLFRKANLKPFERDISTEIYQAGSKPCNGQTGLNCYYPLYRYGFYPTDGVGHQPYRVVVLSFELLNAPATVCGPKKSTNLVKNKCVNFNFNGLTGTGVLTESNKKFLPFQQFGRDIADTTDAVRDPQTLEILDITPCSFGGVSVITPGTNASNQVAVLYQDVNCTEVPVAIHADQLTPTWRVYSTGSNVFQTRAGCLIGAEHVNNSYECDIPIGAGICASYQTQTNSRSVASQSIIAYTMSLGAENSVAYSNNSCAIPTNFTISVTTEILPVSMTKTSVDCTMYICGDSTECSNLLLQYGSFCTQLNRALTGIAVEQDKNTQEVFAQVKQIYKTPPIKDFGGFNFSQILPDPSKPSKRSFIEDLLFNKVTLADAGFIKQYGDCLGDIAARDLICAQKFNGLTVLPPLLTDEMIAQYTSALLAGTITSGWTFGAGAALQIPFAMQMAYRFNGIGVTQNVLYENQKLIANQFNSAIGKIQDSLSSTASALGKLQDVVNQNAQALNTLVKQLSSNFGAISSVLNDILSRLDKVEAEVQIDRLITGRLQSLQTYVTQQLIRAAEIRASANLAATKMSECVLGQSKRVDFCGKGYHLMSFPQSAPHGVVFLHVTYVPAQEKNFTCAPAICHDGKAHFPREGVFVSNGTHWFVTQRNFYEPQIITTDNTFVSGSCDVVIGIVNNTVYDPLQPELDSGGGGSDIIKLLNEQVNKEMQSSNLYMSMSSWCYTHSLDGAGLFLFDHAAEEYEHAKKLIIFLNENNVPVQLTSISAPEHKFEGLTQIFQKAYEHEQHISESINNIVDHAIKSKDHATFNFLQWYVAEQHEEEVLFKDILDKIELIGNENHGLYLADQYVKGIAKSRKS

SEQ ID NO: 8986 - protein, 1315 aa, Artificial Sequence
  SARS-CoV-2/Wuhan/HBCDC-HB-01/2019__EPI_ISL_402132 spike protein (1-1147)(I712C_T1077C) Ferritin construct
MFVFLVLLPLVSSQCVNLTTRTQLPPAYTNSITRGVYYPDKVFRSSVLHSTQDLFLPFFSNVTWFHAIHVSGTNGTKRFDNPVLPFNDGVYFASTEKSNIIRGWIFGTTLDSKTQSLLIVNNATNVVIKVCEFQFCNDPFLGVYYHKNNKSWMESEFRVYSSANNCTFEYVSQPFLMDLEGKQGNFKNLREFVFKNIDGYFKIYSKHTPINLVRDLPQGFSALEPLVDLPIGINITRFQTLLALHRSYLTPGDSSSGWTAGAAAYYVGYLQPRTFLLKYNENGTITDAVDCALDPLSETKCTLKSFTVEKGIYQTSNFRVQPTESIVRFPNITNLCPFGEVFNATRFASVYAWNRKRISNCVADYSVLYNSASFSTFKCYGVSPTKLNDLCFTNVYADSFVIRGDEVRQIAPGQTGKIADYNYKLPDDFTGCVIAWNSNNLDSKVGGNYNYLYRLFRKSNLKPFERDISTEIYQAGSTPCNGVEGFNCYFPLQSYGFQPTNGVGYQPYRVVVLSFELLHAPATVCGPKKSTNLVKNKCVNFNFNGLTGTGVLTESNKKFLPFQQFGRDIADTTDAVRDPQTLEILDITPCSFGGVSVITPGTNTSNQVAVLYQDVNCTEVPVAIHADQLTPTWRVYSTGSNVFQTRAGCLIGAEHVNNSYECDIPIGAGICASYQTQTNSPRRARSVASQSIIAYTMSLGAENSVAYSNNSCAIPTNFTISVTTEILPVSMTKTSVDCTMYICGDSTECSNLLLQYGSFCTQLNRALTGIAVEQDKNTQEVFAQVKQIYKTPPIKDFGGFNFSQILPDPSKPSKRSFIEDLLFNKVTLADAGFIKQYGDCLGDIAARDLICAQKFNGLTVLPPLLTDEMIAQYTSALLAGTITSGWTFGAGAALQIPFAMQMAYRFNGIGVTQNVLYENQKLIANQFNSAIGKIQDSLSSTASALGKLQDVVNQNAQALNTLVKQLSSNFGAISSVLNDILSRLDKVEAEVQIDRLITGRLQSLQTYVTQQLIRAAEIRASANLAATKMSECVLGQSKRVDFCGKGYHLMSFPQSAPHGVVFLHVTYVPAQEKNFTCAPAICHDGKAHFPREGVFVSNGTHWFVTQRNFYEPQIITTDNTFVSGNCDVVIGIVNNTVYDPLQPELDSGGGGSDIIKLLNEQVNKEMQSSNLYMSMSSWCYTHSLDGAGLFLFDHAAEEYEHAKKLIIFLNENNVPVQLTSISAPEHKFEGLTQIFQKAYEHEQHISESINNIVDHAIKSKDHATFNFLQWYVAEQHEEEVLFKDILDKIELIGNENHGLYLADQYVKGIAKSRKS

SEQ ID NO: 8987 - protein, 1315 aa, Artificial Sequence
  SARS-CoV-2/Guangdong/20SF028/2020__EPI_ISL_403936 spike protein (1-1147)(I712C_T1077C) Ferritin construct
MFVFLVLLPLVSSQCVNLTTRTQLPPAYTNSFTRGVYYPDKVFRSSVLYSTQDLFLPFFSNVTWFHAIHVSGTNGTKRFDNPVLPFNDGVYFASTEKSNIIRGWIFGTTLDSKTQSLLIVNNATNVVIKVCEFQFCNDPFLGVYYHKNNKSWMESEFRVYSSANNCTFEYVSQPFLMDLEGKQGNFKNLREFVFKNIDGYFKIYSKHTPINLVRDLPQGFSALEPLVDLPIGINITRFQTLLALHRSYLTPGDSSSGWTAGAAAYYVGYLQPRTFLLKYNENGTITDAVDCALDPLSETKCTLKSFTVEKGIYQTSNFRVQPTESIVRFPNITNLCPFGEVFNATRFASVYAWNRKRISNCVADYSVLYNSASFSTFKCYGVSPTKLNDLCFTNVYADSFVIRGDEVRQIAPGQTGKIADYNYKLPDDFTGCVIAWNSNNLDSKVGGNYNYLYRLFRKSNLKPFERDISTEIYQAGSTPCNGVEGFNCYFPLQSYGFQPTNGVGYQPYRVVVLSFELLHAPATVCGPKKSTNLVKNKCVNFNFNGLTGTGVLTESNKKFLPFQQFGRDIADTTDAVRDPQTLEILDITPCSFGGVSVITPGTNTSNQVAVLYQDVNCTEVPVAIHADQLTPTWRVYSTGSNVFQTRAGCLIGAEHVNNSYECDIPIGAGICASYQTQTNSPRRARSVASQSIIAYTMSLGAENSVAYSNNSCAIPTNFTISVTTEILPVSMTKTSVDCTMYICGDSTECSNLLLQYGSFCTQLNRALTGIAVEQDKNTQEVFAQVKQIYKTPPIKDFGGFNFSQILPDPSKPSKRSFIEDLLFNKVTLADAGFIKQYGDCLGDIAARDLICAQKFNGLTVLPPLLTDEMIAQYTSALLAGTITSGWTFGAGAALQIPFAMQMAYRFNGIGVTQNVLYENQKLIANQFNSAIGKIQDSLSSTASALGKLQDVVNQNAQALNTLVKQLSSNFGAISSVLNDILSRLDKVEAEVQIDRLITGRLQSLQTYVTQQLIRAAEIRASANLAATKMSECVLGQSKRVDFCGKGYHLMSFPQSAPHGVVFLHVTYVPAQEKNFTCAPAICHDGKAHFPREGVFVSNGTHWFVTQRNFYEPQIITTDNTFVSGNCDVVIGIVNNTVYDPLQPELDSGGGGSDIIKLLNEQVNKEMQSSNLYMSMSSWCYTHSLDGAGLFLFDHAAEEYEHAKKLIIFLNENNVPVQLTSISAPEHKFEGLTQIFQKAYEHEQHISESINNIVDHAIKSKDHATFNFLQWYVAEQHEEEVLFKDILDKIELIGNENHGLYLADQYVKGIAKSRKS

SEQ ID NO: 8988 - protein, 1315 aa, Artificial Sequence
  SARS-CoV-2/Shenzhen/SZTH-001/2020__EPI_ISL_406592 spike protein (1-1147)(I712C_T1077C) Ferritin construct
MFVFLVLLPLVSSQCVNLTTRTQLPPAYTNSFTRGVYYPDKVFRSSVLHSTQDLFLPFFSNVTWFHAIHVSGTNGTKRFDNPVLPFNDGVYFASTEKSNIIRGWIFGTTLDSKTQSLLIVNNATNVVIKVCEFQFCNDPFLGVYYHKNNKSWMESEFRVYSSANNCTFEYVSQPFLMDLEGKQGNFKNLREFVFKNIDGYFKIYSKHTPINLVRDLPQGFSALEPLVDLPIGINITRFQTLLALHRSYLTPGDSSSGWTAGAAAYYVGYLQPRTFLLKYNENGTITDAVDCALDPLSETKCTLKSFTVEKGIYQTSNFRVQPTESIVRFPNITNLCPFGEVFNATRFASVYAWNRKRISNCVADYSVLYNSASFSTFKCYGVSPTKLNDLCFTNVYADSFVIRGDEVRQIAPGQTGKIADYNYKLPDDFTGCVIAWNSNNLDSKVGGNYNYLYRLFRKSNLKPFERDISTEIYQAGSTPCNGVEGFNCYFPLQSYGFQPTNGVGYQPYRVVVLSFELLHAPATVCGPKKSTNLVKNKCVNFNFNGLTGTGVLTESNKKFLPFQQFGRDIADTTDAVRDPQTLEILDITPCSFGGVSVITPGTNTSNQVAVLYQDVNCTEVPVAIHADQLTPTWRVYSTGSNVFQTRAGCLIGAEHVNNSYECDIPIGAGICASYQTQTNSPRRARSVASQSIIAYTMSLGAENSVAYSNNSCAIPTNFTISVTTEILPVSMTKTSVDCTMYICGDSTECSNLLLQYGSFCTQLNRALTGIAVEQDKNTQEVFAQVKQIYKTPPIKDFGGFNFSQILPDPSKPSKRSFIEDLLFNKVTLADAGFIKQYGDCLGDIAARDLICAQKFNGLTVLPPLLTDEMIAQYTSALLAGTITSGWTFGAGAALQIPFAMQMAYRFNGIGVTQNVLYENQKLIANQFNSAIGKIQDSLSSTASALGKLQDVVNQNAQALNTLVKQLSSNFGAISSVLNDILSRLDKVEAEVQIDRLITGRLQSLQTYVTQQLIRAAEIRASANLAATKMSECVLGQSKRVDFCGKGYHLMSFPQSAPHGVVFLHVTYVPAQEKNFTCAPAICHDGKAHFPREGVFVSNGTHWFVTQRNFYEPQIITTDNTFVSGNCDVLIGIVNNTVYDPLQPELDSGGGGSDIIKLLNEQVNKEMQSSNLYMSMSSWCYTHSLDGAGLFLFDHAAEEYEHAKKLIIFLNENNVPVQLTSISAPEHKFEGLTQIFQKAYEHEQHISESINNIVDHAIKSKDHATFNFLQWYVAEQHEEEVLFKDILDKIELIGNENHGLYLADQYVKGIAKSRKS

SEQ ID NO: 8989 - protein, 1315 aa, Artificial Sequence
  SARS-CoV-2/Shenzhen/SZTH-004/2020__EPI_ISL_406595 spike protein (1-1147)(I712C_T1077C) Ferritin construct
MFVFLVLLPLVSSQCVNLTTRTQLPPAYTNSFTRGVYYPDKVFRSSVLHSTQDLFLPFFSNVTWFHAIHVSGTNGTKRFDNPVLPFNDGVYFASTEKSNIIRGWIFGTTLDSKTQSLLIVNNATNVVIKVCEFQFCNDPFLGVYYHKNNKSWMESEFRVYSSANNCTFEYVSQPFLMDLEGKQGNFKNLREFVFKNIDGYFKIYSKHTPINLVRDLPQGFSALEPLVDLPIGINITRFQTLLALHRSYLTPGDSSSGWTAGAAAYYVGYLQPRTFLLKYNENGTITDAVDCALDPLSETKCTLKSFTVEKGIYQTSNFRVQPTESIVRFPNITNLCPFGEVFNATRFASVYAWDRKRISNCVAYYSVLYNSASFSTFKCYGVSPTKLNDLCFTNVYADSFVIRGDEVRQIAPGQTGKIADYNYKLPDDFTGCVIAWNSNNLDSKVGGNYNYLYRLFRKSNLKPFERDISTEIYQAGSTPCNGVEGFNCYFPLQSYGFQPTNGVGYQPYRVVVLSFELLHAPATVCGPKKSTNLVKNKCVNFNFNGLTGTGVLTESNKKFLPFQQFGRDIADTTDAVRDPQTLEILDITPCSFGGVSVITPGTNTSNQVAVLYQDVNCTEVPVAIHADQLTPTWRVYSTGSNVFQTRAGCLIGAEHVNNSYECDIPIGAGICASYQTQTNSPRRARSVASQSIIAYTMSLGAENSVAYSNNSCAIPTNFTISVTTEILPVSMTKTSVDCTMYICGDSTECSNLLLQYGSFCTQLNRALTGIAVEQDKNTQEVFAQVKQIYKTPPIKDFGGFNFSQILPDPSKPSKRSFIEDLLFNKVTLADAGFIKQYGDCLGDIAARDLICAQKFNGLTVLPPLLTDEMIAQYTSALLAGTITSGWTFGAGAALQIPFAMQMAYRFNGIGVTQNVLYENQKLIANQFNSAIGKIQDSLSSTASALGKLQDVVNQNAQALNTLVKQLSSNFGAISSVLNDILSRLDKVEAEVQIDRLITGRLQSLQTYVTQQLIRAAEIRASANLAATKMSECVLGQSKRVDFCGKGYHLMSFPQSAPHGVVFLHVTYVPAQEKNFTCAPAICHDGKAHFPREGVFVSNGTHWFVTQRNFYEPQIITTDNTFVSGNCDVVIGIVNNTVYDPLQPELDSGGGGSDIIKLLNEQVNKEMQSSNLYMSMSSWCYTHSLDGAGLFLFDHAAEEYEHAKKLIIFLNENNVPVQLTSISAPEHKFEGLTQIFQKAYEHEQHISESINNIVDHAIKSKDHATFNFLQWYVAEQHEEEVLFKDILDKIELIGNENHGLYLADQYVKGIAKSRKS

SEQ ID NO: 8990 - protein, 1315 aa, Artificial Sequence
  SARS-CoV-2/France/IDF0372/2020__EPI_ISL_406596 spike protein (1-1147)(I712C_T1077C) Ferritin construct
MFVFLVLLPLVSSQCVNLTTRTQLPPAYTNSFTRGVYYPDKVFRSSVLHSTQDLFLPFFSNVTWFHAIHVSGTNGTKRFDNPVLPFNDGVYFASTEKSNIIRGWIFGTTLDSKTQSLLIVNNATNVVIKVCEFQFCNDPFLGVYYHKNNKSWMESEFRVYSSANNCTFEYVSQPFLMDLEGKQGNFKNLREFVFKNIDGYFKIYSKHTPINLVRDLPQGFSALEPLVDLPIGINITRFQTLLALHRSYLTPGDSSSGWTAGAAAYYVGYLQPRTFLLKYNENGTITDAVDCALDPLSETKCTLKSFTVEKGIYQTSNFRVQPTESIVRFPNITNLCPFGEVFNATRFASVYAWNRKRISNCVADYSFLYNSASFSTFKCYGVSPTKLNDLCFTNVYADSFVIRGDEVRQIAPGQTGKIADYNYKLPDDFTGCVIAWNSNNLDSKVGGNYNYLYRLFRKSNLKPFERDISTEIYQAGSTPCNGVEGFNCYFPLQSYGFQPTNGVGYQPYRVVVLSFELLHAPATVCGPKKSTNLVKNKCVNFNFNGLTGTGVLTESNKKFLPFQQFGRDIADTTDAVRDPQTLEILDITPCSFGGVSVITPGTNTSNQVAVLYQDVNCTEVPVAIHADQLTPTWRVYSTGSNVFQTRAGCLIGAEHVNNSYECDIPIGAGICASYQTQTNSPRRARSVASQSIIAYTMSLGAENSVAYSNNSCAIPTNFTISVTTEILPVSMTKTSVDCTMYICGDSTECSNLLLQYGSFCTQLNRALTGIAVEQDKNTQEVFAQVKQIYKTPPIKDFGGFNFSQILPDPSKPSKRSFIEDLLFNKVTLADAGFIKQYGDCLGDIAARDLICAQKFNGLTVLPPLLTDEMIAQYTSALLAGTITSGWTFGAGAALQIPFAMQMAYRFNGIGVTQNVLYENQKLIANQFNSAIGKIQDSLSSTASALGKLQDVVNQNAQALNTLVKQLSSNFGAISSVLNDILSRLDKVEAEVQIDRLITGRLQSLQTYVTQQLIRAAEIRASANLAATKMSECVLGQSKRVDFCGKGYHLMSFPQSAPHGVVFLHVTYVPAQEKNFTCAPAICHDGKAHFPREGVFVSNGTHWFVTQRNFYEPQIITTDNTFVSGNCDVVIGIVNNTVYDPLQPELDSGGGGSDIIKLLNEQVNKEMQSSNLYMSMSSWCYTHSLDGAGLFLFDHAAEEYEHAKKLIIFLNENNVPVQLTSISAPEHKFEGLTQIFQKAYEHEQHISESINNIVDHAIKSKDHATFNFLQWYVAEQHEEEVLFKDILDKIELIGNENHGLYLADQYVKGIAKSRKS

SEQ ID NO: 8991 - protein, 1315 aa, Artificial Sequence
  SARS-CoV-2/Australia/VIC01/2020__EPI_ISL_406844 spike protein (1-1147)(I712C_T1077C) Ferritin construct
MFVFLVLLPLVSSQCVNLTTRTQLPPAYTNSFTRGVYYPDKVFRSSVLHSTQDLFLPFFSNVTWFHAIHVSGTNGTKRFDNPVLPFNDGVYFASTEKSNIIRGWIFGTTLDSKTQSLLIVNNATNVVIKVCEFQFCNDPFLGVYYHKNNKSWMESEFRVYSSANNCTFEYVSQPFLMDLEGKQGNFKNLREFVFKNIDGYFKIYSKHTPINLVRDLPQGFSALEPLVDLPIGINITRFQTLLALHRRYLTPGDSSSGWTAGAAAYYVGYLQPRTFLLKYNENGTITDAVDCALDPLSETKCTLKSFTVEKGIYQTSNFRVQPTESIVRFPNITNLCPFGEVFNATRFASVYAWNRKRISNCVADYSVLYNSASFSTFKCYGVSPTKLNDLCFTNVYADSFVIRGDEVRQIAPGQTGKIADYNYKLPDDFTGCVIAWNSNNLDSKVGGNYNYLYRLFRKSNLKPFERDISTEIYQAGSTPCNGVEGFNCYFPLQSYGFQPTNGVGYQPYRVVVLSFELLHAPATVCGPKKSTNLVKNKCVNFNFNGLTGTGVLTESNKKFLPFQQFGRDIADTTDAVRDPQTLEILDITPCSFGGVSVITPGTNTSNQVAVLYQDVNCTEVPVAIHADQLTPTWRVYSTGSNVFQTRAGCLIGAEHVNNSYECDIPIGAGICASYQTQTNSPRRARSVASQSIIAYTMSLGAENSVAYSNNSCAIPTNFTISVTTEILPVSMTKTSVDCTMYICGDSTECSNLLLQYGSFCTQLNRALTGIAVEQDKNTQEVFAQVKQIYKTPPIKDFGGFNFSQILPDPSKPSKRSFIEDLLFNKVTLADAGFIKQYGDCLGDIAARDLICAQKFNGLTVLPPLLTDEMIAQYTSALLAGTITSGWTFGAGAALQIPFAMQMAYRFNGIGVTQNVLYENQKLIANQFNSAIGKIQDSLSSTASALGKLQDVVNQNAQALNTLVKQLSSNFGAISSVLNDILSRLDKVEAEVQIDRLITGRLQSLQTYVTQQLIRAAEIRASANLAATKMSECVLGQSKRVDFCGKGYHLMSFPQSAPHGVVFLHVTYVPAQEKNFTCAPAICHDGKAHFPREGVFVSNGTHWFVTQRNFYEPQIITTDNTFVSGNCDVVIGIVNNTVYDPLQPELDSGGGGSDIIKLLNEQVNKEMQSSNLYMSMSSWCYTHSLDGAGLFLFDHAAEEYEHAKKLIIFLNENNVPVQLTSISAPEHKFEGLTQIFQKAYEHEQHISESINNIVDHAIKSKDHATFNFLQWYVAEQHEEEVLFKDILDKIELIGNENHGLYLADQYVKGIAKSRKS

SEQ ID NO: 8992 - protein, 1315 aa, Artificial Sequence
  SARS-CoV-2/Germany/BavPat1/2020__EPI_ISL_406862 spike protein (1-1147)(I712C_T1077C) Ferritin construct
MFVFLVLLPLVSSQCVNLTTRTQLPPAYTNSFTRGVYYPDKVFRSSVLHSTQDLFLPFFSNVTWFHAIHVSGTNGTKRFDNPVLPFNDGVYFASTEKSNIIRGWIFGTTLDSKTQSLLIVNNATNVVIKVCEFQFCNDPFLGVYYHKNNKSWMESEFRVYSSANNCTFEYVSQPFLMDLEGKQGNFKNLREFVFKNIDGYFKIYSKHTPINLVRDLPQGFSALEPLVDLPIGINITRFQTLLALHRSYLTPGDSSSGWTAGAAAYYVGYLQPRTFLLKYNENGTITDAVDCALDPLSETKCTLKSFTVEKGIYQTSNFRVQPTESIVRFPNITNLCPFGEVFNATRFASVYAWNRKRISNCVADYSVLYNSASFSTFKCYGVSPTKLNDLCFTNVYADSFVIRGDEVRQIAPGQTGKIADYNYKLPDDFTGCVIAWNSNNLDSKVGGNYNYLYRLFRKSNLKPFERDISTEIYQAGSTPCNGVEGFNCYFPLQSYGFQPTNGVGYQPYRVVVLSFELLHAPATVCGPKKSTNLVKNKCVNFNFNGLTGTGVLTESNKKFLPFQQFGRDIADTTDAVRDPQTLEILDITPCSFGGVSVITPGTNTSNQVAVLYQGVNCTEVPVAIHADQLTPTWRVYSTGSNVFQTRAGCLIGAEHVNNSYECDIPIGAGICASYQTQTNSPRRARSVASQSIIAYTMSLGAENSVAYSNNSCAIPTNFTISVTTEILPVSMTKTSVDCTMYICGDSTECSNLLLQYGSFCTQLNRALTGIAVEQDKNTQEVFAQVKQIYKTPPIKDFGGFNFSQILPDPSKPSKRSFIEDLLFNKVTLADAGFIKQYGDCLGDIAARDLICAQKFNGLTVLPPLLTDEMIAQYTSALLAGTITSGWTFGAGAALQIPFAMQMAYRFNGIGVTQNVLYENQKLIANQFNSAIGKIQDSLSSTASALGKLQDVVNQNAQALNTLVKQLSSNFGAISSVLNDILSRLDKVEAEVQIDRLITGRLQSLQTYVTQQLIRAAEIRASANLAATKMSECVLGQSKRVDFCGKGYHLMSFPQSAPHGVVFLHVTYVPAQEKNFTCAPAICHDGKAHFPREGVFVSNGTHWFVTQRNFYEPQIITTDNTFVSGNCDVVIGIVNNTVYDPLQPELDSGGGGSDIIKLLNEQVNKEMQSSNLYMSMSSWCYTHSLDGAGLFLFDHAAEEYEHAKKLIIFLNENNVPVQLTSISAPEHKFEGLTQIFQKAYEHEQHISESINNIVDHAIKSKDHATFNFLQWYVAEQHEEEVLFKDILDKIELIGNENHGLYLADQYVKGIAKSRKS

SEQ ID NO: 8993 - protein, 1315 aa, Artificial Sequence
  SARS-CoV-2/Wuhan/HBCDC-HB-02/2020__EPI_ISL_412978 spike protein (1-1147)(I712C_T1077C) Ferritin construct
MFVFLVLLPLVSSQCVNLTTRTQLPPAYTNSFTRGVYYPDKVFRSSVLHSTQDLFLPFFSNVTWFHAIHVSGTNGTKRFDNPVLPFNDGVYFASTEKSNIIRGWIFGTTLDSKTQSLLIVNNATNVVIKVCEFQFCNDPFLGVYYHKNNKSWMESEFRVYSSANNCTFEYVSQPFLMDLEGKQGNFKNLREFVFKNIDGYFKIYSKHTPINLVRDLPQGFSALEPLVDLPIGINITRFQTLLALHRSYLTPGDSSSGWTAGAAAYYVGYLQPRTFLLKYNENGTITDAVDCALDPLSETKCTLKSFTVEKGIYQTSNFRVQPTESIVRFPNITNLCPFGEVFNATRFASVYAWNRKRISNCVADYSVLYNSASFSTFKCYGVSPTKLNDLCFTNVYADSFVIRGDEVRQIAPGQTGKIADYNYKLPDDFTGCVIAWNSNNLDSKVGGNYNYLYRLFRKSNLKPFERDISTEIYQAGSTPCNGVEGFNCYFPLQSYGFQPTNGVGYQPYRVVVLSFELLHAPATVCGPKKSTNLVKNKCVNFNFNGLTGTGVLTESNKKFLPFQQFGRDIADTTDAVRDPQTLEILDITPCSFGGVSVITPGTNTSNQVAVLYQDVNCTEVPVAIHADQLTPTWRVYSTGSNVFQTRAGCLIGAEHVNNSYECDIPIGAGICASYQTQTNSPRRARSVASQSIIAYTMSLGAENSVAYSNNSCAIPTNFTISVTTEILPVSMTKTSVDCTMYICGDSTECSNFLLQYGSFCTQLNRALTGIAVEQDKNTQEVFAQVKQIYKTPPIKDFGGFNFSQILPDPSKPSKRSFIEDLLFNKVTLADAGFIKQYGDCLGDIAARDLICAQKFNGLTVLPPLLTDEMIAQYTSALLAGTITSGWTFGAGAALQIPFAMQMAYRFNGIGVTQNVLYENQKLIANQFNSAIGKIQDSLSSTASALGKLQDVVNQNAQALNTLVKQLSSNFGAISSVLNDILSRLDKVEAEVQIDRLITGRLQSLQTYVTQQLIRAAEIRASANLAATKMSECVLGQSKRVDFCGKGYHLMSFPQSAPHGVVFLHVTYVPAQEKNFTCAPAICHDGKAHFPREGVFVSNGTHWFVTQRNFYEPQIITTDNTFVSGNCDVVIGIVNNTVYDPLQPELDSGGGGSDIIKLLNEQVNKEMQSSNLYMSMSSWCYTHSLDGAGLFLFDHAAEEYEHAKKLIIFLNENNVPVQLTSISAPEHKFEGLTQIFQKAYEHEQHISESINNIVDHAIKSKDHATFNFLQWYVAEQHEEEVLFKDILDKIELIGNENHGLYLADQYVKGIAKSRKS

SEQ ID NO: 8994 - protein, 1315 aa, Artificial Sequence
  SARS-CoV-2/Australia/QLD02/2020__EPI_ISL_407896 spike protein (1-1147)(I712C_T1077C) Ferritin construct
MFVFLVLLPLVSSQCVNLTTRTQLPPAYTNSFTRGVYYPDKVFRSSVLHSTQDLFLPFFSNVTWFHAIHVSGTNGTKRFDNPVLPFNDGVYFASTEKSNIIRGWIFGTTLDSKTQSLLIVNNATNVVIKVCEFQFCNDPFLGVYYHKNNKSWMESEFRVYSSANNCTFEYVSQPFLMDLEGKQGNFKNLREFVFKNIDGYFKIYSKHTPINLVRDLPQGFSALEPLVDLPIGINITRFQTLLALHRSYLTPGDSSSGWTAGAAAYYVGYLQPRTFLLKYNENGTITDAVDCALDPLSETKCTLKSFTVEKGIYQTSNFRVQPTESIVRFPNITNLCPFGEVFNATRFASVYAWNRKRISNCVADYSVLYNSASFSTFKCYGVSPTKLNDLCFTNVYADSFVIRGDEVRQIAPGQTGKIADYNYKLPDDFTGCVIAWNSNNLDSKVGGNYNYLYRLFRKSNLKPFERDISTEIYQAGSTPCNGVEGFNCYFPLQSYGFQPTNGVGYQPYRVVVLSFELLHAPATVCGPKKSTNLVKNKCVNFNFNGLTGTGVLTESNKKFLPFQQFGRDIADTTDAVRDPQTLEILDITPCSFGGVSVITPGTNTSNQVAVLYQDVNCTEVPVAIHADQLTPTWRVYSTGSNVFQTRAGCLIGAEHVNNSYECDIPIGAGICASYQTQTNSPRRARSVASQSIIAYTMSLGAENSVAYSNNSCAIPTNFTISVTTEILPVSMTKTSVDCTMYICGDSTECSNLLLQYGSFCTQLNRALTGIAVEQDKNTQEVFAQVKQIYKTPPIKDFGGFNFSQILPDPSKPSKRSFIEDLLFNKVTLADAGFIKQYGDCLGDIAARDLICAQKFNGLTVLPPLLTDEMIAQYTSALLAGTITSGWTFGAGAALQIPFAMQMAYRFNGIGVTQNVLYENQKLIANQFNSAIGKIQDSLSSTASALGKLQDVVNQNAQALNTLVKQLSSNFGAISSVLNDILSRLDKVEAEVQIDRLITGRLQSLQTYVTQQLIRAAEIRASANLAATKMSECVLGQSKRVDFCGKGYHLMSFPQSAPHGVVFLHVTYVPAQEKNFTCAPAICHDGKAHFPREGVFVSNGTHWFVTQRNFYEPQIITTDNTFVSGNCDVVIGIVNNTVYDPLQLELDSGGGGSDIIKLLNEQVNKEMQSSNLYMSMSSWCYTHSLDGAGLFLFDHAAEEYEHAKKLIIFLNENNVPVQLTSISAPEHKFEGLTQIFQKAYEHEQHISESINNIVDHAIKSKDHATFNFLQWYVAEQHEEEVLFKDILDKIELIGNENHGLYLADQYVKGIAKSRKS

SEQ ID NO: 8995 - protein, 1315 aa, Artificial Sequence
  SARS-CoV-2/India/1-31/2020__EPI_ISL_413523 spike protein (1-1147)(I712C_T1077C) Ferritin construct
MFVFLVLLPLVSSQCVNLTTRTQLPPAYTNSFTRGVYYPDKVFRSSVLHSTQDLFLPFFSNVTWFHAIHVSGTNGTKRFDNPVLPFNDGVYFASTEKSNIIRGWIFGTTLDSKTQSLLIVNNATNVVIKVCEFQFCNDPFLGVYYHKNNKSWMESEFRVYSSANNCTFEYVSQPFLMDLEGKQGNFKNLREFVFKNIDGYFKIYSKHTPINLVRDLPQGFSALEPLVDLPIGINITRFQTLLALHRSYLTPGDSSSGWTAGAAAYYVGYLQPRTFLLKYNENGTITDAVDCALDPLSETKCTLKSFTVEKGIYQTSNFRVQPTESIVRFPNITNLCPFGEVFNATRFASVYAWNRKRISNCVADYSVLYNSASFSTFKCYGVSPTKLNDLCFTNVYADSFVIRGDEVRQIAPGQTGKIADYNYKLPDDFTGCVIAWNSNNLDSKVGGNYNYLYRLFRKSNLKPFERDISTEIYQAGSTPCNGVEGFNCYFPLQSYGFQPTNGVGYQPYRVVVLSFELLHAPATVCGPKKSTNLVKNKCVNFNFNGLTGTGVLTESNKKFLPFQQFGRDIADTTDAVRDPQTLEILDITPCSFGGVSVITPGTNTSNQVAVLYQDVNCTEVPVAIHADQLTPTWRVYSTGSNVFQTRAGCLIGAEHVNNSYECDIPIGAGICASYQTQTNSPRRARSVASQSIIAYTMSLGAENSVAYSNNSCAIPTNFTISVTTEILPVSMTKTSVDCTMYICGDSTECSNLLLQYGSFCTQLNRALTGIAVEQDKNTQEVFAQVKQIYKTPPIKDFGGFNFSQILPDPSKPSKRSFIEDLLFNKVTLADAGFIKQYGDCLGDIAARDLICAQKFNGLTVLPPLLTDEMIAQYTSALLAGTITSGWTFGAGAALQIPFAMQMAYRFNGIGVTQNVLYENQKLIANQFNSVIGKIQDSLSSTASALGKLQDVVNQNAQALNTLVKQLSSNFGAISSVLNDILSRLDKVEAEVQIDRLITGRLQSLQTYVTQQLIRAAEIRASANLAATKMSECVLGQSKRVDFCGKGYHLMSFPQSAPHGVVFLHVTYVPAQEKNFTCAPAICHDGKAHFPREGVFVSNGTHWFVTQRNFYEPQIITTDNTFVSGNCDVVIGIVNNTVYDPLQPELDSGGGGSDIIKLLNEQVNKEMQSSNLYMSMSSWCYTHSLDGAGLFLFDHAAEEYEHAKKLIIFLNENNVPVQLTSISAPEHKFEGLTQIFQKAYEHEQHISESINNIVDHAIKSKDHATFNFLQWYVAEQHEEEVLFKDILDKIELIGNENHGLYLADQYVKGIAKSRKS

SEQ ID NO: 8996 - protein, 1315 aa, Artificial Sequence
  SARS-CoV-2/Guangdong/GD2020087-P0008/2020__EPI_ISL_413863 spike protein (1-1147)(I712C_T1077C) Ferritin construct
MFVFLVLLPLVSSQCVNLTTRTQLPPAYTNSFTRGVYYPDKVFRSSVLHSTQDLFLPFFSNVTWFHAIHVSGTNGTKRFDNPVLPFNDGVYFASTEKSNIIRGWIFGTTLDSKTQSLLIVNNATNVVIKVCEFQFCNDPFLGVYYHKNNKSWMESEFRVYSSANNCTFEYVSQPFLMDLEGKQGNFKNLREFVFKNIDGYFKIYSKHTPINLVRDLPQGFSALEPLVDLPIGINITRFQTLLALHRSYLTPGDSSSGWTAGAAAYYVGYLQPRTFLLKYNENGTITDAVDCALDPLSETKCTLKSFTVEKGIYQTSNFRVQPTESIVRFPNITNLCPFGEVFNATRFASVYAWNRKRISNCVADYSVLYNSASFSTFKCYGVSPTKLNDLCFTNVYADSFVIRGDEVREIAPGQTGKIADYNYKLPDDFTGCVIAWNSNNLDSKVGGNYNYLYRLFRKSNLKPFERDISTEIYQAGSTPCNGVEGFNCYFPLQSYGFQPTNGVGYQPYRVVVLSFELLHAPATVCGPKKSTNLVKNKCVNFNFNGLTGTGVLTESNKKFLPFQQFGRDIADTTDAVRDPQTLEILDITPCSFGGVSVITPGTNTSNQVAVLYQDVNCTEVPVAIHADQLTPTWRVYSTGSNVFQTRAGCLIGAEHVNNSYECDIPIGAGICASYQTQTNSPRRARSVASQSIIAYTMSLGAENSVAYSNNSCAIPTNFTISVTTEILPVSMTKTSVDCTMYICGDSTECSNLLLQYGSFCTQLNRALTGIAVEQDKNTQEVFAQVKQIYKTPPIKDFGGFNFSQILPDPSKPSKRSFIEDLLFNKVTLADAGFIKQYGDCLGDIAARDLICAQKFNGLTVLPPLLTDEMIAQYTSALLAGTITSGWTFGAGAALQIPFAMQMAYRFNGIGVTQNVLYENQKLIANQFNSAIGKIQDSLSSTASALGKLQDVVNQNAQALNTLVKQLSSNFGAISSVLNDILSRLDKVEAEVQIDRLITGRLQSLQTYVTQQLIRAAEIRASANLAATKMSECVLGQSKRVDFCGKGYHLMSFPQSAPHGVVFLHVTYVPAQEKNFTCAPAICHDGKAHFPREGVFVSNGTHWFVTQRNFYEPQIITTDNTFVSGNCDVVIGIVNNTVYDPLQPELDSGGGGSDIIKLLNEQVNKEMQSSNLYMSMSSWCYTHSLDGAGLFLFDHAAEEYEHAKKLIIFLNENNVPVQLTSISAPEHKFEGLTQIFQKAYEHEQHISESINNIVDHAIKSKDHATFNFLQWYVAEQHEEEVLFKDILDKIELIGNENHGLYLADQYVKGIAKSRKS

SEQ ID NO: 8997 - protein, 1315 aa, Artificial Sequence
  SARS-CoV-2/Sweden/01/2020__EPI_ISL_411951 spike protein (1-1147)(I712C_T1077C) Ferritin construct
MFVFLVLLPLVSSQCVNLTTRTQLPPAYTNSFTRGVYYPDKVFRSSVLHSTQDLFLPFFSNVTWFHAIHVSGTNGTKRFDNPVLPFNDGVYFASTEKSNIIRGWIFGTTLDSKTQSLLIVNNATNVVIKVCEFQFCNDPFLGVYYHKNNKSWMESEFRVYSSANNCTFEYVSQPFLMDLEGKQGNFKNLREFVFKNIDGYFKIYSKHTPINLVRDLPQGFSALEPLVDLPIGINITRFQTLLALHRSYLTPGDSSSGWTAGAAAYYVGYLQPRTFLLKYNENGTITDAVDCALDPLSETKCTLKSFTVEKGIYQTSNFRVQPTESIVRFPNITNLCPFGEVFNATRFASVYAWNRKRISNCVADYSVLYNSASFSTFKCYGVSPTKLNDLCFTNVYADSFVIRGDEVRQIAPGQTGKIADYNYKLPDDFTGCVIAWNSNNLDSKVGGNYNYLYRLFRKSNLKPFERDISTEIYQAGSTPCNGVEGFNCYFPLQSYGFQPTNGVGYQPYRVVVLSFELLHAPATVCGPKKSTNLVKNKCVNFNFNGLTGTGVLTESNKKFLPFQQFGRDIADTTDAVRDPQTLEILDITPCSFGGVSVITPGTNTSNQVAVLYQDVNCTEVPVAIHADQLTPTWRVYSTGSNVFQTRAGCLIGAEHVNNSYECDIPIGAGICASYQTQTNSPRRARSVASQSIIAYTMSLGAENSVAYSNNSCAIPTNFTISVTTEILPVSMTKTSVDCTMYICGDSTECSNLLLQYGSFCTQLNRALTGIAVEQDKNTQEVFAQVKQIYKTPPIKDCGGFNFSQILPDPSKPSKRSFIEDLLFNKVTLADAGFIKQYGDCLGDIAARDLICAQKFNGLTVLPPLLTDEMIAQYTSALLAGTITSGWTFGAGAALQIPFAMQMAYRFNGIGVTQNVLYENQKLIANQFNSAIGKIQDSLSSTASALGKLQDVVNQNAQALNTLVKQLSSNFGAISSVLNDILSRLDKVEAEVQIDRLITGRLQSLQTYVTQQLIRAAEIRASANLAATKMSECVLGQSKRVDFCGKGYHLMSFPQSAPHGVVFLHVTYVPAQEKNFTCAPAICHDGKAHFPREGVFVSNGTHWFVTQRNFYEPQIITTDNTFVSGNCDVVIGIVNNTVYDPLQPELDSGGGGSDIIKLLNEQVNKEMQSSNLYMSMSSWCYTHSLDGAGLFLFDHAAEEYEHAKKLIIFLNENNVPVQLTSISAPEHKFEGLTQIFQKAYEHEQHISESINNIVDHAIKSKDHATFNFLQWYVAEQHEEEVLFKDILDKIELIGNENHGLYLADQYVKGIAKSRKS

SEQ ID NO: 8998 - protein, 1315 aa, Artificial Sequence
  SARS-CoV-2/Tianmen/HBCDC-HB-07/2020__EPI_ISL_412983 spike protein (1-1147)(I712C_T1077C) Ferritin construct
MFVFLVLLPLVSSQCVNLTTRTQLPPAYTNSFTRGVYYPDKVFRSSVLHSTQDLFLPFFSNVTWFHAIHVSGTNGTKRFDNPVLPFNDGVYFASTEKSNIIRGWIFGTTLDSKTQSLLIVNNATNVVIKVCEFQFCNDPFLGVYYHKNNKSWMESEFRVYSSANNCTFEYVSQPFLMDLEGKQGNFKNLREFVFKNIDGYFKIYSKHTPINLVRDLPQGFSALEPLVDLPIGINITRFQTLLALHRSYLTPGDSSSGWTAGAAAYYVGYLQPRTFLLKYNENGTITDAVDCALDPLSETKCTLKSFTVEKGIYQTSNFRVQPTESIVRFPNITNLCPFGEVFNATRFASVYAWNRKRISNCVADYSVLYNSASFSTFKCYGVSPTKLNDLCFTNVYADSFVIRGDEVRQIAPGQTGKIADYNYKLPDDFTGCVIAWNSNNLDSKVGGNYNYLYRLFRKSNLKPFERDISTEIYQAGSTPCNGVEGFNCYFPLQSYGFQPTNGVGYQPYRVVVLSFELLHAPATVCGPKKSTNLVKNKCVNFNFNGLTGTGVLTESNKKFLPFQQFGRDIADTTDAVRDPQTLEILDITPCSFGGVSVITPGTNTSNQVAVLYQDLNCTEVPVAIHADQLTPTWRVYSTGSNVFQTRAGCLIGAEHVNNSYECDIPIGAGICASYQTQTNSPRRARSVASQSIIAYTMSLGAENSVAYSNNSCAIPTNFTISVTTEILPVSMTKTSVDCTMYICGDSTECSNLLLQYGSFCTQLNRALTGIAVEQDKNTQEVFAQVKQIYKTPPIKDFGGFNFSQILPDPSKPSKRSFIEDLLFNKVTLADAGFIKQYGDCLGDIAARDLICAQKFNGLTVLPPLLTDEMIAQYTSALLAGTITSGWTFGAGAALQIPFAMQMAYRFNGIGVTQNVLYENQKLIANQFNSAIGKIQDSLSSTASALGKLQDVVNQNAQALNTLVKQLSSNFGAISSVLNDILSRLDKVEAEVQIDRLITGRLQSLQTYVTQQLIRAAEIRASANLAATKMSECVLGQSKRVDFCGKGYHLMSFPQSAPHGVVFLHVTYVPAQEKNFTCAPAICHDGKAHFPREGVFVSNGTHWFVTQRNFYEPQIITTDNTFVSGNCDVVIGIVNNTVYDPLQPELDSGGGGSDIIKLLNEQVNKEMQSSNLYMSMSSWCYTHSLDGAGLFLFDHAAEEYEHAKKLIIFLNENNVPVQLTSISAPEHKFEGLTQIFQKAYEHEQHISESINNIVDHAIKSKDHATFNFLQWYVAEQHEEEVLFKDILDKIELIGNENHGLYLADQYVKGIAKSRKS

SEQ ID NO: 8999 - protein, 1315 aa, Artificial Sequence
  SARS-CoV-2/Hong Kong/case42_VM20002493/2020__EPI_ISL_414527 spike protein (1-1147)(I712C_T1077C) Ferritin construct
MFVFLVLLPLVSSQCVNLTTRTQLPPAYTNSFTRGVYYPDKVFRSSVLHSTQDLFLPFFSNVTWFHAIHVSGTNGTKRFDNPVLPFNDGVYFASTEKSNIIRGWIFGTTLDSKTQSLLIVNNATNVVIKVCEFQFCNDPFLGVYYHKNNKSWMESEFRVYSSANNCTFEYVSQPFLMDLEGKQGNFKNLREFVFKNIDGYFKIYSKHTPINLVRDLPQGFSALEPLVDLPIGINITRFQTLLALHRSYLTPGDSSSGWTAGAAAYYVGYLQPRTFLLKYNENGTITDAVDCALDPLSETKCTLKSFTVEKGIYQTSNFRVQPTESIVRFPNITNLCPFGEVFNATRFASVYAWNRKRISNCVADYSVLYNSASFSTFKCYGVSPTKLNDLCFTNVYADSFVIRGDEVRQIAPGQTGKIADYNYKLPDDFTGCVIAWNSNNLDSKVGGNYNYLYRLFRKSNLKPFERDISTEIYQAGSTPCNGVEGFNCYFPLQSYGFQPTNGVGYQPYRVVVLSFELLHAPATVCGPKKSTNLVKNKCVNFNFNGLTGTGVLTESNKKFLPFQQFGRDIADTTDAVRDPQTLEILDITPCSFGGVSVITPGTNTSNQVAVLYQDVNCTEVPVAIHADQLTPTWRVYSTGSNVFQTRAGCLIGAEHVNNSYECDIPIGAGICASYQTQTNSPRRARSVASQSIIAYTMSLGAENSVAYSNNSCAIPTNFAISVTTEILPVSMTKTSVDCTMYICGDSTECSNLLLQYGSFCTQLNRALTGIAVEQDKNTQEVFAQVKQIYKTPPIKDFGGFNFSQILPDPSKPSKRSFIEDLLFNKVTLADAGFIKQYGDCLGDIAARDLICAQKFNGLTVLPPLLTDEMIAQYTSALLAGTITSGWTFGAGAALQIPFAMQMAYRFNGIGVTQNVLYENQKLIANQFNSAIGKIQDSLSSTASALGKLQDVVNQNAQALNTLVKQLSSNFGAISSVLNDILSRLDKVEAEVQIDRLITGRLQSLQTYVTQQLIRAAEIRASANLAATKMSECVLGQSKRVDFCGKGYHLMSFPQSAPHGVVFLHVTYVPAQEKNFTCAPAICHDGKAHFPREGVFVSNGTHWFVTQRNFYEPQIITTDNTFVSGNCDVVIGIVNNTVYDPLQPELDSGGGGSDIIKLLNEQVNKEMQSSNLYMSMSSWCYTHSLDGAGLFLFDHAAEEYEHAKKLIIFLNENNVPVQLTSISAPEHKFEGLTQIFQKAYEHEQHISESINNIVDHAIKSKDHATFNFLQWYVAEQHEEEVLFKDILDKIELIGNENHGLYLADQYVKGIAKSRKS

SEQ ID NO: 9000 - protein, 1315 aa, Artificial Sequence
  SARS-CoV-2/USA/CruiseA-23/2020__EPI_ISL_414482 spike protein (1-1147)(I712C_T1077C) Ferritin construct
MFVFLVLLPLVSSQCVNLTTRTQLPPAYTNSFTRGVYYPDKVFRSSVLHSTQDLFLPFFSNVTWFHAIHVSGTNGTKRFDNPVLPFNDGVYFASTEKSNIIRGWIFGTTLDSKTQSLLIVNNATNVVIKVCEFQFCNDPFLGVYYHKNNKSWMESEFRVYSSANNCTFEYVSQPFLMDLEVKQGNFKNLREFVFKNIDGYFKIYSKHTPINLVRDLPQGFSALEPLVDLPIGINITRFQTLLALHRSYLTPGDSSSGWTAGAAAYYVGYLQPRTFLLKYNENGTITDAVDCALDPLSETKCTLKSFTVEKGIYQTSNFRVQPTESIVRFPNITNLCPFGEVFNATRFASVYAWNRKRISNCVADYSVLYNSASFSTFKCYGVSPTKLNDLCFTNVYADSFVIRGDEVRQIAPGQTGKIADYNYKLPDDFTGCVIAWNSNNLDSKVGGNYNYLYRLFRKSNLKPFERDISTEIYQAGSTPCNGVEGFNCYFPLQSYGFQPTNGVGYQPYRVVVLSFELLHAPATVCGPKKSTNLVKNKCVNFNFNGLTGTGVLTESNKKFLPFQQFGRDIADTTDAVRDPQTLEILDITPCSFGGVSVITPGTNTSNQVAVLYQDVNCTEVPVAIHADQLTPTWRVYSTGSNVFQTRAGCLIGAEHVNNSYECDIPIGAGICASYQTQTNSPRRARSVASQSIIAYTMSLGAENSVAYSNNSCAIPTNFTISVTTEILPVSMTKTSVDCTMYICGDSTECSNLLLQYGSFCTQLNRALTGIAVEQDKNTQEVFAQVKQIYKTPPIKDFGGFNFSQILPDPSKPSKRSFIEDLLFNKVTLADAGFIKQYGDCLGDIAARDLICAQKFNGLTVLPPLLTDEMIAQYTSALLAGTITSGWTFGAGAALQIPFAMQMAYRFNGIGVTQNVLYENQKLIANQFNSAIGKIQDSLSSTASALGKLQDVVNQNAQALNTLVKQLSSNFGAISSVLNDILSRLDKVEAEVQIDRLITGRLQSLQTYVTQQLIRAAEIRASANLAATKMSECVLGQSKRVDFCGKGYHLMSFPQSAPHGVVFLHVTYVPAQEKNFTCAPAICHDGKAHFPREGVFVSNGTHWFVTQRNFYEPQIITTDNTFVSGNCDVVIGIVNNTVYDPLQPELDSGGGGSDIIKLLNEQVNKEMQSSNLYMSMSSWCYTHSLDGAGLFLFDHAAEEYEHAKKLIIFLNENNVPVQLTSISAPEHKFEGLTQIFQKAYEHEQHISESINNIVDHAIKSKDHATFNFLQWYVAEQHEEEVLFKDILDKIELIGNENHGLYLADQYVKGIAKSRKS

SEQ ID NO: 9001 - protein, 1315 aa, Artificial Sequence
  SARS-CoV-2/Hong Kong/case85_VM20002868/2020__EPI_ISL_414519 spike protein (1-1147)(I712C_T1077C) Ferritin construct
MFVFLVLVPLVSSQCVNLTTRTQLPPAYTNSFTRGVYYPDKVFRSSVLHSTQDLFLPFFSNVTWFHAIHVSGTNGTKRFDNPVLPFNDGVYFASTEKSNIIRGWIFGTTLDSKTQSLLIVNNATNVVIKVCEFQFCNDPFLGVYYHKNNKSWMESEFRVYSSANNCTFEYVSQPFLMDLEGKQGNFKNLREFVFKNIDGYFKIYSKHTPINLVRDLPQGFSALEPLVDLPIGINITRFQTLLALHRSYLTPGDSSSGWTAGAAAYYVGYLQPRTFLLKYNENGTITDAVDCALDPLSETKCTLKSFTVEKGIYQTSNFRVQPTESIVRFPNITNLCPFGEVFNATRFASVYAWNRKRISNCVADYSVLYNSASFSTFKCYGVSPTKLNDLCFTNVYADSFVIRGDEVRQIAPGQTGKIADYNYKLPDDFTGCVIAWNSNNLDSKVGGNYNYLYRLFRKSNLKPFERDISTEIYQAGSTPCNGVEGFNCYFPLQSYGFQPTNGVGYQPYRVVVLSFELLHAPATVCGPKKSTNLVKNKCVNFNFNGLTGTGVLTESNKKFLPFQQFGRDIADTTDAVRDPQTLEILDITPCSFGGVSVITPGTNTSNQVAVLYQDVNCTEVPVAIHADQLTPTWRVYSTGSNVFQTRAGCLIGAEHVNNSYECDIPIGAGICASYQTQTNSPRRARSVASQSIIAYTMSLGAENSVAYSNNSCAIPTNFTISVTTEILPVSMTKTSVDCTMYICGDSTECSNLLLQYGSFCTQLNRALTGIAVEQDKNTQEVFAQVKQIYKTPPIKDFGGFNFSQILPDPSKPSKRSFIEDLLFNKVTLADAGFIKQYGDCLGDIAARDLICAQKFNGLTVLPPLLTDEMIAQYTSALLAGTITSGWTFGAGAALQIPFAMQMAYRFNGIGVTQNVLYENQKLIANQFNSAIGKIQDSLSSTASALGKLQDVVNQNAQALNTLVKQLSSNFGAISSVLNDILSRLDKVEAEVQIDRLITGRLQSLQTYVTQQLIRAAEIRASANLAATKMSECVLGQSKRVDFCGKGYHLMSFPQSAPHGVVFLHVTYVPAQEKNFTCAPAICHDGKAHFPREGVFVSNGTHWFVTQRNFYEPQIITTDNTFVSGNCDVVIGIVNNTVYDPLQPELDSGGGGSDIIKLLNEQVNKEMQSSNLYMSMSSWCYTHSLDGAGLFLFDHAAEEYEHAKKLIIFLNENNVPVQLTSISAPEHKFEGLTQIFQKAYEHEQHISESINNIVDHAIKSKDHATFNFLQWYVAEQHEEEVLFKDILDKIELIGNENHGLYLADQYVKGIAKSRKS

SEQ ID NO: 9002 - protein, 1315 aa, Artificial Sequence; identical to SEQ ID NO: 8992
  SARS-CoV-2/England/200990660/2020__EPI_ISL_414523 spike protein (1-1147)(I712C_T1077C) Ferritin construct

SEQ ID NO: 9003 - protein, 1315 aa, Artificial Sequence
  SARS-CoV-2/Australia/NSW09/2020__EPI_ISL_413595 spike protein (1-1147)(I712C_T1077C) Ferritin construct
MFVFLVLLPLVSSQCVNLTTRTQLPPAYTNSFTRGVYYPDKVFRSSVLHSTQDLFLPFFSNVTWFHAIHVSGTNGTKRFDNPVLPFNDGVYFASTEKSNIIRGWIFGTTLDSKTQSLLIVNNATNVVIKVCEFQFCNDPFLGVYYHKNNKSWMESEFRVYSSANNCTFEYVSQPFLMDLEGKQGNFKNLREFVFKNIDGYFKIYSKHTPINLVRDLPQGFSALEPLVDLPIGINITRFQTLLALHRSYLTPGDSSSGWTAGAAAYYVGYLQPRTFLLKYNENGTITDAVDCALDPLSETKCTLKSFTVEKGIYQTSNFRVQPTESIVRFPNITNLCPFGEVFNATRFASVYAWNRKRISNCVADYSVLYNSASFSTFKCYGVSPTKLNDLCFTNVYADSFVIRGDEVRQIAPGQTGKIADYNYKLPDDFTGCVIAWNSNNLDSKVGGNYNYLYRLFRKSNLKPFERDISTEIYQAGSTPCNGVEGFNCYFPLQSYGFQPTNGVGYQPYRVVVLSFELLHAPATVCGPKKSTNLVKNKCVNFNFNGLTGTGVLTESNKKFLPFQQFGRDIADTTDAVRDPQTLEILDITPCSFGGVSVITPGTNTSNQVAVLYQDVNCTEVPVAIHADQLTPTWRVYSTGSNVFQTRAGCLIGAEHVNNSYECDIPIGAGICASYQTQTNSPRRARSVASQSIIAYTMSLGAENSVAYSNNSCAIPTNFTISVTTEILPVSMTKTSVDCTMYICGDSTECSNLLLQYGSFCTQLNRALTGIAVEQDKNTQEVFAQVKQIYKTPPIKDFGGFNFSQILPDPSKPSKRSFIEDLLFNKVTLADAGFIKQYGDCLGDIAARDLICAQKFNGLTVLPPLLTDEMIAQYTSALLAGTITSGWTFGAGAALQIPFAMQMAYRFNGIGVTQNVLYENQKLIANQFNSAIGKIQDSLSFTASALGKLQDVVNQNAQALNTLVKQLSSNFGAISSVLNDILSRLDKVEAEVQIDRLITGRLQSLQTYVTQQLIRAAEIRASANLAATKMSECVLGQSKRVDFCGKGYHLMSFPQSAPHGVVFLHVTYVPAQEKNFTCAPAICHDGKAHFPREGVFVSNGTHWFVTQRNFYEPQIITTDNTFVSGNCDVVIGIVNNTVYDPLQPELDSGGGGSDIIKLLNEQVNKEMQSSNLYMSMSSWCYTHSLDGAGLFLFDHAAEEYEHAKKLIIFLNENNVPVQLTSISAPEHKFEGLTQIFQKAYEHEQHISESINNIVDHAIKSKDHATFNFLQWYVAEQHEEEVLFKDILDKIELIGNENHGLYLADQYVKGIAKSRKS

SEQ ID NO: 9004 - protein, 1315 aa, Artificial Sequence; identical to SEQ ID NO: 8984
  SARS-CoV-2/Australia/NSW10/2020__EPI_ISL_413596 spike protein (1-1147)(I712C_T1077C) Ferritin construct

SEQ ID NO: 9005 - protein, 1315 aa, Artificial Sequence
  SARS-CoV-2/Switzerland/1000477797/2020__EPI_ISL_413023 spike protein (1-1147)(I712C_T1077C) Ferritin construct
MFVFLVLLPLVSSQCVNLTTRTQLPPAYTNSFTRGVYYPDKVFRSSVLHSTQDLFLPFFSNVTWFHAIHVSGTNGTKRFDNPVLPFNDGVYFASTEKSNIIRGWIFGTTLDSKTQSLLIVNNATNVVIKVCEFQFCNDPFLGVYYHKNNKSWMESEFRVYSSANNCTFEYVSQPFLMDLEGKQGNFKNLREFVFKNIDGYFNIYSKHTPINLVRDLPQGFSALEPLVDLPIGINITRFQTLLALHRSYLTPGDSSSGWTAGAAAYYVGYLQPRTFLLKYNENGTITDAVDCALDPLSETKCTLKSFTVEKGIYQTSNFRVQPTESIVRFPNITNLCPFGEVFNATRFASVYAWNRKRISNCVADYSVLYNSASFSTFKCYGVSPTKLNDLCFTNVYADSFVIRGDEVRQIAPGQTGKIADYNYKLPDDFTGCVIAWNSNNLDSKVGGNYNYLYRLFRKSNLKPFERDISTEIYQAGSTPCNGVEGFNCYFPLQSYGFQPTNGVGYQPYRVVVLSFELLHAPATVCGPKKSTNLVKNKCVNFNFNGLTGTGVLTESNKKFLPFQQFGRDIADTTDAVRDPQTLEILDITPCSFGGVSVITPGTNTSNQVAVLYQGVNCTEVPVAIHADQLTPTWRVYSTGSNVFQTRAGCLIGAEHVNNSYECDIPIGAGICASYQTQTNSPRRARSVASQSIIAYTMSLGAENSVAYSNNSCAIPTNFTISVTTEILPVSMTKTSVDCTMYICGDSTECSNLLLQYGSFCTQLNRALTGIAVEQDKNTQEVFAQVKQIYKTPPIKDFGGFNFSQILPDPSKPSKRSFIEDLLFNKVTLADAGFIKQYGDCLGDIAARDLICAQKFNGLTVLPPLLTDEMIAQYTSALLAGTITSGWTFGAGAALQIPFAMQMAYRFNGIGVTQNVLYENQKLIANQFNSAIGKIQDSLSSTASALGKLQDVVNQNAQALNTLVKQLSSNFGAISSVLNDILSRLDKVEAEVQIDRLITGRLQSLQTYVTQQLIRAAEIRASANLAATKMSECVLGQSKRVDFCGKGYHLMSFPQSAPHGVVFLHVTYVPAQEKNFTCAPAICHDGKAHFPREGVFVSNGTHWFVTQRNFYEPQIITTDNTFVSGNCDVVIGIVNNTVYDPLQPELDSGGGGSDIIKLLNEQVNKEMQSSNLYMSMSSWCYTHSLDGAGLFLFDHAAEEYEHAKKLIIFLNENNVPVQLTSISAPEHKFEGLTQIFQKAYEHEQHISESINNIVDHAIKSKDHATFNFLQWYVAEQHEEEVLFKDILDKIELIGNENHGLYLADQYVKGIAKSRKS

SEQ ID NO: 9006 - protein, 1315 aa, Artificial Sequence
  SARS-CoV-2/Belgium/BA-02291/2020__EPI_ISL_415159 spike protein (1-1147)(I712C_T1077C) Ferritin construct
MFVFLVLLPLVSSQCVNLTTRTQLPPAYTNSFTRGVYYPDKVFRSSVLHSTQDLFLPFFSNVTWFHAIHVSGTNGTKRFDNPVLPFNDGVYFASTEKSNIIRGWIFGTTLDSKTQSLLIVNNATNVVIKVCEFQFCNDPFLGVYYHKNNKSWMESEFRVYSSANNCTFEYVSQPFLMDLEGKQGNFKNLREFVFKNIDGYFKIYSKHTPINLVRDLPQGFSALEPLVDLPIGINITRFQTLLALHRSYLTPGDSSSGWTAGAAAYYVGYLQPRTFLLKYNENGTITDAVDCALDPLSETKCTLKSFTVEKGIYQTSNFRVQPTESIVRFPNITNLCPFGEVFNATRFASVYAWNRKRISNCVADYSVLYNSASFSTFKCYGVSPTKLNDLCFTNVYADSFVIRGDEVRQIAPGQTGKIADYNYKLPDDFTGCVIAWNSNNLDSKVGGNYNYLYRLFRRSNLKPFERDISTEIYQAGSTPCNGVEGFNCYFPLQSYGFQPTNGVGYQPYRVVVLSFELLPAPATVCGPKKSTNLVKNKCVNFNFNGLTGTGVLTESNKKFLPFQQFGRDIADTTDAVRDPQTLEILDITPCSFGGVSVITPGTNTSNQVAVLYQGVNCTEVPVAIHADQLTPTWRVYSTGSNVFQTRAGCLIGAEHVNNSYECDIPIGAGICASYQTQTNSPRRARSVASQSIIAYTMSLGAENSVAYSNNSCAIPTNFTISVTTEILPVSMTKTSVDCTMYICGDSTECSNLLLQYGSFCTQLNRALTGIAVEQDKNTQEVFAQVKQIYKTPPIKDFGGFNFSQILPDPSKPSKRSFIEDLLFNKVTLADAGFIKQYGDCLGDIAARDLICAQKFNGLTVLPPLLTDEMIAQYTSALLAGTITSGWTFGAGAALQIPFAMQMAYRFNGIGVTQNVLYENQKLIANQFNSAIGKIQDSLSSAAPALGKLQDVVNQNAQALNTLVKQLSSNFGAISSVLNDILSRLDKVEAEVQIDRLITGRLQSLQTYVTQQLIRAAEIRASANLAATKMSECVLGQSKRVDFCGKGYHLMSFPQSAPHGVVFLHVTYVPAQEKNFTCAPAICHDGKAHFPREGVFVSNGTHWFVTQRNFYEPQIITTDNTFVSGNCDVVIGIVNNTVYDPLQPELDSGGGGSDIIKLLNEQVNKEMQSSNLYMSMSSWCYTHSLDGAGLFLFDHAAEEYEHAKKLIIFLNENNVPVQLTSISAPEHKFEGLTQIFQKAYEHEQHISESINNIVDHAIKSKDHATFNFLQWYVAEQHEEEVLFKDILDKIELIGNENHGLYLADQYVKGIAKSRKS

SEQ ID NO: 9007 - protein, 1315 aa, Artificial Sequence
  SARS-CoV-2/USA/WA8-UW5/2020__EPI_ISL_413486 spike protein (1-1147)(I712C_T1077C) Ferritin construct
MFVFLVLLPLVSSQCVNLTTRTQLPPAYTNSFTRGVYYPDKVFRSSVLHSTQDLFLPFFSNVTWFHAIHVSGTNGTKRFDNPVLPFNDGVYFASTEKSNIIRGWIFGTTLDSKTQSLLIVNNATNVVIKVCEFQFCNDPFLGVYYHKNNKSWMESEFRVYSSANNCTFEYVSQPFLMDLEGKQGNFKNLREFVFKNIDGYFKIYSKHTPINLVRDLPQGFSALEPLVDLPIGINITRFQTLLALHRSYLTPGDSSSGWTAGAAAYYVGYLQPRTFLLKYNENGTITDAVDCALDPLSETKCTLKSFTVEKGIYQTSNFRVQPTESIVRFPNITNLCPFGEVFNATRFASVYAWNRKRISNCVADYSVLYNSASFSTFKCYGVSPTKLNDLCFTNVYADSFVIRGDEVRQIAPGQTGKIADYNYKLPDDFTGCVIAWNSNNLDSKVGGNYNYLYRLFRKSNLKPFERDISTEIYQAGSTPCNGVEGFNCYFPLQSYGFQPTNGVGYQPYRVVVLSFELLHAPATVCGPKKSTNLVKNKCVNFNFNGLTGTGVLTESNKKFLPFQQFGRDIADTTDAVRDPQTLEILDITPCSFGGVSVITPGTNTSNQVAVLYQDVNCTEVPVAIHADQLTPTWRVYSTGSNVFQTRAGCLIGAEYVNNSYECDIPIGAGICASYQTQTNSPRRARSVASQSIIAYTMSLGAENSVAYSNNSCAIPTNFTISVTTEILPVSMTKTSVDCTMYICGDSTECSNLLLQYGSFCTQLNRALTGIAVEQDKNTQEVFAQVKQIYKTPPIKDFGGFNFSQILPDPSKPSKRSFIEDLLFNKVTLADAGFIKQYGDCLGDIAARDLICAQKFNGLTVLPPLLTDEMIAQYTSALLAGTITSGWTFGAGAALQIPFAMQMAYRFNGIGVTQNVLYENQKLIANQFNSAIGKIQDSLSSTASALGKLQDVVNQNAQALNTLVKQLSSNFGAISSVLNDILSRLDKVEAEVQIDRLITGRLQSLQTYVTQQLIRAAEIRASANLAATKMSECVLGQSKRVDFCGKGYHLMSFPQSAPHGVVFLHVTYVPAQEKNFTCAPAICHDGKAHFPREGVFVSNGTHWFVTQRNFYEPQIITTDNTFVSGNCDVVIGIVNNTVYDPLQPELDSGGGGSDIIKLLNEQVNKEMQSSNLYMSMSSWCYTHSLDGAGLFLFDHAAEEYEHAKKLIIFLNENNVPVQLTSISAPEHKFEGLTQIFQKAYEHEQHISESINNIVDHAIKSKDHATFNFLQWYVAEQHEEEVLFKDILDKIELIGNENHGLYLADQYVKGIAKSRKS

SEQ ID NO: 9008 - protein, 1315 aa, Artificial Sequence
  SARS-CoV-2/England/20102000506/2020__EPI_ISL_415147 spike protein (1-1147)(I712C_T1077C) Ferritin construct
MFVFLVLLPLVSSQCVNLTTRTQLPPAYTNSFTRGVYYPDKVFRSSVLHSTQDLFLPFFSNVTWFHAIHVSGTNGTKRFDNPVLPFNDGVYFASTEKSNIIRGWIFGTTLDSKTQSLLIVNNATNVVIKVCEFQFCNDPFLGVYYHKNNKSWMESEFRVYSSANNCTFEYVSQPFLMDLEGKQGNFKNLREFVFKNIDGYFKIYSKHTPINLVRDLPQGFSALEPLVDLPIGINITRFQTLLALHRSYLTPGDSSSGWTAGAAAYYVGYLQPRTFLLKYNENGTITDAVDCALDPLSETKCTLKSFTVEKGIYQTSNFRVQPTESIVRFPNITNLCPFGEVFNATRFASVYAWNRKRISNCVADYSVLYNSASFSTFKCYGVSPTKLNDLCFTNVYADSFVIRGDEVRQIAPGQTGKIADYNYKLPDDFTGCVIAWNSNNLDSKVGGNYNYLYRLFRKSNLKPFERDISTEIYQAGSTPCNGVEGFNCYFPLQSYGFQPTNGVGYQPYRVVVLSFELLHAPATVCGPKKSTNLVKNKCVNFNFNGLTGTGVLTESNKKFLPFQQFGRDIADTTDAVRDPQTLEILDITPCSFGGVSVITPGTNTSNQVAVLYQGVNCTEVPVAIHADQLTPTWRVYSTGSNVFQTRAGCLIGAEHVNNSYECDIPIGAGICASYQTQTNSPRRARSVASQSIIAYTMSLGAENSVAYSNNSCAIPTNFTISVTTEILPVSMTKTSVDCTMYICGDSTECSNLLLQYGSFCTQLNRALTGIAVEQDKNTQEVFAQVKQIYKTPPIKDFGGFNFSQILPDPSKPSKRSFIEDLLFNKVTLADAGFIKQYGYCLGDIAARDLICAQKFNGLTVLPPLLTDEMIAQYTSALLAGTITSGWTFGAGAALQIPFAMQMAYRFNGIGVTQNVLYENQKLIANQFNSAIGKIQDSLSSTASALGKLQDVVNQNAQALNTLVKQLSSNFGAISSVLNDILSRLDKVEAEVQIDRLITGRLQSLQTYVTQQLIRAAEIRASANLAATKMSECVLGQSKRVDFCGKGYHLMSFPQSAPHGVVFLHVTYVPAQEKNFTCAPAICHDGKAHFPREGVFVSNGTHWFVTQRNFYEPQIITTDNTFVSGNCDVVIGIVNNTVYDPLQPELDSGGGGSDIIKLLNEQVNKEMQSSNLYMSMSSWCYTHSLDGAGLFLFDHAAEEYEHAKKLIIFLNENNVPVQLTSISAPEHKFEGLTQIFQKAYEHEQHISESINNIVDHAIKSKDHATFNFLQWYVAEQHEEEVLFKDILDKIELIGNENHGLYLADQYVKGIAKSRKS

SEQ ID NO: 9009 - protein, 1315 aa, Artificial Sequence
  SARS-CoV-2/Belgium/VAG-03013/2020__EPI_ISL_415155 spike protein (1-1147)(I712C_T1077C) Ferritin construct
MFVFLVLLPLVSSQCVNLTTRTQLPPAYTNSFTRGVYYPDKVFRSSVLHSTQDLFLPFFSNVTWFHAIHVSGTNGTKRFDNPVLPFNDGVYFASTEKSNIIRGWIFGTTLDSKTQSLLIVNNATNVVIKVCEFQFCNDPFLGVYYHKNNKSWMESEFRVYSSANNCTFEYVSQPFLMDLEGKQGNFKNLREFVFKNIDGYFKIYSKHTPINLVRDLPQGFSALEPLVDLPIGINITRFQTLLALHRSYLTPGDSSSGWTAGAAAYYVGYLQPRTFLLKYNENGTITDAVDCALDPLSETKCTLKSFTVEKGIYQTSNFRVQPTESIVRFPNITNLCPFGEVFNATRFASVYAWNRKRISNCVADYSVLYNSASFSTFKCYGVSPTKLNDLCFTNVYADSFVIRGDEVRQIAPGQTGKIADYNYKLPDDFTGCVIAWNSNNLDSKVGGNYNYLYRLFRKSNLKPFERDISTEIYQAGSTPCNGVEGFNCYFPLQSYGFQPTNGVGYQPYRVVVLSFELLHAPATVCGPKKSTNLVKNKCVNFNFNGLTGTGVLTESNKKFLPFQQFGRDIADTTDAVRDPQTLEILDITPCSFGGVSVITPGTNTSNQVAVLYQGVNCTEVPVAIHADQLTPTWRVYSTGSNVFQTRAGCLIGAEHVNNSYECDIPIGAGICASYQTQTNSPRRARSVASQSIIAYTMSLGAENSVAYSNNSCAIPTNFTISVTTEILPVSMTKTSVDCTMYICGDSTECSNLLLQYGSFCTQLNRALTGIAVEQDKNTQEVFAQVKQIYKTPPIKDFGGFNFSQILPDPSKPSKRSFIEDLLFNKVTLADAGFIKQYGDCLGDIAARDLICAQKFNGLTVLPPLLTDEMIAQYTSALLAGTITSGWTFGAGAALQIPFAMQMAYRFNGIGVTQNVLYENQKLIANQFNSAIGKIQDSLSSTATALGKLQDVVNQNAQALNTLVKQLSSNFGAISSVLNDILSRLDKVEAEVQIDRLITGRLQSLQTYVTQQLIRAAEIRASANLAATKMSECVLGQSKRVDFCGKGYHLMSFPQSAPHGVVFLHVTYVPAQEKNFTCAPAICHDGKAHFPREGVFVSNGTHWFVTQRNFYEPQIITTDNTFVSGNCDVVIGIVNNTVYDPLQPELDSGGGGSDIIKLLNEQVNKEMQSSNLYMSMSSWCYTHSLDGAGLFLFDHAAEEYEHAKKLIIFLNENNVPVQLTSISAPEHKFEGLTQIFQKAYEHEQHISESINNIVDHAIKSKDHATFNFLQWYVAEQHEEEVLFKDILDKIELIGNENHGLYLADQYVKGIAKSRKS

SEQ ID NO: 9010 - protein, 1315 aa, Artificial Sequence
  SARS-CoV-2/Belgium/BC-03016/2020__EPI_ISL_415157 spike protein (1-1147)(I712C_T1077C) Ferritin construct
MFVFLVLLPLVSSQCVNLTTRTQLPPAYTNSFTRGVYYPDKVFRSSVLHSTQDLFLPFFSNVTWFHAIHVSGTNGTKRFDNPVLPFNDGVYFASTEKSNIIRGWIFGTTLDSKTQSLLIVNNATNVVIKVCEFQFCNDPFLGVYYHKNNKSWMESEFRVYSSANNCTFEYVSQPFLMDLEGKQGNFKNLREFVFKNIDGYFKIYSKHTPINLVRDLPQGFSALEPLVDLPIGINITRFQTLLALHRSYLTPGDSSSGWTAGAAAYYVGYLQPRTFLLKYNENGTITDAVDCALDPLSETKCTLKSFTVEKGIYQTSNFRVQPTESIVRFPNITNLCPFGEVFNATRFASVYAWNRKRISNCVADYSVLYNSASFSTFKCYGVSPTKLNDLCFTNVYADSFVIRGDEVRQIAPGQTGKIADYNYKLPDDFTGCVIAWNSNNLDSKVGGNYNYLYRLFRKSNLKPFERDISTEIYQAGSTPCNGVEGFNCYFPLQSYGFQPTNGVGYQPYRVVVLSFELLHAPATVCGPKKSTNLVKNKCVNFNFNGLTGTGVLTESNKKFLPFQQFGRDIADTTDAVRDPQTLEILDITPCSFGGVSVITPGTNTSNQVAVLYQGVNCTEVPVAIHADQLTPTWRVYSTGSNVFQTRAGCLIGAEHVNNSYECDIPIGAGICASYQTQTNSPRRARSVASQSIIAYTMSLGAENSVAYSNNSCAIPTNFTISVTTEILPVSMTKTSVDCTMYICGDSTECSNLLLQYGSFCTQLNRALTGIAVEQDKNTQEVFAQVKQIYKTPPIKDFGGFNFSQILPDPSKPSKRSFIEDLLFNKVTLADAGFIKQYGDCLGDIAARDLICAQKFNGLTVLPPLLTDEMIAQYTSALLAGTITSGWTFGAGAALQIPFAMQMAYRFNGIGVTQNVLYENQKLIANQFNSAIGKIQDSLSSTAPALGKLQDVVNQNAQALNTLVKQLSSNFGAISSVLNDILSRLDKVEAEVQIDRLITGRLQSLQTYVTQQLIRAAEIRASANLAATKMSECVLGQSKRVDFCGKGYHLMSFPQSAPHGVVFLHVTYVPAQEKNFTCAPAICHDGKAHFPREGVFVSNGTHWFVTQRNFYEPQIITTDNTFVSGNCDVVIGIVNNTVYDPLQPELDSGGGGSDIIKLLNEQVNKEMQSSNLYMSMSSWCYTHSLDGAGLFLFDHAAEEYEHAKKLIIFLNENNVPVQLTSISAPEHKFEGLTQIFQKAYEHEQHISESINNIVDHAIKSKDHATFNFLQWYVAEQHEEEVLFKDILDKIELIGNENHGLYLADQYVKGIAKSRKS

SEQ ID NO: 9011 - protein, 1315 aa, Artificial Sequence
  SARS-CoV-2/Germany/BavPat3/2020__EPI_ISL_414521 spike protein (1-1147)(I712C_T1077C) Ferritin construct
MFVFLVLLPLVSSQCVNLTTRTQLPPAYTNSFTRGVYYPDKVFRSSVLHSTQDLFLPFFSNVTWFHAIHVSGTNGTKRFDNPVLPFNDGVYFASTEKSNIIRGWIFGTTLDSKTQSLLIVNNATNVVIKVCEFQFCNDPFLGVYYHKNNKSWMESEFRVYSSANNCTFEYVSQPFLMDLEGKQGNFKNLREFVFKNIDGYFKIYSKHTPINLVRDLPQGFSALEPLVDLPIGINITRFQTLLALHRSYLTPGDSSSGWTAGAAAYYVGYLQPRTFLLKYNENGTITDAVDCALDPLSETKCTLKSFTVEKGIYQTSNFRVQPTESIVRFPNITNLCPFGEVFNATRFASVYAWNRKRISNCVADYSVLYNSASFSTFKCYGVSPTKLNDLCFTNVYADSFVIRGDEVRQIAPGQTGKIADYNYKLPDDFTGCVIAWNSNNLDSKVGGNYNYLYRLFRKSNLKPFERDISTEIYQAGSTPCNGVEGFNCYFPLQSYGFQPTNGVGYQPYRVVVLSFELLHAPATVCGPKKSTNLVKNKCVNFNFNGLTGTGVLTESNKKFLPFQQFGRDIADTTDAVRDPQTLEILDITPCSFGGVSVITPGTNTSNQVAVLYQDVNCTEVPVAIHADQLTPTWRVYSTGSNVFQTRAGCLIGAEHVNNSYECDIPIGAGICASYQTQTNSPRRARSVASQSIIAYTMSLGAENSVAYSNNSCAIPTNFTISVTTEILPVSMTKTSVDCTMYICGDSTECSNLLLQYGSFCTQLNRALTGIAVEQDKNTQQVFAQVKQIYKTPPIKDFGGFNFSQILPDPSKPSKRSFIEDLLFNKVTLADAGFIKQYGDCLGDIAARDLICAQKFNGLTVLPPLLTDEMIAQYTSALLAGTITSGWTFGAGAALQIPFAMQMAYRFNGIGVTQNVLYENQKLIANQFNSAIGKIQDSLSSTASALGKLQDVVNQNAQALNTLVKQLSSNFGAISSVLNDILSRLDKVEAEVQIDRLITGRLQSLQTYVTQQLIRAAEIRASANLAATKMSECVLGQSKRVDFCGKGYHLMSFPQSAPHGVVFLHVTYVPAQEKNFTCAPAICHDGKAHFPREGVFVSNGTHWFVTQRNFYEPQIITTDNTFVSGNCDVVIGIVNNTVYDPLQPELDSGGGGSDIIKLLNEQVNKEMQSSNLYMSMSSWCYTHSLDGAGLFLFDHAAEEYEHAKKLIIFLNENNVPVQLTSISAPEHKFEGLTQIFQKAYEHEQHISESINNIVDHAIKSKDHATFNFLQWYVAEQHEEEVLFKDILDKIELIGNENHGLYLADQYVKGIAKSRKS

SEQ ID NO: 9012 - protein, 1315 aa, Artificial Sequence
  SARS-CoV-2/France/HF1805/2020__EPI_ISL_414628 spike protein (1-1147)(I712C_T1077C) Ferritin construct
MFVFLVLLPLVSSQCVNLTTRTQLPPAYTNSFTRGVYYPDKVFRSSVLHSTQDLFLPFFSNVTWFHAIHVSGTNGTKRFDNPVLPFNDGVYFASTEKSNIIRGWIFGTTLDSKTQSLLIVNNATNVVIKVCEFQFCNDPFLGVYYHKNNKSWMESEFRVYSSANNCTFEYVSQPFLMDLEGKQGNFKNLREFVFKNIDGYFKIYSKHTPINLVRDLPQGFSALEPLVDLPIGINITRFQTLLALHRSYLTPGDSSSGWTAGAAAYYVGYLQPRTFLLKYNENGTITDAVDCALDPLSETKCTLKSFTVEKGIYQTSNFRVQPTESIVRFPNITNLCPFGEVFNATRFASVYAWNRKRISNCVADYSVLYNSASFSTFKCYGVSPTKLNDLCFTNVYADSFVIRGDEVRQIAPGQTGKIADYNYKLPDDFTGCVIAWNSNNLDSKVGGNYNYLYRLFRKSNLKPFERDISTEIYQAGSTPCNGVEGFNCYFPLQSYGFQPTNGVGYQPYRVVVLSFELLHAPATVCGPKKSTNLVKNKCVNFNFNGLTGTGVLTESNKKFLPFQQFGRDIADTTDAVRDPQTLEILDITPCSFGGVSVITPGTNTSNQVAVLYQGVNCTEVPVAIHADQLTPTWRVYSTGSNVFQTRAGCLIGAEHVNNSYECDIPIGAGICASYQTQTNSPRRARSVASQSIIAYTMSLGAENSVAYSNNSCAIPTNFTISVTTEILPVSMTKTSVDCTMYICGDSTECSNLLLQYGSFCTQLNRALTGIAVEQDKNTQEVFAQVKQIYKTPPIKDFGGFNFSQILPDPSKPSKRSFIEDLLFNKVTLADAGFIKQYGDCLGDIAARDLICAQKFNGLTVLPPLLTDEMIAQYTSALLAGTITSGWTFGAGAALQIPFAMQMAYRFNGIGVTQNVLYENQKLIANQFNSAIGKIQDSLSSTASALGKLQDVVNQNAQALNTLVKQLSSNFGAISSVLNDILSRLDKVEAEVQIDRLITGRLQSLQTYVTQQLIRAAEIRASANLAATKMSECVLGQSKRVDFCGKGYHLMSFPQSAPHGVVFLHVTYVPAQEKNFTCAPAICHDGKAHFPREGVFVSNGTHWFVTQRNFYEPQIITTDNTFVSGNCDVVIGVVNNTVYDPLQPELDSGGGGSDIIKLLNEQVNKEMQSSNLYMSMSSWCYTHSLDGAGLFLFDHAAEEYEHAKKLIIFLNENNVPVQLTSISAPEHKFEGLTQIFQKAYEHEQHISESINNIVDHAIKSKDHATFNFLQWYVAEQHEEEVLFKDILDKIELIGNENHGLYLADQYVKGIAKSRKS

SEQ ID NO: 9013 - protein, 1315 aa, Artificial Sequence
  SARS-CoV-2/Netherlands/ZuidHolland_9/2020__EPI_ISL_414445 spike protein (1-1147)(I712C_T1077C) Ferritin construct
MFVFLVLLPLVSSQCVNLTTRTQLPPAYTNSFTRGVYYPDKVFRSSVLHSTQDLFLPFFSNVTWFHAIHVSGTNGTKRFDNPVLPFNDGVYFASTEKSNIIRGWIFGTTLDSKTQSLLIVNNATNVVIKVCEFQFCNDPFLGVYYHKNNKSWMESEFRVYSSANNCTFEYVSQPFLMDLEGKQGNFKNLREFVFKNIDGYFKIYSKHTPINLVRDLPQGFSALEPLVDLPIGINITRFQTLLALHRSYLTPGDSSSGWTAGAAAYYVGYLQPRTFLLKYNENGTITDAVDCALDPLSETKCTLKSFTVEKGIYQTSNFRVQPTESIVRFPNITNLCPFGEVFNATRFASVYAWNRKRISNCVADYSVLYNSASFSTFKCYGVSPTKLNDLCFTNVYADSFVIRGDEVRQIAPGQTGKIADYNYKLPDDFTGCVIAWNSNNLDSKVGGNYNYLYRLFRKSNLKPFERDISTEIYQAGSTPCNGVEGFNCYFPLQSYGFQPTNGVGYQPYRVVVLSFELLHAPATVCGPKKSTNLVKNKCVNFNFNGLTGTGVLTESNKKFLPFQQFGRDIADTTDAVRDPQTLEILDITPCSFGGVSVITPGTNTSNQVAVLYQGVNCTEVPVAIHADQLTPTWRVYSTGSNVFQTRAGCLIGAEHVNNSYECDIPIGAGICASYQTQTNSPRRARSVASQSIIAYTMSLGAENSVAYSNNSCAIPTNFTISVTTEILPVSMTKTSVDCTMYICGDSTECSNLLLQYGSFCTQLNRALTGIAVEQDKNTQEVFAQVKQIYKTPPIKDFGGFNFSQILPDPSKPSKRSFIEDLLFNKVTLADAGFIKQYGDCLGDIAARDLICVQKFNGLTVLPPLLTDEMIAQYTSALLAGTITSGWTFGAGAALQIPFAMQMAYRFNGIGVTQNVLYENQKLIANQFNSAIGKIQDSLSSTASALGKLQDVVNQNAQALNTLVKQLSSNFGAISSVLNDILSRLDKVEAEVQIDRLITGRLQSLQTYVTQQLIRAAEIRASANLAATKMSECVLGQSKRVDFCGKGYHLMSFPQSAPHGVVFLHVTYVPAQEKNFTCAPAICHDGKAHFPREGVFVSNGTHWFVTQRNFYEPQIITTDNTFVSGNCDVVIGIVNNTVYDPLQPELDSGGGGSDIIKLLNEQVNKEMQSSNLYMSMSSWCYTHSLDGAGLFLFDHAAEEYEHAKKLIIFLNENNVPVQLTSISAPEHKFEGLTQIFQKAYEHEQHISESINNIVDHAIKSKDHATFNFLQWYVAEQHEEEVLFKDILDKIELIGNENHGLYLADQYVKGIAKSRKS

SEQ ID NO: 9014 - protein, 1315 aa, Artificial Sequence
  SARS-CoV-2/Finland/FIN03032020A/2020__EPI_ISL_413602 spike protein (1-1147)(I712C_T1077C) Ferritin construct
MFVFLVLLPLVSSQCVNLTTRTQLPPAYTNSFTRGVYYPDKVFRSSVLHSTQDLFLPFFSNVTWFHAIHVSGTNGTKRFDNPVLPFNDGVYFASTEKSNIIRGWIFGTTLDSKTQSLLIVNNATNVVIKVCEFQFCNDPFLGVYYHKNNKSWMESEFRVYSSANNCTFEYVSQPFLMDLEGKQGNFKNLREFVFKNIDGYFKIYSKHTPINLVRDLPQGFSALEPLVDLPIGINITRFQTLLALHRSYLTPGDSSSGWTAGAAAYYVGYLQPRTFLLKYNENGTITDAVDCALDPLSETKCTLKSFTVEKGIYQTSNFRVQPTESIVRFPNITNLCPFGEVFNATRFASVYAWNRKRISNCVADYSVLYNSASFSTFKCYGVSPTKLNDLCFTNVYADSFVIRGDEVRQIAPGQTGKIADYNYKLPDDFTGCVISWNSNNLDSKVGGNYNYLYRLFRKSNLKPFERDISTEIYQAGSTPCNGVEGFNCYFPLQSYGFQPTNGVGYQPYRVVVLSFELLHAPATVCGPKKSTNLVKNKCVNFNFNGLTGTGVLTESNKKFLPFQQFGRDIADTTDAVRDPQTLEILDITPCSFGGVSVITPGTNTSNQVAVLYQGVNCTEVPVAIHADQLTPTWRVYSTGSNVFQTRAGCLIGAEHVNNSYECDIPIGAGICASYQTQTNSPRRARSVASQSIIAYTMSLGAENSVAYSNNSCAIPTNFTISVTTEILPVSMTKTSVDCTMYICGDSTECSNLLLQYGSFCTQLNRALTGIAVEQDKNTQEVFAQVKQIYKTPPIKDFGGFNFSQILPDPSKPSKRSFIEDLLFNKVTLADAGFIKQYGDCLGDIAARDLICAQKFNGLTVLPPLLTDEMIAQYTSALLAGTITSGWTFGAGAALQIPFAMQMAYRFNGIGVTQNVLYENQKLIANQFNSAIGKIQDSLSSTASALGKLQDVVNQNAQALNTLVKQLSSNFGAISSVLNDILSRLDKVEAEVQIDRLITGRLQSLQTYVTQQLIRAAEIRASANLAATKMSECVLGQSKRVDFCGKGYHLMSFPQSAPHGVVFLHVTYVPAQEKNFTCAPAICHDGKAHFPREGVFVSNGTHWFVTQRNFYEPQIITTDNTFVSGNCDVVIGIVNNTVYDPLQPELDSGGGGSDIIKLLNEQVNKEMQSSNLYMSMSSWCYTHSLDGAGLFLFDHAAEEYEHAKKLIIFLNENNVPVQLTSISAPEHKFEGLTQIFQKAYEHEQHISESINNIVDHAIKSKDHATFNFLQWYVAEQHEEEVLFKDILDKIELIGNENHGLYLADQYVKGIAKSRKS

SEQ ID NO: 9015 - protein, 1315 aa, Artificial Sequence
  SARS-CoV-2/France/GE1977/2020__EPI_ISL_414632 spike protein (1-1147)(I712C_T1077C) Ferritin construct
MFVFLVLLPLVSSQCVNLTTRTQLPPAYTNSFTRGVYYPDKVFRSSVLHSTQDLFLPFFSNVTWFHAIHVSGTNGTKRFDNPVLPFNDGVYFASTEKSNIIRGWIFGTTLDSKTQSLLIVNNATNVVIKVCEFQFCNDPFLGVYYHKNNKSWMESEFRVYSSANNCTFEYVSQPFLMDLEGKQGNFKNLREFVFKNIDGYFKIYSKHTPINLVRDLPQGFSALEPLVDLPIGINITRFQTLLALHRSYLTPGDSSSGWTAGAAAYYVGYLQPRTFLLKYNENGTITDAVDCALDPLSETKCTLKSFTVEKGIYQTSNFRVQPTESIVRFPNITNLCPFGEVFNATRFASVYAWNRKRISNCVADYSVLYNSASFSTFKCYGVSPTKLNDLCFTNVYADSFVIRGDEVRQIAPGQTGKIADYNYKLPDDFTGCVIAWNSNNLDSKVGGNYNYLYRLFRKSNLKPFERDISTEIYQAGSTPCNGVEGFNCYFPLQSYGFQPTNGVGYQPYRVVVLSFELLHAPATVCGPKKSTNLVKNKCVNFNFNGLTGTGVLTESNKKFLPFQQFGRDIADTTDAVRDPQTLEILDITPCSFGGVSVITPGTNTSNQVAVLYQGVNCTEVPVAIHADQLTPTWRVYSTGSNVFQTRAGCLIGAEHVNNSYECDIPIGAGICASYQTQTNSPRRARSVASQSIIAYTMSLGAENSVAYSNNSCAIPTNFTISVTTEILPVSMTKTSVDCTMYICGDSTECSNLLLQYGSFCTQLNRALTGIAVEQDKNTQEVFAQVKQIYKTPPIKDFGGFNFSQILPDPSKPSKRSFIEDLLFNKVTLADAGFIKQYGDCLGDIAARDLICAQKFNGLTVLPPLLTDEMIAQYTSALLAGTITSGWTFGAGAALQIPFAMQMAYRFNGIGVTQNVLYENQKLIANQFNSAIGKIQDSLFSTASALGKLQDVVNQNAQALNTLVKQLSSNFGAISSVLNDILSRLDKVEAEVQIDRLITGRLQSLQTYVTQQLIRAAEIRASANLAATKMSECVLGQSKRVDFCGKGYHLMSFPQSAPHGVVFLHVTYVPAQEKNFTCAPAICHDGKAHFPREGVFVSNGTHWFVTQRNFYEPQIITTDNTFVSGNCDVVIGIVNNTVYDPLQPELDSGGGGSDIIKLLNEQVNKEMQSSNLYMSMSSWCYTHSLDGAGLFLFDHAAEEYEHAKKLIIFLNENNVPVQLTSISAPEHKFEGLTQIFQKAYEHEQHISESINNIVDHAIKSKDHATFNFLQWYVAEQHEEEVLFKDILDKIELIGNENHGLYLADQYVKGIAKSRKS

SEQ ID NO: 9016 - protein, 1315 aa, Artificial Sequence
  SARS-CoV-2/Finland/FIN-313/2020__EPI_ISL_414641 spike protein (1-1147)(I712C_T1077C) Ferritin construct
MFVFLVLLPLVSSQCVNLTTRTQLPPAYTNSFTRGVYYPDKVFRSSVLHSTQDLFLPFFSNVTWFHAIHVSGTNGTKRFDNPVLPFNDGVYFASTEKSNIIRGWIFGTTLDSKTQSLLIVNNATNVVIKVCEFQFCNDPFLGVYYHKNNKSWMESEFRVYSSANNCTFEYVSQPFLMDLEGKQGNFKNLREFVFKNIDGYFKIYSKHTPINLVRDLPQGFSALEPLVDLPIGINITRFKTLLALHRSYLTPGDSSSGWTAGAAAYYVGYLQPRTFLLKYNENGTITDAVDCALDPLSETKCTLKSFTVEKGIYQTSNFRVQPTESIVRFPNITNLCPFGEVFNATRFASVYAWNRKRISNCVADYSVLYNSASFSTFKCYGVSPTKLNDLCFTNVYADSFVIRGDEVRQIAPGQTGKIADYNYKLPDDFTGCVIAWNSNNLDSKVGGNYNYLYRLFRKSNLKPFERDISTEIYQAGSTPCNGVEGFNCYFPLQSYGFQPTNGVGYQPYRVVVLSFELLHAPATVCGPKKSTNLVKNKCVNFNFNGLTGTGVLTESNKKFLPFQQFGRDIADTTDAVRDPQTLEILDITPCSFGGVSVITPGTNTSNQVAVLYQGVNCTEVPVAIHADQLTPTWRVYSTGSNVFQTRAGCLIGAEHVNNSYECDIPIGAGICASYQTQTNSPRRARSVASQSIIAYTMSLGAENSVAYSNNSCAIPTNFTISVTTEILPVSMTKTSVDCTMYICGDSTECSNLLLQYGSFCTQLNRALTGIAVEQDKNTQEVFAQVKQIYKTPPIKDFGGFNFSQILPDPSKPSKRSFIEDLLFNKVTLADAGFIKQYGDCLGDIAARDLICAQKFNGLTVLPPLLTDEMIAQYTSALLAGTITSGWTFGAGAALQIPFAMQMAYRFNGIGVTQNVLYENQKLIANQFNSAIGKIQDSLSSTASALGKLQDVVNQNAQALNTLVKQLSSNFGAISSVLNDILSRLDKVEAEVQIDRLITGRLQSLQTYVTQQLIRAAEIRASANLAATKMSECVLGQSKRVDFCGKGYHLMSFPQSAPHGVVFLHVTYVPAQEKNFTCAPAICHDGKAHFPREGVFVSNGTHWFVTQRNFYEPQIITTDNTFVSGNCDVVIGIVNNTVYDPLQPELDSGGGGSDIIKLLNEQVNKEMQSSNLYMSMSSWCYTHSLDGAGLFLFDHAAEEYEHAKKLIIFLNENNVPVQLTSISAPEHKFEGLTQIFQKAYEHEQHISESINNIVDHAIKSKDHATFNFLQWYVAEQHEEEVLFKDILDKIELIGNENHGLYLADQYVKGIAKSRKS

SEQ ID NO: 9017 - protein, 1315 aa, Artificial Sequence
  SARS-CoV-2/Netherlands/ZuidHolland_2/2020__EPI_ISL_414556 spike protein (1-1147)(I712C_T1077C) Ferritin construct
MFVFLVLLPLVSSQCVNLTTRTQLPPAYTNSFTRGVYYPDKVFRSSVLHSTQDLFLPFFSNVTWFHAIHVSGTNGTKRFDNPVLPFNDGVYFASTEKSNIIRGWIFGTTLDSKTQSLLIVNNATNVVIKVCEFQFCNDPFLGVYYHKNNKSWMESEFRVYSSANNCTFEYVSQPFLMDLEGKQGNFKNLREFVFKNIDGYFKIYSKHTPINLVRDLPQGFSALEPLVDLPIGINITRFQTLLALHRSYLTPGDSSSGWTAGAAAYYVGYLQPRTFLLKYNENGTITDAVDCALDPLSETKCTLKSFTVEKGIYQTSNFRVQPTESIVRFPNITNLCPFGEVFNATRFASVYAWNRKRISNCVADYSVLYNSASFSTFKCYGVSPTKLNDLCFTNVYADSFVIRGDEVRQIAPGQTGKIADYNYKLPDDFTGCVIAWNSNNLDSKVGGNYNYLYRLFRKSNLKPFERDISTEIYQAGSTPCNGVEGFNCYFPLQSYGFQPTNGVGYQPYRVVVLSFELLHAPATVCGPKKSTNLVKNKCVNFNFNGLTGTGVLTESNKKFLPFQQFGRDIADTTDAVRDPQTLEILDITPCSFGGVSVITPGTNTSNQVAVLYQGVNCTEVPVAIHADQLTPTWRVYSTGSNVFQTRAGCLIGAEHVNNSYECDIPIGAGICASYQTQTNSPRRARSVASQSIIAYTMSLGAENSVAYSNNSCAIPTNFTISVTTEILPVSMTKTSVDCTMYICGDSTECSNLLLQYGSFCTQLNRALTGIALEQDKNTQEVFAQVKQIYKTPPIKDFGGFNFSQILPDPSKPSKRSFIEDLLFNKVTLADAGFIKQYGDCLGDIAARDLICAQKFNGLTVLPPLLTDEMIAQYTSALLAGTITSGWTFGAGAALQIPFAMQMAYRFNGIGVTQNVLYENQKLIANQFNSAIGKIQDSLSSTASALGKLQDVVNQNAQALNTLVKQLSSNFGAISSVLNDILSRLDKVEAEVQIDRLITGRLQSLQTYVTQQLIRAAEIRASANLAATKMSECVLGQSKRVDFCGKGYHLMSFPQSAPHGVVFLHVTYVPAQEKNFTCAPAICHDGKAHFPREGVFVSNGTHWFVTQRNFYEPQIITTDNTFVSGNCDVVIGIVNNTVYDPLQPELDSGGGGSDIIKLLNEQVNKEMQSSNLYMSMSSWCYTHSLDGAGLFLFDHAAEEYEHAKKLIIFLNENNVPVQLTSISAPEHKFEGLTQIFQKAYEHEQHISESINNIVDHAIKSKDHATFNFLQWYVAEQHEEEVLFKDILDKIELIGNENHGLYLADQYVKGIAKSRKS

SEQ ID NO: 9018 - protein, 1315 aa, Artificial Sequence
  SARS-CoV-2/USA/WA-UW31/2020__EPI_ISL_414618 spike protein (1-1147)(I712C_T1077C) Ferritin construct
MFVFLVLLPLVSSQCVNLTTRTQLPPAYTNSFTRGVYYPDKVFRSSVLHSTQDLFLPFFSNVTWFHAIHVSGTNGTKRFDNPVLPFNDGVYFASTEKSNIIRGWIFGTTLDSKTQSLLIVNNATNVVIKVCEFQFCNDPFLGVYYHKNNKSWMESEFRVYSSANNCTFEYVSQPFLMDLEGKQGNFKNLREFVFKNIDGYFKIYSKHTPINLVRDLPQGFSALEPLVDLPIGINITRFQTLLALHRSYLTPGDSSSGWTAGAAAYYVGYLQPRTFLLKYNENGTITDAVDCALDPLSETKCTLKSFTVEKGIYQTSNFRVQPTESIVRFPNITNLCPFGEVFNATRFASVYAWNRKRISNCVADYSVLYNSASFSTFKCYGVSPTKLNDLCFTNVYADSFVIRGDEVRQIAPGQTGKIADYNYKLPDDFTGCVIAWNSNNLDSKVGGNYNYLYRLFRKSNLKPFERDISTEIYQAGSTPCNGAEGFNCYFPLQSYGFQPTNGVGYQPYRVVVLSFELLHAPATVCGPKKSTNLVKNKCVNFNFNGLTGTGVLTESNKKFLPFQQFGRDIADTTDAVRDPQTLEILDITPCSFGGVSVITPGTNTSNQVAVLYQDVNCTEVPVAIHADQLTPTWRVYSTGSNVFQTRAGCLIGAEHVNNSYECDIPIGAGICASYQTQTNSPRRARSVASQSIIAYTMSLGAENSVAYSNNSCAIPTNFTISVTTEILPVSMTKTSVDCTMYICGDSTECSNLLLQYGSFCTQLNRALTGIAVEQDKNTQEVFAQVKQIYKTPPIKDFGGFNFSQILPDPSKPSKRSFIEDLLFNKVTLADAGFIKQYGDCLGDIAARDLICAQKFNGLTVLPPLLTDEMIAQYTSALLAGTITSGWTFGAGAALQIPFAMQMAYRFNGIGVTQNVLYENQKLIANQFNSAIGKIQDSLSSTASALGKLQDVVNQNAQALNTLVKQLSSNFGAISSVLNDILSRLDKVEAEVQIDRLITGRLQSLQTYVTQQLIRAAEIRASANLAATKMSECVLGQSKRVDFCGKGYHLMSFPQSAPHGVVFLHVTYVPAQEKNFTCAPAICHDGKAHFPREGVFVSNGTHWFVTQRNFYEPQIITTDNTFVSGNCDVVIGIVNNTVYDPLQPELDSGGGGSDIIKLLNEQVNKEMQSSNLYMSMSSWCYTHSLDGAGLFLFDHAAEEYEHAKKLIIFLNENNVPVQLTSISAPEHKFEGLTQIFQKAYEHEQHISESINNIVDHAIKSKDHATFNFLQWYVAEQHEEEVLFKDILDKIELIGNENHGLYLADQYVKGIAKSRKS

SEQ ID NO: 9019 - protein, 1315 aa, Artificial Sequence
  SARS-CoV-2/South Korea/SNU01/2020__EPI_ISL_411929 spike protein (1-1147)(I712C_T1077C) Ferritin construct
MFVFLVLLPLVSSQCVNLTTRTQLPPAYTNSFTRGVYYPDKVFRSSVLHSTQDLFLPFFSNVTWFHAIHVSGTNGTKRFDNPVLPFNDGVYFASTEKSNIIRGWIFGTTLDSKTQSLLIVNNATNVVIKVCEFQFCNDPFLGVYYHKNNKSWMESEFRVYSSANNCTFEYVSQPFLMDLEGKQGNFKNLREFVFKNIDGYFKIYSKHTPINLVRDLPQGFWALEPLVDLPIGINITRFQTLLALHRSYLTPGDSSSGWTAGAAAYYVGYLQPRTFLLKYNENGTITDAVDCALDPLSETKCTLKSFTVEKGIYQTSNFRVQPTESIVRFPNITNLCPFGEVFNATRFASVYAWNRKRISNCVADYSVLYNSASFSTFKCYGVSPTKLNDLCFTNVYADSFVIRGDEVRQIAPGQTGKIADYNYKLPDDFTGCVIAWNSNNLDSKVGGNYNYLYRLFRKSNLKPFERDISTEIYQAGSTPCNGVEGFNCYFPLQSYGFQPTNGVGYQPYRVVVLSFELLHAPATVCGPKKSTNLVKNKCVNFNFNGLTGTGVLTESNKKFLPFQQFGRDIADTTDAVRDPQTLEILDITPCSFGGVSVITPGTNTSNQVAVLYQDVNCTEVPVAIHADQLTPTWRVYSTGSNVFQTRAGCLIGAEHVNNSYECDIPIGAGICASYQTQTNSPRRARSVASQSIIAYTMSLGAENSVAYSNNSCAIPTNFTISVTTEILPVSMTKTSVDCTMYICGDSTECSNLLLQYGSFCTQLNRALTGIAVEQDKNTQEVFAQVKQIYKTPPIKDFGGFNFSQILPDPSKPSKRSFIEDLLFNKVTLADAGFIKQYGDCLGDIAARDLICAQKFNGLTVLPPLLTDEMIAQYTSALLAGTITSGWTFGAGAALQIPFAMQMAYRFNGIGVTQNVLYENQKLIANQFNSAIGKIQDSLSSTASALGKLQDVVNQNAQALNTLVKQLSSNFGAISSVLNDILSRLDKVEAEVQIDRLITGRLQSLQTYVTQQLIRAAEIRASANLAATKMSECVLGQSKRVDFCGKGYHLMSFPQSAPHGVVFLHVTYVPAQEKNFTCAPAICHDGKAHFPREGVFVSNGTHWFVTQRNFYEPQIITTDNTFVSGNCDVVIGIVNNTVYDPLQPELDSGGGGSDIIKLLNEQVNKEMQSSNLYMSMSSWCYTHSLDGAGLFLFDHAAEEYEHAKKLIIFLNENNVPVQLTSISAPEHKFEGLTQIFQKAYEHEQHISESINNIVDHAIKSKDHATFNFLQWYVAEQHEEEVLFKDILDKIELIGNENHGLYLADQYVKGIAKSRKS

SEQ ID NO: 9020 - protein, 1315 aa, Artificial Sequence
  SARS-CoV-2/China/WF0004/2020__EPI_ISL_413694 spike protein (1-1147)(I712C_T1077C) Ferritin construct
MFVFLVLLPLVSSQCVNLTTRTQLPPAYTNSFTRGVYYPDKVFRSSVLHSTQDLFLPFFSNVTWFHAIHVSGTNGTKRFDNPVLPFNDGVYFASTEKSNIIRGWIFGTTLDSKTQSLLIVNNATNVVIKVCEFQFCNDPFLGVYYHKNNKSWTESEFRVYSSANNCTFEYVSQPFLMDLEGKQGNFKNLREFVFKNIDGYFKIYSKHTPINLVRDLPQGFSALEPLVDLPIGINITRFQTLLALHRSYLTPGDSSSGWTAGAAAYYVGYLQPRTFLLKYNENGTITDAVDCALDPLSETKCTLKSFTVEKGIYQTSNFRVQPTESIVRFPNITNLCPFGEVFNATRFASVYAWNRKRISNCVADYSVLYNSASFSTFKCYGVSPTKLNDLCFTNVYADSFVIRGDEVRQIAPGQTGKIADYNYKLPDDFTGCVIAWNSNNLDSKVGGNYNYLYRLFRKSNLKPFERDISTEIYQAGSTPCNGVEGFNCYFPLQSYGFQPTNGVGYQPYRVVVLSFELLHAPATVCGPKKSTNLVKNKCVNFNFNGLTGTGVLTESNKKFLPFQQFGRDIADTTDAVRDPQTLEILDITPCSFGGVSVITPGTNTSNQVAVLYQDVNCTEVPVAIHADQLTPTWRVYSTGSNVFQTRAGCLIGAEHVNNSYECDIPIGAGICASYQTQTNSPRRARSVASQSIIAYTMSLGAENSVAYSNNSCAIPTNFTISVTTEILPVSMTKTSVDCTMYICGDSTECSNLLLQYGSFCTQLNRALTGIAVEQDKNTQEVFAQVKQIYKTPPIKDFGGFNFSQILPDPSKPSKRSFIEDLLFNKVTLADAGFIKQYGDCLGDIAARDLICAQKFNGLTVLPPLLTDEMIAQYTSALLAGTITSGWTFGAGAALQIPFAMQMAYRFNGIGVTQNVLYENQKLIANQFNSAIGKIQDSLSSTASALGKLQDVVNQNAQALNTLVKQLSSNFGAISSVLNDILSRLDKVEAEVQIDRLITGRLQSLQTYVTQQLIRAAEIRASANLAATKMSECVLGQSKRFDFCGKGYHLMSFPQSAPHGVVFLHVTYVPAQEKNFTCAPAICHDGKAHFPREGVFVSNGTHWFVTQRNFYEPQIITTDNTFVSGNCDVVIGIVNNTVYDPLQPELDSGGGGSDIIKLLNEQVNKEMQSSNLYMSMSSWCYTHSLDGAGLFLFDHAAEEYEHAKKLIIFLNENNVPVQLTSISAPEHKFEGLTQIFQKAYEHEQHISESINNIVDHAIKSKDHATFNFLQWYVAEQHEEEVLFKDILDKIELIGNENHGLYLADQYVKGIAKSRKS

SEQ ID NO: 9021 - protein, 1315 aa, Artificial Sequence
  SARS-CoV-2/China/WF0028/2020__EPI_ISL_413791 spike protein (1-1147)(I712C_T1077C) Ferritin construct
MFVFLVLLPLVSSQCVNLTTRTQLPPAYTNSFTRGVYYPDKVFRSSVLHSTQDLFLPFFSNVTWFHAIHVSGTNGTKRFDNPVLPFNDGVYFASTEKSNIIRGWIFGTTLDSKTQSLLIVNNATNVVIKVCEFQFCNDPFLGVYYHKNNKSWMESEFRVYSSANNCTFEYVSQPFLMDLEGKQGNFKNLREFVFKNIDGYFKIYSKHTPINLVRDLPQGFSALEPLVDLPIGINITRFQTLLALHRSYLTPGDSSSGWTAGAAAYYVGYLQPRTFLLKYNENGTITDAVDCALDPLSETKCTLKSFTVEKGIYQTSNFRVQPTESIVRFPNITNLCPFGEVFNATRFASVYAWNRKRISNCVADYSVLYNSASFSTFKCYGVSPTKLNDLCFTNVYADSFVIRGDEVRQIAPGQTGKIADYNYKLPDDFTGCVIAWNSNNLDSKVGGNYNYLYRLFRKSNLKPFERDISTEIYQAGSTPCNGVEGFNCYFPLQSYGFQPTNGVGYQPYRVVVLSFELLHAPATVCGPKKSTNLVKNKCVNFNFNGLTGTGVLTESNKKFLPFQQFGRDIADTTDAVRDPQTLEILDITPCSFGGVSVITPGTNTSNQVAVLYQDVNCTEVPVAIHADQLTPTWRVYSTGSNVFQTRAGCLIGAEHVNNSYECDIPIGAGICASYQTQTNSPRRARSVASQSIIAYTMSLGAENSVAYSNNSCAIPTNFTISVTTEILPVSMTKTSVDCTMYICGDSTECSNLLLQYGSFCTQLNRALTGIAVEQDKNTQEVFAQVKQIYKTPPIKDFGGFNFSQILPDPSKPSKRSFIEDLLFNKVTLADAGFIKQYGDCLGDIAARDLICAQKFNGLTVLPPLLTDEMIAQYTSALLAGTITSGWTFGAGAALQIPFAMQMAYRFNGIGVTQNVLYENQKLIANQFNSAIGKIQDSLSSTASALGKLQDVVNQNAQALNTLVKQLSSNFGAISSVLNDILSRLDKVEAEVQIDRLITGRLQSLQTYVTQQLIRAAEIRASANLAATKMSECVLGQSKRVDFCGKGYHLMSFPQSAPHGVVFLHVTYVPAQEKNFTCAPAICHDGKAHFPREGVFVSNGTHWFVTQRNFYEPQIITTDNTFVSGNCDVVIGIVNNTVYDPLQPELESGGGGSDIIKLLNEQVNKEMQSSNLYMSMSSWCYTHSLDGAGLFLFDHAAEEYEHAKKLIIFLNENNVPVQLTSISAPEHKFEGLTQIFQKAYEHEQHISESINNIVDHAIKSKDHATFNFLQWYVAEQHEEEVLFKDILDKIELIGNENHGLYLADQYVKGIAKSRKS

SEQ ID NO: 9022 - protein, 1315 aa, Artificial Sequence
  SARS-CoV-2/2019-nCoV/USA-CruiseA-18/2020__MT159716.1 spike protein (1-1147)(I712C_T1077C) Ferritin construct
MFVFLVLLPLVSSQCVNLTTRTQLPPAYTNSFTRGVYYPDKVFRSSVLHSTQDLFLPFFSNVTWFHAIHVSGTNGTKRFDNPVLPFNDGVYFASTEKSNIIRGWIFGTTLDSKTQSLLIVNNATNVVIKVCEFQFCNDPFLGVYYHKNNKSWMESELRVYSSANNCTFEYVSQPFLMDLEGKQGNFKNLREFVFKNIDGYFKIYSKHTPINLVRDLPQGFSALEPLVDLPIGINITRFQTLLALHRSYLTPGDSSSGWTAGAAAYYVGYLQPRTFLLKYNENGTITDAVDCALDPLSETKCTLKSFTVEKGIYQTSNFRVQPTESIVRFPNITNLCPFGEVFNATRFASVYAWNRKRISNCVADYSVLYNSASFSTFKCYGVSPTKLNDLCFTNVYADSFVIRGDEVRQIAPGQTGKIADYNYKLPDDFTGCVIAWNSNNLDSKVGGNYNYLYRLFRKSNLKPFERDISTEIYQAGSTPCNGVEGFNCYFPLQSYGFQPTNGVGYQPYRVVVLSFELLHAPATVCGPKKSTNLVKNKCVNFNFNGLTGTGVLTESNKKFLPFQQFGRDIADTTDAVRDPQTLEILDITPCSFGGVSVITPGTNTSNQVAVLYQDVNCTEVPVAIHADQLTPTWRVYSTGSNVFQTRAGCLIGAEHVNNSYECDIPIGAGICASYQTQTNSPRRARSVASQSIIAYTMSLGAENSVAYSNNSCAIPTNFTISVTTEILPVSMTKTSVDCTMYICGDSTECSNLLLQYGSFCTQLNRALTGIAVEQDKNTQEVFAQVKQIYKTPPIKDFGGFNFSQILPDPSKPSKRSFIEDLLFNKVTLADAGFIKQYGDCLGDIAARDLICAQKFNGLTVLPPLLTDEMIAQYTSALLAGTITSGWTFGAGAALQIPFAMQMAYRFNGIGVTQNVLYENQKLIANQFNSAIGKIQDSLSSTASALGKLQDVVNQNAQALNTLVKQLSSNFGAISSVLNDILSRLDKVEAEVQIDRLITGRLQSLQTYVTQQLIRAAEIRASANLAATKMSECVLGQSKRVDFCGKGYHLMSFPQSAPHGVVFLHVTYVPAQEKNFTCAPAICHDGKAHFPREGVFVSNGTHWFVTQRNFYEPQIITTDNTFVSGNCDVVIGIVNNTVYDPLQPELDSGGGGSDIIKLLNEQVNKEMQSSNLYMSMSSWCYTHSLDGAGLFLFDHAAEEYEHAKKLIIFLNENNVPVQLTSISAPEHKFEGLTQIFQKAYEHEQHISESINNIVDHAIKSKDHATFNFLQWYVAEQHEEEVLFKDILDKIELIGNENHGLYLADQYVKGIAKSRKS

SEQ ID NO: 9023 - protein, 1315 aa, Artificial Sequence
  SARS-CoV-2/SARS-CoV-2/Yunnan-01/human/2020/CHN__MT049951.1 spike protein (1-1147)(I712C_T1077C) Ferritin construct
MFVFLVLLPLVSSQCVNLTTRTQLPPANTNSFTRGVYYPDKVFRSSVLHSTQDLFLPFFSNVTWFHAIHVSGTNGTKRFDNPVLPFNDGVYFASTEKSNIIRGWIFGTTLDSKTQSLLIVNNATNVVIKVCEFQFCNDPFLGVYYHKNNKSWMESEFRVYSSANNCTFEYVSQPFLMDLEGKQGNFKNLREFVFKNIDGYFKIYSKHTPINLVRDLPQGFSALEPLVDLPIGINITRFQTLLALHRSYLTPGDSSSGWTAGAAAYYVGYLQPRTFLLKYNENGTITDAVDCALDPLSETKCTLKSFTVEKGIYQTSNFRVQPTESIVRFPNITNLCPFGEVFNATRFASVYAWNRKRISNCVADYSVLYNSASFSTFKCYGVSPTKLNDLCFTNVYADSFVIRGDEVRQIAPGQTGKIADYNYKLPDDFTGCVIAWNSNNLDSKVGGNYNYLYRLFRKSNLKPFERDISTEIYQAGSTPCNGVEGFNCYFPLQSYGFQPTNGVGYQPYRVVVLSFELLHAPATVCGPKKSTNLVKNKCVNFNFNGLTGTGVLTESNKKFLPFQQFGRDIADTTDAVRDPQTLEILDITPCSFGGVSVITPGTNTSNQVAVLYQDVNCTEVPVAIHADQLTPTWRVYSTGSNVFQTRAGCLIGAEHVNNSYECDIPIGAGICASYQTQTNSPRRARSVASQSIIAYTMSLGAENSVAYSNNSCAIPTNFTISVTTEILPVSMTKTSVDCTMYICGDSTECSNLLLQYGSFCTQLNRALTGIAVEQDKNTQEVFAQVKQIYKTPPIKDFGGFNFSQILPDPSKPSKRSFIEDLLFNKVTLADAGFIKQYGDCLGDIAARDLICAQKFNGLTVLPPLLTDEMIAQYTSALLAGTITSGWTFGAGAALQIPFAMQMAYRFNGIGVTQNVLYENQKLIANQFNSAIGKIQDSLSSTASALGKLQDVVNQNAQALNTLVKQLSSNFGAISSVLNDILSRLDKVEAEVQIDRLITGRLQSLQTYVTQQLIRAAEIRASANLAATKMSECVLGQSKRVDFCGKGYHLMSFPQSAPHGVVFLHVTYVPAQEKNFTCAPAICHDGKAHFPREGVFVSNGTHWFVTQRNFYEPQIITTDNTFVSGNCDVVIGIVNNTVYDPLQPELDSGGGGSDIIKLLNEQVNKEMQSSNLYMSMSSWCYTHSLDGAGLFLFDHAAEEYEHAKKLIIFLNENNVPVQLTSISAPEHKFEGLTQIFQKAYEHEQHISESINNIVDHAIKSKDHATFNFLQWYVAEQHEEEVLFKDILDKIELIGNENHGLYLADQYVKGIAKSRKS

SEQ ID NO: 9024 - protein, 1315 aa, Artificial Sequence
  SARS-CoV-2/USA/WA-UW292/2020__EPI_ISL_418077 spike protein (1-1147)(I712C_T1077C) Ferritin construct
MFVFLVLLPLVSSQCVNLTTRTQLPPAYTNSFTRGVYYPDKVFRSSVLHSTQDLFLPFFSNVTWFHAIHVSGTNGTKRFDNPVLPFNDGVYFASTEKSNIIRGWIFGTTLDSKTQSLLIVNNATNVVIKVCEFQFCNDPFLGVYYHKNNKSWMESEFRVYSSANNCTFEYVSQPFLMDLEGKQGNFKNLREFVFKNIDGYFKIYSKHTPINLVRDLPQGFSALEPLVDLPIGINITRFQTLLALHRSYLTPGDSSSGWTAGAAAYYVGYLQPRTFLLKYNENGTITDAVDCALDPLSETKCTLKSFTVEKGIYQTSNFRVQPTESIVRFPNITNLCPFGEVFNATRFASVYAWNRKRISNCVADYSVLYNSASFSTFKCYGVSPTKLNDLCFTNVYADSFVIRGDEVRQIAPGQTGKIADYNYKLPDDFTGCVIAWNSNNLDSKVGGNYNYLYRLFRKSNLKPFERDISTEIYQASSTPCNGVEGFNCYFPLQSYGFQPTNGVGYQPYRVVVLSFELLHAPATVCGPKKSTNLVKNKCVNFNFNGLTGTGVLTESNKKFLPFQQFGRDIADTTDAVRDPQTLEILDITPCSFGGVSVITPGTNTSNQVAVLYQDVNCTEVPVAIHADQLTPTWRVYSTGSNVFQTRAGCLIGAEHVNNSYECDIPIGAGICASYQTQTNSPRRARSVASQSIIAYTMSLGAENSVAYSNNSCAIPTNFTISVTTEILPVSMTKTSVDCTMYICGDSTECSNLLLQYGSFCTQLNRALTGIAVEQDKNTQEVFAQVKQIYKTPPIKDFGGFNFSQILPDPSKPSKRSFIEDLLFNKVTLADAGFIKQYGDCLGDIAARDLICAQKFNGLTVLPPLLTDEMIAQYTSALLAGTITSGWTFGAGAALQIPFAMQMAYRFNGIGVTQNVLYENQKLIANQFNSAIGKIQDSLSSTASALGKLQDVVNQNAQALNTLVKQLSSNFGAISSVLNDILSRLDKVEAEVQIDRLITGRLQSLQTYVTQQLIRAAEIRASANLAATKMSECVLGQSKRVDFCGKGYHLMSFPQSAPHGVVFLHVTYVPAQEKNFTCAPAICHDGKAHFPREGVFVSNGTHWFVTQRNFYEPQIITTDNTFVSGNCDVVIGIVNNTVYDPLQPELDSGGGGSDIIKLLNEQVNKEMQSSNLYMSMSSWCYTHSLDGAGLFLFDHAAEEYEHAKKLIIFLNENNVPVQLTSISAPEHKFEGLTQIFQKAYEHEQHISESINNIVDHAIKSKDHATFNFLQWYVAEQHEEEVLFKDILDKIELIGNENHGLYLADQYVKGIAKSRKS

SEQ ID NO: 9025 - protein, 1315 aa, Artificial Sequence
  SARS-CoV-2/Iceland/192/2020__EPI_ISL_417819 spike protein (1-1147)(I712C_T1077C) Ferritin construct
MFVFFVLLPLVSSQCVNLTTRTQLPPAYTNSFTRGVYYPDKVFRSSVLHSTQDLFLPFFSNVTWFHAIHVSGTNGTKRFDNPVLPFNDGVYFASTEKSNIIRGWIFGTTLDSKTQSLLIVNNATNVVIKVCEFQFCNDPFLGVYYHKNNKSWMESEFRVYSSANNCTFEYVSQPFLMDLEGKQGNFKNLREFVFKNIDGYFKIYSKHTPINLVRDLPQGFSALEPLVDLPIGINITRFQTLLALHRSYLTPGDSSSGWTAGAAAYYVGYLQPRTFLLKYNENGTITDAVDCALDPLSETKCTLKSFTVEKGIYQTSNFRVQPTESIVRFPNITNLCPFGEVFNATRFASVYAWNRKRISNCVADYSVLYNSASFSTFKCYGVSPTKLNDLCFTNVYADSFVIRGDEVRQIAPGQTGKIADYNYKLPDDFTGCVIAWNSNNLDSKVGGNYNYLYRLFRKSNLKPFERDISTEIYQAGSTPCNGVEGFNCYFPLQSYGFQPTNGVGYQPYRVVVLSFELLHAPATVCGPKKSTNLVKNKCVNFNFNGLTGTGVLTESNKKFLPFQQFGRDIADTTDAVRDPQTLEILDITPCSFGGVSVITPGTNTSNQVAVLYQGVNCTEVPVAIHADQLTPTWRVYSTGSNVFQTRAGCLIGAEHVNNSYECDIPIGAGICASYQTQTNSPRRARSVASQSIIAYTMSLGAENSVAYSNNSCAIPTNFTISVTTEILPVSMTKTSVDCTMYICGDSTECSNLLLQYGSFCTQLNRALTGIAVEQDKNTQEVFAQVKQIYKTPPIKDFGGFNFSQILPDPSKPSKRSFIEDLLFNKVTLADAGFIKQYGDCLGDIAARDLICAQKFNGLTVLPPLLTDEMIAQYTSALLAGTITSGWTFGAGAALQIPFAMQMAYRFNGIGVTQNVLYENQKLIANQFNSAIGKIQDSLSSTASALGKLQDVVNQNAQALNTLVKQLSSNFGAISSVLNDILSRLDKVEAEVQIDRLITGRLQSLQTYVTQQLIRAAEIRASANLAATKMSECVLGQSKRVDFCGKGYHLMSFPQSAPHGVVFLHVTYVPAQEKNFTCAPAICHDGKAHFPREGVFVSNGTHWFVTQRNFYEPQIITTDNTFVSGNCDVVIGIVNNTVYDPLQPELDSGGGGSDIIKLLNEQVNKEMQSSNLYMSMSSWCYTHSLDGAGLFLFDHAAEEYEHAKKLIIFLNENNVPVQLTSISAPEHKFEGLTQIFQKAYEHEQHISESINNIVDHAIKSKDHATFNFLQWYVAEQHEEEVLFKDILDKIELIGNENHGLYLADQYVKGIAKSRKS

SEQ ID NO: 9026 - protein, 1315 aa, Artificial Sequence
  SARS-CoV-2/Belgium/ULG-6939/2020__EPI_ISL_417020 spike protein (1-1147)(I712C_T1077C) Ferritin construct
MFVFLVLLPLVSSQCVNLTTRTQLPPAYTNSFTRGVYYPDKVFRSSVLHSTQDLFLPFFSNVTWFHAIHVSGTNGTKRFDNPVLPFNDGVYFASTEKSNIIRGWIFGTTLDSKTQSLLIVNNATNVVIKVCEFQFCNDPFLGVYYHKNNKSWMESEFRVYSSANNCTFEYVSQPFLMDLEGKQGNFKNLREFVFKNIDGYFKIYSKHTPINLVRDLPQGFSALEPLVDLPIGINITRFQTLLALHRSYLTPGDSSSGWTAGAAAYYVGYLQPRTFLLKYNENGTITDAVDCALDPLSETKCTLKSFTVEKGIYQTSNFRVQPTESIVRFPNITNLCPFGEVFNATRFASVYAWNRKRISNCVADYSVLYNSASFSTFKCYGVSPTKLNDLCFTNVYADSFVIRGDEVRQIAPGQTGKIADYNYKLPDDFTGCVIAWNSNNLDSKVGGNYNYLYRLFRKSNLKPFERDISTEIYQAGSTPCNGVEGFNCYFPLQSYGFQPTNGVGYQPYRVVVLSFELLHAPATVCGPKKSTNLVKNKCVNFNFNGLTGTGVLTESNKKFLPFQQFGRDIADTTDAVRDPQTLEILDITPCSFGGVSVITPGTNTSNQVAVLYQGVNCTEVPVAIHADQLTPTWRVYSTGSNVFQTRAGCLIGAEHVNNSYECDIPIGAGICASYQTQTNSPRRARSVASQSIIAYTMSLGAENSVVYSNNSCAIPTNFTISVTTEILPVSMTKTSVDCTMYICGDSTECSNLLLQYGSFCTQLNRALTGIAVEQDKNTQEVFAQVKQIYKTPPIKDFGGFNFSQILPDPSKPSKRSFIEDLLFNKVTLADAGFIKQYGDCLGDIAARDLICAQKFNGLTVLPPLLTDEMIAQYTSALLAGTITSGWTFGAGAALQIPFAMQMAYRFNGIGVTQNVLYENQKLIANQFNSAIGKIQDSLSSTASALGKLQDVVNQNAQALNTLVKQLSSNFGAISSVLNDILSRLDKVEAEVQIDRLITGRLQSLQTYVTQQLIRAAEIRASANLAATKMSECVLGQSKRVDFCGKGYHLMSFPQSAPHGVVFLHVTYVPAQEKNFTCAPAICHDGKAHFPREGVFVSNGTHWFVTQRNFYEPQIITTDNTFVSGNCDVVIGIVNNTVYDPLQPELDSGGGGSDIIKLLNEQVNKEMQSSNLYMSMSSWCYTHSLDGAGLFLFDHAAEEYEHAKKLIIFLNENNVPVQLTSISAPEHKFEGLTQIFQKAYEHEQHISESINNIVDHAIKSKDHATFNFLQWYVAEQHEEEVLFKDILDKIELIGNENHGLYLADQYVKGIAKSRKS

SEQ ID NO: 9027 - protein, 1315 aa, Artificial Sequence
  SARS-CoV-2/France/HF2496/2020__EPI_ISL_418231 spike protein (1-1147)(I712C_T1077C) Ferritin construct
MFVFLVLLPLVSSQCVNLTTRTQLPPAYTNSFTRGVYYPDKVFRSSVLHSTQDLFLPFFSNVTWFHAIHVSGTNGTKRFDNPVLPFNDGVYFASTEKSNIIRGWIFGTTLDSKTQSLLIVNNATNVVIKVCEFQFCNDPFLGVYYHKNNKSWMESEFRVYSSANNCTFEYVSQPFLMDLEGKQGNFKNLREFVFKNIDGYFKIYSKHTPINLVRDLPQGFSALEPLVDLPIGINITRFQTLLALHRSYLTPGDSSSGWTAGAAAYYVGYLQPRTFLLKYNENGTITDAVDCALDPLSETKCTLKSFTVEKGIYQTSNFRVQPTESIVRFPNITNLCPFGEVFNATRFASVYAWNRKRISNCVADYSVLYNSASFSTFKCYGVSPTKLNDLCFTNVYADSFVIRGDEVRQIAPGQTGKIADYNYKLPDDFTGCVIAWNSNNLDSKVGGNYNYLYRLFRKSNLKPFERDISTEIYQAGSTPCNGVEGFNCYFPLQSYGFQPTNGVGYQPYRVVVLSFELLHAPATVCGPKKSTNLVKNKCVNFNFNGLTGTGVLTESNKKFLPFQQFGRDIADTTDAVRDPQTLEILDITPCSFGGVSVITPGTNTSNQVAVLYQGVNCTEVPVAIHADQLTPTWRVYSTGSNVFQTRAGCLIGAEHVNNSYECDIPIGAGICASYQTQTNSPRRARSVASQSIIAYTMSLGAENSVAYSNNSCAIPTNFTISVTTEILPVSMTKTSVDCTMYICGDSTECSNLLLQYGSFCTQLNRALTGIAVEQDKNTQEVFAQVKQIYKTPPIKDFGGFNFSQILPDPSKPSKRSFIEDLLFNKVTLADAGFIKQYGDCLGDIVARDLICAQKFNGLTVLPPLLTDEMIAQYTSALLAGTITSGWTFGAGAALQIPFAMQMAYRFNGIGVTQNVLYENQKLIANQFNSAIGKIQDSLSSTASALGKLQDVVNQNAQALNTLVKQLSSNFGAISSVLNDILSRLDKVEAEVQIDRLITGRLQSLQTYVTQQLIRAAEIRASANLAATKMSECVLGQSKRVDFCGKGYHLMSFPQSAPHGVVFLHVTYVPAQEKNFTCAPAICHDGKAHFPREGVFVSNGTHWFVTQRNFYEPQIITTDNTFVSGNCDVVIGIVNNTVYDPLQPELDSGGGGSDIIKLLNEQVNKEMQSSNLYMSMSSWCYTHSLDGAGLFLFDHAAEEYEHAKKLIIFLNENNVPVQLTSISAPEHKFEGLTQIFQKAYEHEQHISESINNIVDHAIKSKDHATFNFLQWYVAEQHEEEVLFKDILDKIELIGNENHGLYLADQYVKGIAKSRKS

SEQ ID NO: 9028 - protein, 1315 aa, Artificial Sequence
  SARS-CoV-2/USA/WA-UW291/2020__EPI_ISL_418076 spike protein (1-1147)(I712C_T1077C) Ferritin construct
MFVFLVLLPLVSSQCVNLTTRTQLPPAYTNSFTRGVYYPDKVFRSSVLHSTQDLFLPFFSNVTWFHAIHVSGTNGTKRFDNPVLPFNDGVYFASTEKSNIIRGWIFGTTLDSKTQSLLIVNNATNVVIKVCEFQFCNDPFLGVYYHKNNKSWMESEFRVYSSANNCTFEYVSQPFLMDLEGKQGNFKNLREFVFKNIDGYFKIYSKHTPINLVRDLPQGFSALEPLVDLPIGINITRFQTLLALHRSYLTPGDSSSGWTAGAAAYYVGYLQPRTFLLKYNENGTITDAVDCALDPLSETKCTLKSFTVEKGIYQTSNFRVQPTESIVRFPNITNLCPFGEVFNATRFASVYAWNRKRISNCVADYSVLYNSASFSTFKCYGVSPTKLNDLCFTNVYADSFVIRGDEVRQIAPGQTGKIADYNYKLPDDFTGCVIAWNSNNLDSKVGGNYNYLYRLFRKSNLKPFERDISTEIYQAGSTPCNGVEGFNCYFPLQSYGFQPTNGVGYQPYRVVVLSFELLHAPATVCGPKKSTNLVKNKCVNFNFNGLTGTGVLTESNKKFLPFQQFGRDIADTTDAVRDPQTLEILDITPCSFGGVSVITPGTNTSNQVAVLYQGVNCTEVPVAIHADQLTPTWRVYSTGSNVFQTRAGCLIGAEHVNNSYECDIPIGAGICASYQTQTNSPRRARSVASQSIIAYTMSLGAENSVAYSNNSCAIPTNFTISVTTEILPVSMTKTSVDCTMYICGDSTECSNLLLQYGSFCTQLNRALTGIAVEQDKNTQEVFAQVKQIYKTPPIKDFGGFNFSQILPDPSKPSKRSFIEDLLFNKVTLADAGFIKQYGDCLGDIAARDLICAQKFNGLTVLPPLLTDEMIAQYTSALLAGTITSGWTFGAGAALQIPFAMQMAYRFNGIGVTQNVLYENQKLIANQFNSAIGKIQYSLSSTASALGKLQDVVNQNAQALNTLVKQLSSNFGAISSVLNDILSRLDKVEAEVQIDRLITGRLQSLQTYVTQQLIRAAEIRASANLAATKMSECVLGQSKRVDFCGKGYHLMSFPQSAPHGVVFLHVTYVPAQEKNFTCAPAICHDGKAHFPREGVFVSNGTHWFVTQRNFYEPQIITTDNTFVSGNCDVVIGIVNNTVYDPLQPELDSGGGGSDIIKLLNEQVNKEMQSSNLYMSMSSWCYTHSLDGAGLFLFDHAAEEYEHAKKLIIFLNENNVPVQLTSISAPEHKFEGLTQIFQKAYEHEQHISESINNIVDHAIKSKDHATFNFLQWYVAEQHEEEVLFKDILDKIELIGNENHGLYLADQYVKGIAKSRKS

SEQ ID NO: 9029 - protein, 1315 aa, Artificial Sequence; identical to SEQ ID NO: 8992
  SARS-CoV-2/Portugal/PT0034/2020__EPI_ISL_418019 spike protein (1-1147)(I712C_T1077C) Ferritin construct

SEQ ID NO: 9030 - protein, 1315 aa, Artificial Sequence; identical to SEQ ID NO: 8984
  SARS-CoV-2/Iceland/202/2020__EPI_ISL_417750 spike protein (1-1147)(I712C_T1077C) Ferritin construct

SEQ ID NO: 9031 - protein, 1315 aa, Artificial Sequence
  SARS-CoV-2/USA/WA-UW261/2020__EPI_ISL_418046 spike protein (1-1147)(I712C_T1077C) Ferritin construct
MFVFLVLLPLVSSQCVNLTTRTQLPPAYTNSFTRGVYYPDKVFRSSVLHSTQDLFLPFFSNVTWFHAIHVSGTNGTKRFDNPVLPFNDGVYFASTEKSNIIRGWIFGTTLDSKTQSLLIVNNATNVVIKVCEFQFCNDPFLGVYYHKNNKSWMESEFRVYSSANNCTFEYVSQPFLMDLEGKQGNFKNLREFVFKNIDGYFKIYSKHTPINLVRDLPQGFSALEPLVDLPIGINITRFQTLLALHRSYLTPGDSSSGWTAGAAAYYVGYLQPRTFLLKYNENGTITDAVDCALDPLSETKCTLKSFTVEKGIYQTSNFRVQPTESIVRFPNITNLCPFGEVFNATRFTSVYAWNRKRISNCVADYSVLYNSASFSTFKCYGVSPTKLNDLCFTNVYADSFVIRGDEVRQIAPGQTGKIADYNYKLPDDFTGCVIAWNSNNLDSKVGGNYNYLYRLFRKSNLKPFERDISTEIYQAGSTPCNGVEGFNCYFPLQSYGFQPTNGVGYQPYRVVVLSFELLHAPATVCGPKKSTNLVKNKCVNFNFNGLTGTGVLTESNKKFLPFQQFGRDIADTTDAVRDPQTLEILDITPCSFGGVSVITPGTNTSNQVAVLYQDVNCTEVPVAIHADQLTPTWRVYSTGSNVFQTRAGCLIGAEHVNNSYECDIPIGAGICASYQTQTNSPRRARSVASQSIIAYTMSLGAENSVAYSNNSCAIPTNFTISVTTEILPVSMTKTSVDCTMYICGDSTECSNLLLQYGSFCTQLNRALTGIAVEQDKNTQEVFAQVKQIYKTPPIKDFGGFNFSQILPDPSKPSKRSFIEDLLFNKVTLADAGFIKQYGDCLGDIAARDLICAQKFNGLTVLPPLLTDEMIAQYTSALLAGTITSGWTFGAGAALQIPFAMQMAYRFNGIGVTQNVLYENQKLIANQFNSAIGKIQDSLSSTASALGKLQDVVNQNAQALNTLVKQLSSNFGAISSVLNDILSRLDKVEAEVQIDRLITGRLQSLQTYVTQQLIRAAEIRASANLAATKMSECVLGQSKRVDFCGKGYHLMSFPQSAPHGVVFLHVTYVPAQEKNFTCAPAICHDGKAHFPREGVFVSNGTHWFVTQRNFYEPQIITTDNTFVSGNCDVVIGIVNNTVYDPLQPELDSGGGGSDIIKLLNEQVNKEMQSSNLYMSMSSWCYTHSLDGAGLFLFDHAAEEYEHAKKLIIFLNENNVPVQLTSISAPEHKFEGLTQIFQKAYEHEQHISESINNIVDHAIKSKDHATFNFLQWYVAEQHEEEVLFKDILDKIELIGNENHGLYLADQYVKGIAKSRKS

SEQ ID NO: 9032 - protein, 1315 aa, Artificial Sequence
  SARS-CoV-2/Portugal/PT0035/2020__EPI_ISL_418020 spike protein (1-1147)(I712C_T1077C) Ferritin construct
MFVFLVLLPLVSSQCVNLTTRTQLPPAYTNSFTRGVYYPDKVFRSSVLHSTQDLFLPFFSNVTWFHAIHVSGTNGTKRFDNPVLPFNDGVYFASTEKSNIIRGWIFGTTLDSKTQSLLIVNNATNVVIKVCEFQFCNDPFLGVYYHKNNKSWMESEFRVYSSANNCTFEYVSQPFLMDLEGKQGNFKNLREFVFKNIDGYFKIYSKHTPINLVRDLPQGFSALEPLVDLPIGINITRFQTLLALHRSYLTPGDSSSGWTAGAAAYYVGYLQPRTFLLKYNENGTITDAVDCALDPLSETKCTLKSFTVEKGIYQTSNFRVQPTESIVRFPNITNLCPFGEVFNATRFASVYAWNRKRISNCVADYSVLYNSASFSTFKCYGVSPTKLNDLCFTNVYADSFVIRGDEVRQIAPGQTGKIADYNYKLPDDFTGCVIAWNSNNLDSKVGGNYNYLYRLFRKSNLKPFERDISTEIYQAGSTPCNGVEGFNCYFPLQSYGFQPTNGVGYQPYRVVVLSFELLHAPATVCGPKKSTNLVKNKCVNFNFNGLTGTGVLTESNKKFLPFQQFGRDIADTTDAVRDPQTLEILDITPCSFGGVSVITPGTNTSNQVAVLYQDVNCTEVPVAIHADQLTPTWRVYSTGSNVFQTRAGCLIGAEHVNNSYECDIPIGAGICASYQTQTNSPRRARSVASQSIIAYTMSLGAENSVAYSNNSCAIPTNFTISVTTEILPVSMTKTSVDCTMYICGDSTECSNLLLQYGSFCTQLNRALTGIAVEQDKNTQEVFAQVKQIYKTPPIKDFGGFNFSQILPDPSKPSKRSFIEDLLFNKVTLADAGFIKQYGDCLGDISARDLICAQKFNGLTVLPPLLTDEMIAQYTSALLAGTITSGWTFGAGAALQIPFAMQMAYRFNGIGVTQNVLYENQKLIANQFNSAIGKIQDSLSSTASALGKLQDVVNQNAQALNTLVKQLSSNFGAISSVLNDILSRLDKVEAEVQIDRLITGRLQSLQTYVTQQLIRAAEIRASANLAATKMSECVLGQSKRVDFCGKGYHLMSFPQSAPHGVVFLHVTYVPAQEKNFTCAPAICHDGKAHFPREGVFVSNGTHWFVTQRNFYEPQIITTDNTFVSGNCDVVIGIVNNTVYDPLQPELDSGGGGSDIIKLLNEQVNKEMQSSNLYMSMSSWCYTHSLDGAGLFLFDHAAEEYEHAKKLIIFLNENNVPVQLTSISAPEHKFEGLTQIFQKAYEHEQHISESINNIVDHAIKSKDHATFNFLQWYVAEQHEEEVLFKDILDKIELIGNENHGLYLADQYVKGIAKSRKS

SEQ ID NO: 9033 - protein, 1315 aa, Artificial Sequence
  SARS-CoV-2/USA/NY-NYUMC7/2020__EPI_ISL_418192 spike protein (1-1147)(I712C_T1077C) Ferritin construct
MFVFLVLLPLVSSQCVNLTTRTQLPPAYTNSFTRGVYYPDKVFRSSVLHSTQDLFLPFFSNVTWFHAIHVSGTNGTKRFDNPVLPFNDGVYFASTEKSNIIRGWIFGTTLDSKTQSLLIVNNATNVVIKVCEFQFCNDPFLGVYHHKNNKSWMESEFRVYSSANNCTFEYVSQPFLMDLEGKQGNFKNLREFVFKNIDGYFKIYSKHTPINLVRDLPQGFSALEPLVDLPIGINITRFQTLLALHRSYLTPGDSSSGWTAGAAAYYVGYLQPRTFLLKYNENGTITDAVDCALDPLSETKCTLKSFTVEKGIYQTSNFRVQPTESIVRFPNITNLCPFGEVFNATRFASVYAWNRKRISNCVADYSVLYNSASFSTFKCYGVSPTKLNDLCFTNVYADSFVIRGDEVRQIAPGQTGKIADYNYKLPDDFTGCVIAWNSNNLDSKVGGNYNYLYRLFRKSNLKPFERDISTEIYQAGSTPCNGVEGFNCYFPLQSYGFQPTNGVGYQPYRVVVLSFELLHAPATVCGPKKSTNLVKNKCVNFNFNGLTGTGVLTESNKKFLPFQQFGRDIADTTDAVRDPQTLEILDITPCSFGGVSVITPGTNTSNQVAVLYQGVNCTEVPVAIHADQLTPTWRVYSTGSNVFQTRAGCLIGAEHVNNSYECDIPIGAGICASYQTQTNSPRRARSVASQSIIAYTMSLGAENSVAYSNNSCAIPTNFTISVTTEILPVSMTKTSVDCTMYICGDSTECSNLLLQYGSFCTQLNRALTGIAVEQDKNTQEVFAQVKQIYKTPPIKDFGGFNFSQILPDPSKPSKRSFIEDLLFNKVTLADAGFIKQYGDCLGDIAARDLICAQKFNGLTVLPPLLTDEMIAQYTSALLAGTITSGWTFGAGAALQIPFAMQMAYRFNGIGVTQNVLYENQKLIANQFNSAIGKIQDSLSSTASALGKLQDVVNQNAQALNTLVKQLSSNFGAISSVLNDILSRLDKVEAEVQIDRLITGRLQSLQTYVTQQLIRAAEIRASANLAATKMSECVLGQSKRVDFCGKGYHLMSFPQSAPHGVVFLHVTYVPAQEKNFTCAPAICHDGKAHFPREGVFVSNGTHWFVTQRNFYEPQIITTDNTFVSGNCDVVIGIVNNTVYDPLQPELDSGGGGSDIIKLLNEQVNKEMQSSNLYMSMSSWCYTHSLDGAGLFLFDHAAEEYEHAKKLIIFLNENNVPVQLTSISAPEHKFEGLTQIFQKAYEHEQHISESINNIVDHAIKSKDHATFNFLQWYVAEQHEEEVLFKDILDKIELIGNENHGLYLADQYVKGIAKSRKS

SEQ ID NO: 9034 - protein, 1315 aa, Artificial Sequence
  SARS-CoV-2/Iceland/189/2020__EPI_ISL_417709 spike protein (1-1147)(I712C_T1077C) Ferritin construct
MFVFLVLLPLVSSQCVNLTTRTQLPPAYTNSFTRGVYYPDKVFRSSVLHSTQDLFLPFFSNVTWFHAIHVSGTNGTKRFDNPVLPFNDGVYFASTEKSNIIRGWIFGTTLDSKTQSLLIVNNATNVVIKVCEFQFCNDPFLGVYYHKNNKSWMESEFRVYSSANNCTFEYVSQPFLMDLEGKQGNFKNLREFVFKNIDGYFKIYSKHTPINLVRDLPQGFSALEPLVDLPIGINITRFQTLLALHRSYLTPGDSSSGWTAGAAAYYVGYLQPRTFLLKYNENGTITDAVDCALDPLSETKCTLKSFTVEKGIYQTSNFRVQPTESIVRFPNITNLCPFGEVFNATRFASVYAWNRKRISNCVADYSVLYNSASFSTFKCYGVSPTKLNDLCFTNVYADSFVIRGDEVRQIAPGQTGKIADYNYKLPDDFTGCVIAWNSNNLDSKVGGNYNYLYRLFRKSNLKPFERDISTEIYQAGSTPCNGVEGFNCYFPLQSYGFQPTNGVGYQPYRVVVLSFELLHAPATVCGPKKSTNLVKNKCVNFNFNGLTGTGVLTESNKKFLPFQQFGRDIADTTDAVRDPQTLEILDITPCSFGGVSVITPGTNTSNQVAVLYQGVNCTEVPVAIHADQLTPTWRVYSTGSNVFQTRAGCLIGAEHVNNSYECDIPIGAGICASYQTQTNSPRRARSVASQSIIAYTMSLGAENSVAYSNNSCAIPTNFTISVTTEILPVSMTKTSVDCTMYICGDSTECSNLLLQYGSFCTQLNRALTGIAVEQDKNTQEVFAQVKQIYKTPPIKDFGGFNFSQILPDPSKPSKRSFIEDLLFNKVTLADAGFTKQYGDCLGDIAARDLICAQKFNGLTVLPPLLTDEMIAQYTSALLAGTITSGWTFGAGAALQIPFAMQMAYRFNGIGVTQNVLYENQKLIANQFNSAIGKIQDSLSSTASALGKLQDVVNQNAQALNTLVKQLSSNFGAISSVLNDILSRLDKVEAEVQIDRLITGRLQSLQTYVTQQLIRAAEIRASANLAATKMSECVLGQSKRVDFCGKGYHLMSFPQSAPHGVVFLHVTYVPAQEKNFTCAPAICHDGKAHFPREGVFVSNGTHWFVTQRNFYEPQIITTDNTFVSGNCDVVIGIVNNTVYDPLQPELDSGGGGSDIIKLLNEQVNKEMQSSNLYMSMSSWCYTHSLDGAGLFLFDHAAEEYEHAKKLIIFLNENNVPVQLTSISAPEHKFEGLTQIFQKAYEHEQHISESINNIVDHAIKSKDHATFNFLQWYVAEQHEEEVLFKDILDKIELIGNENHGLYLADQYVKGIAKSRKS

SEQ ID NO: 9035 - protein, 1315 aa, Artificial Sequence
  SARS-CoV-2/Australia/NSW56/2020__EPI_ISL_417408 spike protein (1-1147)(I712C_T1077C) Ferritin construct
MFVFLVLLPLVSSQCVNLTTRTQLPPAYTNSFTRGVYYPDKVFRSSVLHSTQDLFLPFFSNVTWFHAIHVSGTNGTKRFDNPVLPFNDGVYFASTEKSNIIRGWIFGTTLDSKTQSLLIVNNATNVVIKVCEFQFCNDPFLGVYYHKNNKSWMESEFRVYSSANNCTFEYVSQPFLMDLEGKQGNFKNLREFVFKNIDGYFKIYSKHTPINLVRDLPQGFSALEPLVDLPIGINITRFQTLLALHRSYLTPGDSSSGWTAGAAAYYVGYLQPRTFLLKYNENGTITDAVDCALDPLSETKCTLKSFTVEKGIYQTSNFRVQPTESIVRFPNITNLCPFGEVFNATRFASVYAWNRKRISNCVADYSVLYNSASFSTFKCYGVSPTKLNDLCFTNVYADSFVIRGDEVRQIAPGQTGKIADYNYKLPDDFTGCVIAWNSNNLDSKVGGNYNYLYRLFRKSNLKPFERDISTEIYQAGSTPCNGVEGFNCYFPLQSYGFQPTNGVGYQPYRVVVLSFELLHAPATVCGPKKSTNLVKNKCVNFNFNGLTGTGVLTESNKKFLPFQQFGRDIADTTDAVRDPQTLEILDITPCSFGGVSVITPGTNTSNQVAVLYQDVNCTEVPVAIHADQLTPTWRVYSTGSNVFQTRAGCLIGAEHVNNSYECDIPIGAGICASYQTQTNSPRRARSVASQSIIAYTMSLGAENSVAYSNNSCAIPTNFTISVTTEILPVSMTKTSVDCTMYICGDSTECSNLLLQYGSFCTQLNRALTGIAVEQDKNTQEVFAQVKQIYKTPPIKDFGGFNFSQILPDSSKPSKRSFIEDLLFNKVTLADAGFIKQYGDCLGDIAARDLICAQKFNGLTVLPPLLTDEMIAQYTSALLAGTITSGWTFGAGAALQIPFAMQMAYRFNGIGVTQNVLYENQKLIANQFNSAIGKIQDSLSSTASALGKLQDVVNQNAQALNTLVKQLSSNFGAISSVLNDILSRLDKVEAEVQIDRLITGRLQSLQTYVTQQLIRAAEIRASANLAATKMSECVLGQSKRVDFCGKGYHLMSFPQSAPHGVVFLHVTYVPAQEKNFTCAPAICHDGKAHFPREGVFVSNGTHWFVTQRNFYEPQIITTDNTFVSGNCDVVIGIVNNTVYDPLQPELDSGGGGSDIIKLLNEQVNKEMQSSNLYMSMSSWCYTHSLDGAGLFLFDHAAEEYEHAKKLIIFLNENNVPVQLTSISAPEHKFEGLTQIFQKAYEHEQHISESINNIVDHAIKSKDHATFNFLQWYVAEQHEEEVLFKDILDKIELIGNENHGLYLADQYVKGIAKSRKS

SEQ ID NO: 9036 - protein, 1315 aa, Artificial Sequence
  SARS-CoV-2/Iceland/280/2020__EPI_ISL_417608 spike protein (1-1147)(I712C_T1077C) Ferritin construct
MFVFLVLLPLVSSQCVNLTTRTQLPPAYTNSFTRGVYYPDKVFRSSVLHSTQDLFLPFFSNVTWFHAIHVSGTNGTKRFDNPVLPFNDGVYFASTEKSNIIRGWIFGTTLDSKTQSLLIVNNATNVVIKVCEFQFCNDPFLGVYYHKNNKSWMESEFRVYSSANNCTFEYVSQPFLMDLEGKQGNFKNLREFVFKNIDGYFKIYSKHTPINLVRDLPQGFSALEPLVDLPIGINITRFQTLLALHRSYLTPGDSSSGWTAGAAAYYVGYLQPRTFLLKYNENGTITDAVDCALDPLSETKCTLKSFTVEKGIYQTSNFRVQPTESIVRFPNITNLCPFGEVFNATRFASVYAWNRKRISNCVADYSVLYNSASFSTFKCYGVSPTKLNDLCFTNVYADSFVIRGDEVRQIAPGQTGKIADYNYKLPDDFTGCVIAWNSNNLDSKVGGNYNYLYRLFRKSNLKPFERDISTEIYQAGSTPCNGVEGFNCYFPLQSYGFQPTNGVGYQPYRVVVLSFELLHAPATVCGPKKSTNLVKNKCVNFNFNGLTGTGVLTESNKKFLPFQQFGRDIADTTDAVRDPQTLEILDITPCSFGGVSVITPGTNTSNQVAVLYQGVNCTEVPVAIHADQLTPTWRVYSTGSNVFQTRAGCLIGAEHVNNSYECDIPIGAGICASYHTQTNSPRRARSVASQSIIAYTMSLGAENSVAYSNNSCAIPTNFTISVTTEILPVSMTKTSVDCTMYICGDSTECSNLLLQYGSFCTQLNRALTGIAVEQDKNTQEVFAQVKQIYKTPPIKDFGGFNFSQILPDPSKPSKRSFIEDLLFNKVTLADAGFIKQYGDCLGDIAARDLICAQKFNGLTVLPPLLTDEMIAQYTSALLAGTITSGWTFGAGAALQIPFAMQMAYRFNGIGVTQNVLYENQKLIANQFNSAIGKIQDSLSSTASALGKLQDVVNQNAQALNTLVKQLSSNFGAISSVLNDILSRLDKVEAEVQIDRLITGRLQSLQTYVTQQLIRAAEIRASANLAATKMSECVLGQSKRVDFCGKGYHLMSFPQSAPHGVVFLHVTYVPAQEKNFTCAPAICHDGKAHFPREGVFVSNGTHWFVTQRNFYEPQIITTDNTFVSGNCDVVIGIVNNTVYDPLQPELDSGGGGSDIIKLLNEQVNKEMQSSNLYMSMSSWCYTHSLDGAGLFLFDHAAEEYEHAKKLIIFLNENNVPVQLTSISAPEHKFEGLTQIFQKAYEHEQHISESINNIVDHAIKSKDHATFNFLQWYVAEQHEEEVLFKDILDKIELIGNENHGLYLADQYVKGIAKSRKS

SEQ ID NO: 9037 - protein, 1315 aa, Artificial Sequence; identical to SEQ ID NO: 8992
  SARS-CoV-2/Iceland/247/2020__EPI_ISL_417575 spike protein (1-1147)(I712C_T1077C) Ferritin construct

SEQ ID NO: 9038 - protein, 1315 aa, Artificial Sequence
  SARS-CoV-2/Iceland/238/2020__EPI_ISL_417566 spike protein (1-1147)(I712C_T1077C) Ferritin construct
MFVFLVLLPLVSSQCVNLTTRTQLPPAYTNSFTRGVYYPDKVFRSSVLHSTQDLFLPFFSNVTWFHAIHVSGTNGTKRFDNPVLPFNDGVYFASTEKSNIIRGWIFGTTLDSKTQSLLIVNNATNVVIKVCEFQFCNDPFLGVYYHKNNKSWMESEFRVYSSANNCTFEYVSQPFLMDLEGKQGNFKNLREFVFKNIDGYFKIYSKHTPINLVRDLPQGFSALEPLVDLPIGINITRFQTLLALHRSYLTPGDSSSGWTAGAAAYYVGYLQPRTFLLKYNENGTITDAVDCALDPLSETKCTLKSFTVEKGIYQTSNFRVQPTESIVRFPNITNLCPFGEVFNATRFASVYAWNRKRISNCVADYSVLYNSASFSTFKCYGVSPTKLNDLCFTNVYADSFVIRGDEVRQIAPGQTGKIADYNYKLPDDFTGCVIAWNSNNLDSKVGGNYNYLYRLFRKSNLKPFERDISTEIYQAGSTPCNGVEGFNCYFPLQSYGFQPTNGVGYQPYRVVVLSFELLHAPATVCGPKKSTNLVKNKCVNFNFNGLTGTGVLTESNKKFLPFQQFGRDIADTTDAVRDPQTLEILDITPCSFGGVSVITPGTNTSNQVAVLYQGVNCTEVPVAIHADQLTPTWRVYSTGSNVFQTRAGCLIGAEHVNNSYECDIPIGAGICASYQTQTNSPRRARSVASQSIIAYTMSLGAENSVAYSNNSCAIPTNFTISVTTEILPVSMTKTSVDCTMYICGDSTECSNLLLQYGSFCTQLNRALTGIAVEQDKNTQEVFAQVKQIYKTPPIKDFGGFNFSQILPDPSKPSKRSFIEDLLFNKVTLADVGFIKQYGDCLGDIAARDLICAQKFNGLTVLPPLLTDEMIAQYTSALLAGTITSGWTFGAGAALQIPFAMQMAYRFNGIGVTQNVLYENQKLIANQFNSAIGKIQDSLSSTASALGKLQDVVNQNAQALNTLVKQLSSNFGAISSVLNDILSRLDKVEAEVQIDRLITGRLQSLQTYVTQQLIRAAEIRASANLAATKMSECVLGQSKRVDFCGKGYHLMSFPQSAPHGVVFLHVTYVPAQEKNFTCAPAICHDGKAHFPREGVFVSNGTHWFVTQRNFYEPQIITTDNTFVSGNCDVVIGIVNNTVYDPLQPELDSGGGGSDIIKLLNEQVNKEMQSSNLYMSMSSWCYTHSLDGAGLFLFDHAAEEYEHAKKLIIFLNENNVPVQLTSISAPEHKFEGLTQIFQKAYEHEQHISESINNIVDHAIKSKDHATFNFLQWYVAEQHEEEVLFKDILDKIELIGNENHGLYLADQYVKGIAKSRKS

SEQ ID NO: 9039 - protein, 1315 aa, Artificial Sequence
  SARS-CoV-2/Greece/16/2020__EPI_ISL_418265 spike protein (1-1147)(I712C_T1077C) Ferritin construct
MFVFLVLLPLVSSQCVNLTTRTQLPPAYTNSFTRGVYYPDKVFRSSVLHSTQDLFLPFFSNVTWFHAIHVSGTNGTKRFDNPVLPFNDGVYFASTEKSNIIRGWIFGTTLDSKTQSLLIVNNATNVVIKVCEFQFCNDPFLGVYYHKNNKSWMESEFRVYSSANNCTFEYVSQPFLMDLEGKQGNFKNLREFVFKNVDGYFKIYSKHTPINLVRDLPQGFSALEPLVDLPIGINITRFQTLLALHRSYLTPGDSSSGWTAGAAAYYVGYLQPRTFLLKYNENGTITDAVDCALDPLSETKCTLKSFTVEKGIYQTSNFRVQPTESIVRFPNITNLCPFGEVFNATRFASVYAWNRKRISNCVADYSVLYNSASFSTFKCYGVSPTKLNDLCFTNVYADSFVIRGDEVRQIAPGQTGKIADYNYKLPDDFTGCVIAWNSNNLDSKVGGNYNYLYRLFRKSNLKPFERDISTEIYQAGSTPCNGVEGFNCYFPLQSYGFQPTNGVGYQPYRVVVLSFELLHAPATVCGPKKSTNLVKNKCVNFNFNGLTGTGVLTESNKKFLPFQQFGRDIADTTDAVRDPQTLEILDITPCSFGGVSVITPGTNTSNQVAVLYQDVNCTEVPVAIHADQLTPTWRVYSTGSNVFQTRAGCLIGAEHVNNSYECDIPIGAGICASYQTQTNSPRRARSVASQSIIAYTMSLGAENSVAYSNNSCAIPTNFTISVTTEILPVSMTKTSVDCTMYICGDSTECSNLLLQYGSFCTQLNRALTGIAVEQDKNTQEVFAQVKQIYKTPPIKDFGGFNFSQILPDPSKPSKRSFIEDLLFNKVTLADAGFIKQYGDCLGDIAARDLICAQKFNGLTVLPPLLTDEMIAQYTSALLAGTITSGWTFGAGAALQIPFAMQMAYRFNGIGVTQNVLYENQKLIANQFNSAIGKIQDSLSSTASALGKLQDVVNQNAQALNTLVKQLSSNFGAISSVLNDILSRLDKVEAEVQIDRLITGRLQSLQTYVTQQLIRAAEIRASANLAATKMSECVLGQSKRVDFCGKGYHLMSFPQSAPHGVVFLHVTYVPAQEKNFTCAPAICHDGKAHFPREGVFVSNGTHWFVTQRNFYEPQIITTDNTFVSGNCDVVIGIVNNTVYDPLQPELDSGGGGSDIIKLLNEQVNKEMQSSNLYMSMSSWCYTHSLDGAGLFLFDHAAEEYEHAKKLIIFLNENNVPVQLTSISAPEHKFEGLTQIFQKAYEHEQHISESINNIVDHAIKSKDHATFNFLQWYVAEQHEEEVLFKDILDKIELIGNENHGLYLADQYVKGIAKSRKS

SEQ ID NO: 9040 - protein, 1315 aa, Artificial Sequence
  SARS-CoV-2/Iceland/319/2020__EPI_ISL_417648 spike protein (1-1147)(I712C_T1077C) Ferritin construct
MFVFLVLLPLVSSQCVNLTTRTQLPPAYTNSFTRGVYYPDKVFRSSVLHSTQDLFLPFFSNVTWFHAIHVSGTNGTKRFDNPVLPFNDGVYFASTEKSNIIRGWIFGTTLDSKTQSLLIVNNATNVVIKVCEFQFCNDPFLGVYYHKNNKSWMESEFRVYSSANNCTFEYVSQPFLIDLEGKQGNFKNLREFVFKNIDGYFKIYSKHTPINLVRDLPQGFSALEPLVDLPIGINITRFQTLLALHRSYLTPGDSSSGWTAGAAAYYVGYLQPRTFLLKYNENGTITDAVDCALDPLSETKCTLKSFTVEKGIYQTSNFRVQPTESIVRFPNITNLCPFGEVFNATRFASVYAWNRKRISNCVADYSVLYNSASFSTFKCYGVSPTKLNDLCFTNVYADSFVIRGDEVRQIAPGQTGKIADYNYKLPDDFTGCVIAWNSNNLDSKVGGNYNYLYRLFRKSNLKPFERDISTEIYQAGSTPCNGVEGFNCYFPLQSYGFQPTNGVGYQPYRVVVLSFELLHAPATVCGPKKSTNLVKNKCVNFNFNGLTGTGVLTESNKKFLPFQQFGRDIADTTDAVRDPQTLEILDITPCSFGGVSVITPGTNTSNQVAVLYQGVNCTEVPVAIHADQLTPTWRVYSTGSNVFQTRAGCLIGAEHVNNSYECDIPIGAGICASYQTQTNSPRRARSVASQSIIAYTMSLGAENSVAYSNNSCAIPTNFTISVTTEILPVSMTKTSVDCTMYICGDSTECSNLLLQYGSFCTQLNRALTGIAVEQDKNTQEVFAQVKQIYKTPPIKDFGGFNFSQILPDPSKPSKRSFIEDLLFNKVTLADAGFIKQYGDCLGDIAARDLICAQKFNGLTVLPPLLTDEMIAQYTSALLAGTITSGWTFGAGAALQIPFAMQMAYRFNGIGVTQNVLYENQKLIANQFNSAIGKIQDSLSSTASALGKLQDVVNQNAQALNTLVKQLSSNFGAISSVLNDILSRLDKVEAEVQIDRLITGRLQSLQTYVTQQLIRAAEIRASANLAATKMSECVLGQSKRVDFCGKGYHLMSFPQSAPHGVVFLHVTYVPAQEKNFTCAPAICHDGKAHFPREGVFVSNGTHWFVTQRNFYEPQIITTDNTFVSGNCDVVIGIVNNTVYDPLQPELDSGGGGSDIIKLLNEQVNKEMQSSNLYMSMSSWCYTHSLDGAGLFLFDHAAEEYEHAKKLIIFLNENNVPVQLTSISAPEHKFEGLTQIFQKAYEHEQHISESINNIVDHAIKSKDHATFNFLQWYVAEQHEEEVLFKDILDKIELIGNENHGLYLADQYVKGIAKSRKS

SEQ ID NO: 9041 - protein, 1315 aa, Artificial Sequence
  SARS-CoV-2/Congo/94/2020__EPI_ISL_417947 spike protein (1-1147)(I712C_T1077C) Ferritin construct
MFVFLVLLPLVSSQCVNLTTRTQLPPAYTNSFTRGVYYPDKVFRSSVLHSTQDLFLPFFSNVTWFHAIHVSGTNGTKRFDNPVLPFNDGVYFASTEKSNIIRGWIFGTTLDSKTQSLLIVNNATNVVIKVCEFQFCNDPFLGVYYHKNNKSWMESEFRVYSSANNCTFEYVSQPFLMDLEGKQGNFKNLREFVFKNIDGYFKIYSKHTPINLVRDLPQGFSALEPLVDLPIGINITRFQTLLALHRSYLTPGDSSSGWTAGAAAYYVGYLQPRTFLLKYNENGTITDAVDCALDPLSETKCTLKSFTVEKGIYQTSNFRVQPTESIVRFPNITNLCPFGEVFNATRFASVYAWNRKRISNCVADYSVLYNSASFSTFKCYGVSPTKLNDLCFTNVYADSFVIRGDEVRQIAPGQTGKIADYNYKLPDDFTGCVIAWNSNNLDSKVGGNYNYLYRLFRKSNLKPFERDISTEIYQAGSTPCNGVEGFNCYFPLQSYGFQPTNGVGYQPYRVVVLSFELLHAPATVCGPKKSTNLVKNKCVNFNFNGLTGTGVLTESNKKFLPFQQFGRDIADTTDAVRDPQTLEILDITPCSFGGVSVITPGTNTSNQVAVLYQGVNCTEVPVAIHADQLTPTWRVYSTGSNVFQTRAGCLIGAEHVNNSYECDIPIGAGICASYQTQTNSPRRARSVASQSIIAYTMSLGAENSVAYSNNSCAIPTNFTISVTTEILPVSMTKTSVDCTMYICGDSTECSNLLLQYGSFCTQLNRALTGIAVEQDKNTQEVFAQVKQIYKTPPIKDFGGFNFSQILPDPSKPSKRSFIEDILFNKVTLADAGFIKQYGDCLGDIAARDLICAQKFNGLTVLPPLLTDEMIAQYTSALLAGTITSGWTFGAGAALQIPFAMQMAYRFNGIGVTQNVLYENQKLIANQFNSAIGKIQDSLSSTASALGKLQDVVNQNAQALNTLVKQLSSNFGAISSVLNDILSRLDKVEAEVQIDRLITGRLQSLQTYVTQQLIRAAEIRASANLAATKMSECVLGQSKRVDFCGKGYHLMSFPQSAPHGVVFLHVTYVPAQEKNFTCAPAICHDGKAHFPREGVFVSNGTHWFVTQRNFYEPQIITTDNTFVSGNCDVVIGIVNNTVYDPLQPELDSGGGGSDIIKLLNEQVNKEMQSSNLYMSMSSWCYTHSLDGAGLFLFDHAAEEYEHAKKLIIFLNENNVPVQLTSISAPEHKFEGLTQIFQKAYEHEQHISESINNIVDHAIKSKDHATFNFLQWYVAEQHEEEVLFKDILDKIELIGNENHGLYLADQYVKGIAKSRKS

SEQ ID NO: 9042 - protein, 1315 aa, Artificial Sequence
  SARS-CoV-2/Congo/158/2020__EPI_ISL_417950 spike protein (1-1147)(I712C_T1077C) Ferritin construct
MFVFLVLLPLVSSQCVNLTTRTQLPPAYTNSFTRGVYYPDKVFRSSVLHSTQDLFLPFFSNVTWFHAIHVSGTNGTKRFDNPVLPFNDGVYFASTEKSNIIRGWIFGTTLDSKTQSLLIVNNATNVVIKVCEFQFCNDPFLGVYYHKNNKSWMESEFRVYSSANNCTFEYVSQPFLMDLEGKQGNFKNLREFVFKNIDGYFKIYSKHTPINLVRDLPQGFSALEPLVDLPIGINITRFQTLLALHRSYLTPGDSSSGWTAGAAAYYVGYLQPRTFLLKYNENGTITDAVDCALDPLSETKCTLKSFTVEKGIYQTSNFRVQPTESIVRFPNITNLCPFGEVFNATRFASVYAWNRKRISNCVADYSVLYNSASFSTFKCYGVSPTKLNDLCFTNVYADSFVIRGDEVRQIAPGQTGKIADYNYKLPDDFTGCVIAWNSNNLDSKVGGNYNYLYRLFRKSNLKPFERDISTEIYQAGSTPCNGVEGFNCYFPLQSYGFQPTNGVGYQPYRVVVLSFELLHAPATVCGPKKSTNLVKNKCVNFNFNGLTGTGVLTESNKKFLPFQQFGRDIADTTDAVRDPQTLEILDITPCSFGGVSVITPGTNTSNQVAVLYQDVNCTEVPVAIHADQLTPTWRVYSTGSNVFQTRAGCLIGAEHVNNSYECDIPIGAGICASYQTQTNSPRRARSVASQSIIAYTMSLGAENSVAYSNNSCAIPTNFTISVTTEILPVSMTKTSVDCTMYICGDSTECSNLLLQYGSFCTQLNRALTGIAVEQDKNTQEVFAQVKQIYKTPPIKDFGGFNFSQILPDPSKPSKRSFIEDLLFNKVTLADAGFIKQYGDCLGDIAARDLICAQKFNGLTVLPPLLTDEMIAQYTSALLAGTITSGWTFGAGAALQIPFAMQMAYRFNGIGVTQNVLYENQKLIANQFNSAIGKIQDSLSSTASALGKLQDVVNQNAQALNTLVKQLSSNFGAISSVLNDILSRLDKVEAEVQIDRLITGRLQSLQTYVTQQLIRAAEIRASANLAATKMSECVLGQSKRVDFCGKGYHLMSFPQSAPHGVVFLHVTYVPAQEKNFTCAPAICHDGKAHFPREGVFVSNGTHWFVTQRNFYEPQIITTDNTFLSGNCDVVIGIVNNTVYDPLQPELDSGGGGSDIIKLLNEQVNKEMQSSNLYMSMSSWCYTHSLDGAGLFLFDHAAEEYEHAKKLIIFLNENNVPVQLTSISAPEHKFEGLTQIFQKAYEHEQHISESINNIVDHAIKSKDHATFNFLQWYVAEQHEEEVLFKDILDKIELIGNENHGLYLADQYVKGIAKSRKS

SEQ ID NO: 9043 - protein, 1315 aa, Artificial Sequence
  SARS-CoV-2/USA/UT-00034/2020__EPI_ISL_417977 spike protein (1-1147)(I712C_T1077C) Ferritin construct
MFVFLVLLPLVSSQCVNLTTRTQLPPAYTNSFTRGVYYPDKVFRSSVLHSTQDLFLPFFSNVTWFHAIHVSGTNGTKRFDNPVLPFNDGVYFASTEKSNIIRGWIFGTTLDSKTQSLLIVNNATNVVIKVCEFQFCNDPFLGVYYYKNNKSWMESEFRVYSSANNCTFEYVSQPFLMDLEGKQGNFKNLREFVFKNIDGYFKIYSKHTPINLVRDLPQGFSALEPLVDLPIGINITRFQTLLALHRSYLTPGDSSSGWTAGAAAYYVGYLQPRTFLLKYNENGTITDAVDCALDPLSETKCTLKSFTVEKGIYQTSNFRVQPTESIVRFPNITNLCPFGEVFNATRFASVYAWNRKRISNCVADYSVLYNSASFSTFKCYGVSPTKLNDLCFTNVYADSFVIRGDEVRQIAPGQTGKIADYNYKLPDDFTGCVIAWNSNNLDSKVGGNYNYLYRLFRKSNLKPFERDISTEIYQAGSTPCNGVEGFNCYFPLQSYGFQPTNGVGYQPYRVVVLSFELLHAPATVCGPKKSTNLVKNKCVNFNFNGLTGTGVLTESNKKFLPFQQFGRDIADTTDAVRDPQTLEILDITPCSFGGVSVITPGTNTSNQVAVLYQGVNCTEVPVAIHADQLTPTWRVYSTGSNVFQTRAGCLIGAEHVNNSYECDIPIGAGICASYQTQTNSPRRARSVASQSIIAYTMSLGAENSVAYSNNSCAIPTNFTISVTTEILPVSMTKTSVDCTMYICGDSTECSNLLLQYGSFCTQLNRALTGIAVEQDKNTQEVFAQVKQIYKTPPIKDFGGFNFSQILPDPSKPSKRSFIEDLLFNKVTLADAGFIKQYGDCLGDIAARDLICAQKFNGLTVLPPLLTDEMIAQYTSALLAGTITSGWTFGAGAALQIPFAMQMAYRFNGIGVTQNVLYENQKLIANQFNSAIGKIQDSLSSTASALGKLQDVVNQNAQALNTLVKQLSSNFGAISSVLNDILSRLDKVEAEVQIDRLITGRLQSLQTYVTQQLIRAAEIRASANLAATKMSECVLGQSKRVDFCGKGYHLMSFPQSAPHGVVFLHVTYVPAQEKNFTCAPAICHDGKAHFPREGVFVSNGTHWFVTQRNFYEPQIITTDNTFVSGNCDVVIGIVNNTVYDPLQPELDSGGGGSDIIKLLNEQVNKEMQSSNLYMSMSSWCYTHSLDGAGLFLFDHAAEEYEHAKKLIIFLNENNVPVQLTSISAPEHKFEGLTQIFQKAYEHEQHISESINNIVDHAIKSKDHATFNFLQWYVAEQHEEEVLFKDILDKIELIGNENHGLYLADQYVKGIAKSRKS

SEQ ID NO: 9044 - protein, 1315 aa, Artificial Sequence
  SARS-CoV-2/USA/UT-00033/2020__EPI_ISL_417976 spike protein (1-1147)(I712C_T1077C) Ferritin construct
MFVFLVLLPLVSSQCVNLTTRTQLPPAYTNSFTRGVYYPDKVFRSSVLHSTQDLFLPFFSNVTWFHAIHVSGTNGTKRFDNPVLPFNDGVYFASTEKSNIIRGWIFGTTLDSKTQSLLIVNNATNVVIKVCEFQFCNDPFLGVYYHKNNKSWMESEFRVYSSANNCTFEYVSQPFLMDLEGKQGNFKNLREFVFKNIDGYFKIYSKHTPINLVRDLPQGFSALEPLVDLPIGINITRFQTLLALHRSYLTPGDSSSGLTAGAAAYYVGYLQPRTFLLKYNENGTITDAVDCALDPLSETKCTLKSFTVEKGIYQTSNFRVQPTESIVRFPNITNLCPFGEVFNATRFASVYAWNRKRISNCVADYSVLYNSASFSTFKCYGVSPTKLNDLCFTNVYADSFVIRGDEVRQIAPGQTGKIADYNYKLPDDFTGCVIAWNSNNLDSKVGGNYNYLYRLFRKSNLKPFERDISTEIYQAGSTPCNGVEGFNCYFPLQSYGFQPTNGVGYQPYRVVVLSFELLHAPATVCGPKKSTNLVKNKCVNFNFNGLTGTGVLTESNKKFLPFQQFGRDIADTTDAVRDPQTLEILDITPCSFGGVSVITPGTNTSNQVAVLYQGVNCTEVPVAIHADQLTPTWRVYSTGSNVFQTRAGCLIGAEHVNNSYECDIPIGAGICASYQTQTNSPRRARSVASQSIIAYTMSLGAENSVAYSNNSCAIPTNFTISVTTEILPVSMTKTSVDCTMYICGDSTECSNLLLQYGSFCTQLNRALTGIAVEQDKNTQEVFAQVKQIYKTPPIKDFGGFNFSQILPDPSKPSKRSFIEDLLFNKVTLADAGFIKQYGDCLGDIAARDLICAQKFNGLTVLPPLLTDEMIAQYTSALLAGTITSGWTFGAGAALQIPFAMQMAYRFNGIGVTQNVLYENQKLIANQFNSAIGKIQDSLSSTASALGKLQDVVNQNAQALNTLVKQLSSNFGAISSVLNDILSRLDKVEAEVQIDRLITGRLQSLQTYVTQQLIRAAEIRASANLAATKMSECVLGQSKRVDFCGKGYHLMSFPQSAPHGVVFLHVTYVPAQEKNFTCAPAICHDGKAHFPREGVFVSNGTHWFVTQRNFYEPQIITTDNTFVSGNCDVVIGIVNNTVYDPLQPELDSGGGGSDIIKLLNEQVNKEMQSSNLYMSMSSWCYTHSLDGAGLFLFDHAAEEYEHAKKLIIFLNENNVPVQLTSISAPEHKFEGLTQIFQKAYEHEQHISESINNIVDHAIKSKDHATFNFLQWYVAEQHEEEVLFKDILDKIELIGNENHGLYLADQYVKGIAKSRKS

SEQ ID NO: 9045 - protein, 1315 aa, Artificial Sequence
  SARS-CoV-2/USA/WI-13/2020__EPI_ISL_417516 spike protein (1-1147)(I712C_T1077C) Ferritin construct
MFVFLVLLPLVSSQCVNLTTRTQLPPAYTNSFTRGVYYPDKVFRSSVLHSTQDLFLPFFSNVTWFHAIHVSGTNGTKRFDNPVLPFNDGVYFASTEKSNIIRGWIFGTTLDSKTQSLLIVNNATNVVIKVCEFQFCNDPFLGVYYHKNNKSWMESEFRVYSSANNCTFEYVSQPFLMDLEGKQGNFKNLREFVFKNIDGYFKIYSKHTPINLVRDLPQGFSALEPLVDLPIGINITRFQTLLALHRSYLTPGDSSSGWTAGAAAYYVGYLQPRTFLLKYNENGTITDAVDCALDPLSETKCTLKSFTVEKGIYQTSNFRVLPTESIVRFPNITNLCPFGEVFNATRFASVYAWNRKRISNCVADYSVLYNSASFSTFKCYGVSPTKLNDLCFTNVYADSFVIRGDEVRQIAPGQTGKIADYNYKLPDDFTGCVIAWNSNNLDSKVGGNYNYLYRLFRKSNLKPFERDISTEIYQAGSTPCNGVEGFNCYFPLQSYGFQPTNGVGYQPYRVVVLSFELLHAPATVCGPKKSTNLVKNKCVNFNFNGLTGTGVLTESNKKFLPFQQFGRDIADTTDAVRDPQTLEILDITPCSFGGVSVITPGTNTSNQVAVLYQGVNCTEVPVAIHADQLTPTWRVYSTGSNVFQTRAGCLIGAEHVNNSYECDIPIGAGICASYQTQTNSPRRARSVASQSIIAYTMSLGAENSVAYSNNSCAIPTNFTISVTTEILPVSMTKTSVDCTMYICGDSTECSNLLLQYGSFCTQLNRALTGIAVEQDKNTQEVFAQVKQIYKTPPIKDFGGFNFSQILPDPSKPSKRSFIEDLLFNKVTLADAGFIKQYGDCLGDIAARDLICAQKFNGLTVLPPLLTDEMIAQYTSALLAGTITSGWTFGAGAALQIPFAMQMAYRFNGIGVTQNVLYENQKLIANQFNSAIGKIQDSLSSTASALGKLQDVVNQNAQALNTLVKQLSSNFGAISSVLNDILSRLDKVEAEVQIDRLITGRLQSLQTYVTQQLIRAAEIRASANLAATKMSECVLGQSKRVDFCGKGYHLMSFPQSAPHGVVFLHVTYVPAQEKNFTCAPAICHDGKAHFPREGVFVSNGTHWFVTQRNFYEPQIITTDNTFVSGNCDVVIGIVNNTVYDPLQPELDSGGGGSDIIKLLNEQVNKEMQSSNLYMSMSSWCYTHSLDGAGLFLFDHAAEEYEHAKKLIIFLNENNVPVQLTSISAPEHKFEGLTQIFQKAYEHEQHISESINNIVDHAIKSKDHATFNFLQWYVAEQHEEEVLFKDILDKIELIGNENHGLYLADQYVKGIAKSRKS

SEQ ID NO: 9046 - protein, 1314 aa, Artificial Sequence
  SARS-CoV-2/India/1-27/2020__EPI_ISL_413522 spike protein (1-1146)(I711C_T1076C) Ferritin construct
MFVFLVLLPLVSSQCVNLTTRTQLPPAYTNSFTRGVYYPDKVFRSSVLHSTQDLFLPFFSNVTWFHAIHVSGTNGTKRFDNPVLPFNDGVYFASTEKSNIIRGWIFGTTLDSKTQSLLIVNNATNVVIKVCEFQFCNDPFLGVYHKNNKSWMESEFRVYSSANNCTFEYVSQPFLMDLEGKQGNFKNLREFVFKNIDGYFKIYSKHTPINLVRDLPQGFSALEPLVDLPIGINITRFQTLLALHRSYLTPGDSSSGWTAGAAAYYVGYLQPRTFLLKYNENGTITDAVDCALDPLSETKCTLKSFTVEKGIYQTSNFRVQPTESIVRFPNITNLCPFGEVFNATRFASVYAWNRKRISNCVADYSVLYNSASFSTFKCYGVSPTKLNDLCFTNVYADSFVIRGDEVIQIAPGQTGKIADYNYKLPDDFTGCVIAWNSNNLDSKVGGNYNYLYRLFRKSNLKPFERDISTEIYQAGSTPCNGVEGFNCYFPLQSYGFQPTNGVGYQPYRVVVLSFELLHAPATVCGPKKSTNLVKNKCVNFNFNGLTGTGVLTESNKKFLPFQQFGRDIADTTDAVRDPQTLEILDITPCSFGGVSVITPGTNTSNQVAVLYQDVNCTEVPVAIHADQLTPTWRVYSTGSNVFQTRAGCLIGAEHVNNSYECDIPIGAGICASYQTQTNSPRRARSVASQSIIAYTMSLGAENSVAYSNNSCAIPTNFTISVTTEILPVSMTKTSVDCTMYICGDSTECSNLLLQYGSFCTQLNRALTGIAVEQDKNTQEVFAQVKQIYKTPPIKDFGGFNFSQILPDPSKPSKRSFIEDLLFNKVTLADAGFIKQYGDCLGDIAARDLICAQKFNGLTVLPPLLTDEMIAQYTSALLAGTITSGWTFGAGAALQIPFAMQMAYRFNGIGVTQNVLYENQKLIANQFNSAIGKIQDSLSSTASALGKLQDVVNQNAQALNTLVKQLSSNFGAISSVLNDILSRLDKVEAEVQIDRLITGRLQSLQTYVTQQLIRAAEIRASANLAATKMSECVLGQSKRVDFCGKGYHLMSFPQSAPHGVVFLHVTYVPAQEKNFTCAPAICHDGKAHFPREGVFVSNGTHWFVTQRNFYEPQIITTDNTFVSGNCDVVIGIVNNTVYDPLQPELDSGGGGSDIIKLLNEQVNKEMQSSNLYMSMSSWCYTHSLDGAGLFLFDHAAEEYEHAKKLIIFLNENNVPVQLTSISAPEHKFEGLTQIFQKAYEHEQHISESINNIVDHAIKSKDHATFNFLQWYVAEQHEEEVLFKDILDKIELIGNENHGLYLADQYVKGIAKSRKS

SEQ ID NO: 9047 - protein, 1309 aa, Artificial Sequence
  SARS-CoV-2/pangolin/Guangxi/P4L/2017__EPI_ISL_410538 spike protein (1-1141)(I706C_T1071C) Ferritin construct
MFVFLFVLPLVSSQCVNLTTRTGIPPGYTNSSTRGVYYPDKVFRSSILHLTQDLFLPFFSNVTWFNTINYQGGFKKFDNPVLPFNDGVYFASTEKSNIIRGWIFGTTLDARTQSLLIVNNATNVVIKVCEFQFCTDPFLGVYYHNNNKTWVENEFRVYSSANNCTFEYISQPFLMDLEGKQGNFKNLREFVFKNVDGYFKIYSKHTPIDLVRDLPRGFAALEPLVDLPIGINITRFQTLLALHRSYLTPGNLESGWTTGAAAYYVGYLQQRTFLLSYNQNGTITDAVDCSLDPLSETKCTLKSLTVEKGIYQTSNFRVQPTISIVRFPNITNLCPFGEVFNASKFASVYAWNRKRISNCVADYSVLYNSTSFSTFKCYGVSPTKLNDLCFTNVYADSFVVKGDEVRQIAPGQTGVIADYNYKLPDDFTGCVIAWNSVKQDALTGGNYGYLYRLFRKSKLKPFERDISTEIYQAGSTPCNGQVGLNCYYPLERYGFHPTTGVNYQPFRVVVLSFELLNGPATVCGPKLSTTLVKDKCVNFNFNGLTGTGVLTTSKKQFLPFQQFGRDISDTTDAVRDPQTLEILDITPCSFGGVSVITPGTNTSNQVAVLYQDVNCTEVPMAIHAEQLTPAWRVYSAGANVFQTRAGCLVGAEHVNNSYECDIPVGAGICASYHSMSSLRSVNQRSIIAYTMSLGAENSVAYSNNSCAIPTNFTISVTTEILPVSMTKTSVDCTMYICGDSIECSNLLLQYGSFCTQLNRALTGIAVEQDKNTQEVFAQVKQIYKTPPIKDFGGFNFSQILPDPSKPSKRSFIEDLLFNKVTLADAGFIKQYGDCLGDIAARDLICAQKFNGLTVLPPLLTDEMIAQYTSALLAGTITSGWTFGAGAALQIPFAMQMAYRFNGIGVTQNVLYENQKLIANQFNSAIGKIQDSLSSTASALGKLQDVVNQNAQALNTLVKQLSSNFGAISSVLNDILSRLDKVEAEVQIDRLITGRLQSLQTYVTQQLIRAAEIRASANLAATKMSECVLGQSKRVDFCGKGYHLMSFPQSAPHGVVFLHVTYVPAQEKNFTCAPAICHEGKAHFPREGVFVSNGTHWFITQRNFYEPQIITTDNTFVSGSCDVVIGIVNNTVYDPLQPELDSGGGGSDIIKLLNEQVNKEMQSSNLYMSMSSWCYTHSLDGAGLFLFDHAAEEYEHAKKLIIFLNENNVPVQLTSISAPEHKFEGLTQIFQKAYEHEQHISESINNIVDHAIKSKDHATFNFLQWYVAEQHEEEVLFKDILDKIELIGNENHGLYLADQYVKGIAKSRKS

SEQ ID NO: 9048 - protein, 1309 aa, Artificial Sequence
  SARS-CoV-2/pangolin/Guangxi/P5L/2017__EPI_ISL_410540 spike protein (1-1141)(I706C_T1071C) Ferritin construct
MFVFLFVLPLVSSQCVNLTTRTGIPPGYTNSSTRGVYYPDKVFRSSILHLTQDLFLPFFSNVTWFNTINYQGGFKKFDNPVLPFNDGVYFASTEKSNIIRGWIFGTTLDARTQSLLIVNNATNVVIKVCEFQFCTDPFLGVYYHNNNKTWVENEFRVYSSANNCTFEYISQPFLMDLEGKQGNFKNLREFVFKNVDGYFKIYSKHTPIDLVRDLPRGFAALEPLVDLPIGINITRFQTLLALHRSYLTPGKLESGWTTGAAAYYVGYLQQRTFLLSYNQNGTITDAVDCSLDPLSETKCTLKSLTVEKGIYQTSNFRVQPTISIVRFPNITNLCPFGEVFNASKFASVYAWNRKRISNCVADYSVLYNSTSFSTFKCYGVSPTKLNDLCFTNVYADSFVVKGDEVRQIAPGQTGVIADYNYKLPDDFTGCVIAWNSVKQDALTGGNYGYLYRLFRKSKLKPFERDISTEIYQAGSTPCNGQVGLNCYYPLERYGFHPTTGVNYQPFRVVVLSFELLNGPATVCGPKLSTTLVKDKCVNFNFNGLTGTGVLTTSKKQFLPFQQFGRDISDTTDAVRDPQTLEILDITPCSFGGVSVITPGTNTSNQVAVLYQDVNCTEVPMAIHAEQLTPAWRVYSAGANVFQTRAGCLVGAEHVNNSYECDIPVGAGICASYHSMSSFRSVNQRSIIAYTMSLGAENSVAYSNNSCAIPTNFTISVTTEILPVSMTKTSVDCTMYICGDSIECSNLLLQYGSFCTQLNRALTGIAVEQDKNTQEVFAQVKQIYKTPPIKDFGGFNFSQILPDPSKPSKRSFIEDLLFNKVTLADAGFIKQYGDCLGDIAARDLICAQKFNGLTVLPPLLTDEMIAQYTSALLAGTITSGWTFGAGAALQIPFAMQMAYRFNGIGVTQNVLYENQKLIANQFNSAIGKIQDSLSSTASALGKLQDVVNQNAQALNTLVKQLSSNFGAISSVLNDILSRLDKVEAEVQIDRLITGRLQSLQTYVTQQLIRAAEIRASANLAATKMSECVLGQSKRVDFCGKGYHLMSFPQSAPHGVVFLHVTYVPAQEKNFTCAPAICHEGKAHFPREGVFVSNGTHWFITQRNFYEPQIITTDNTFVSGSCDVVIGIVNNTVYDPLQPELDSGGGGSDIIKLLNEQVNKEMQSSNLYMSMSSWCYTHSLDGAGLFLFDHAAEEYEHAKKLIIFLNENNVPVQLTSISAPEHKFEGLTQIFQKAYEHEQHISESINNIVDHAIKSKDHATFNFLQWYVAEQHEEEVLFKDILDKIELIGNENHGLYLADQYVKGIAKSRKS

SEQ ID NO: 9049 - protein, 1309 aa, Artificial Sequence
  SARS-CoV-2/pangolin/Guangxi/P5E/2017__EPI_ISL_410541 spike protein (1-1141)(I706C_T1071C) Ferritin construct
MFVFLFVLPLVSSQCVNLTTRTGIPPGYTNSSTRGVYYPDKVFRSSILHLTQDLFLPFFSNVTWFNTITYQGGSKKFDNPVLPFNDGVYFASTEKSNIIRGWIFGTTLDARTQSLLIVNNATNVVIKVCEFQFCTDPFLGVYYHNNNKTWVENEFRVYSSANNCTFEYISQPFLMDLEGKQGNFKNLREFVFKNVDGYFKIYSKHTPIDLVRDLPRGFAALEPLVDLPIGINITRFQTLLALHRSYLTPGKLESGWTTGAAAYYVGYLQQRTFLLSYNQNGTITDAVDCSLDPLSETKCTLKSLTVEKGIYQTSNFRVQPTISIVRFPNITNLCPFGEVFNASKFASVYAWNRKRISNCVADYSVLYNSTSFSTFKCYGVSPTKLNDLCFTNVYADSFVVKGDEVRQIAPGQTGVIADYNYKLPDDFTGCVIAWNSVKQDALTGDNYGYLYRLFRKSKLKPFERDISTEIYQAGSTPCNGQVGLNCYYPLERYGFHPTTGVNYQPFRVVVLSFELLNGPATVCGPKLSTTLVKDKCVNFNFNGLTGTGVLTTSKKQFLPFQQFGRDISDTTDAVRDPQTLEILDITPCSFGGVSVITPGTNTSNQVAVLYQDVNCTEVPMAIHAEQLTPAWRVYSAGANVFQTRAGCLVGAEHVNNSYECDIPVGAGICASYHSMSSFRSVNQRSIIAYTMSLGAENSVAYSNNSCAIPTNFTISVTTEILPVSMTKTSVDCTMYICGDSIECSNLLLQYGSFCTQLNRALTGIAVEQDKNTQEVFAQVKQIYKTPPIKDFGGFNFSQILPDPSKPSKRSFIEDLLFNKVTLADAGFIKQYGDCLGDIAARDLICAQKFNGLTVLPPLLTDEMIAQYTSALLAGTITSGWTFGAGAALQIPFAMQMAYRFNGIGVTQNVLYENQKLIANQFNSAIGKIQDSLSSTASALGKLQDVVNQNAQALNTLVKQLSSNFGAISSVLNDILSRLDKVEAEVQIDRLITGRLQSLQTYVTQQLIRAAEIRASANLAATKMSECVLGQSKRVDFCGKGYHLMSFPQSAPHGVVFLHVTYVPAQEKNFTCAPAICHEGKAHFPREGVFVSNGTHWFITQRNFYEPQIITTDNTFVSGSCDVVIGIVNNTVYDPLQPELDSGGGGSDIIKLLNEQVNKEMQSSNLYMSMSSWCYTHSLDGAGLFLFDHAAEEYEHAKKLIIFLNENNVPVQLTSISAPEHKFEGLTQIFQKAYEHEQHISESINNIVDHAIKSKDHATFNFLQWYVAEQHEEEVLFKDILDKIELIGNENHGLYLADQYVKGIAKSRKS

SEQ ID NO: 9050 - protein, 1307 aa, Artificial Sequence
  SARS-CoV-2/pangolin/Guangxi/P1E/2017__EPI_ISL_410539 spike protein (1-1139)(I704C_T1069C) Ferritin construct
MFVFLFVLPLVSSQCVNLTTRTGIQPGYTNSSTRGVYYPDKVFRSSILHLTQDLFLPFFSNVTWFNTINYQGGFKKFDNPVLPFNDGVYFASTEKSNIIRGWIFGTTLDARTQSLLIVNNATNVVIKVCEFQFCTDPFLGVYYHNNNKTWVENEFRVYSSANNCTFEYISQPFLMDLEGKQGNFKNLREFVFKNVDGYFKIYSKHTPIDLVRDLPRGFAALEPLVDLPIGINITRFQTLLALHRSYLTPGKLESGWTTGAAAYYVGYLQQRTFLLSYNQNGTITDAVDCSLDPLSETKCTLKSLTVEKGIYQTSNFRVQPTISIVRFPNITNLCPFGEVFNASKFASVYAWNRKRISNCVADYSVLYNSTSFSTFKCYGVSPTKLNDLCFTNVYADSFVVKGDEVRQIAPGQTGVIADYNYKLPDDFTGCVIAWNSVKQDALTGGNYLYRLFRKSKLKPFERDISTEIYQAGSTPCNGQVGLNCYYPLERYGFHPTTGVNYQPFRVVVLSFELLNGPATVCGPKLSTTLVKDKCVNFNFNGLTGTGVLTTSKKQFLPFQQFGRDISDTTDAVRDPQTLEILDITPCSFGGVSVITPGTNTSNQVAVLYQDVNCTEVPMAIHAEQLTPAWRVYSAGANVFQTRAGCLVGAEHVNNSYECDIPVGAGICASYHSMSSLRSVNQRSIIAYTMSLGAENSVAYSNNSCAIPTNFTISVTTEILPVSMTKTSVDCTMYICGDSIECSNLLLQYGSFCTQLNRALTGIAVEQDKNTQEVFAQVKQIYKTPPIKDFGGFNFSQILPDPSKPSKRSFIEDLLFNKVTLADAGFIKQYGDCLGDIAARDLICAQKFNGLTVLPPLLTDEMIAQYTSALLAGTITSGWTFGAGAALQIPFAMQMAYRFNGIGVTQNVLYENQKLIANQFNSAIGKIQDSLSSTASALGKLQDVVNQNAQALNTLVKQLSSNFGAISSVLNDILSRLDKVEAEVQIDRLITGRLQSLQTYVTQQLIRAAEIRASANLAATKMSECVLGQSKRVDFCGKGYHLMSFPQSAPHGVVFLHVTYVPAQEKNFTCAPAICHEGKAHFPREGVFVSNGTHWFITQRNFYEPQIITTDNTFVSGSCDVVIGIVNNTVYDPLQPELDSGGGGSDIIKLLNEQVNKEMQSSNLYMSMSSWCYTHSLDGAGLFLFDHAAEEYEHAKKLIIFLNENNVPVQLTSISAPEHKFEGLTQIFQKAYEHEQHISESINNIVDHAIKSKDHATFNFLQWYVAEQHEEEVLFKDILDKIELIGNENHGLYLADQYVKGIAKSRKS

SEQ ID NO: 9051 - protein, 1315 aa, Artificial Sequence
  SARS-CoV-2/Wuhan/WIV05/2019__EPI_ISL_402128 spike protein (1-1147)(I714C_Y1110C) Ferritin construct
MFVFLVLLPLVSSQCVNLTTRTQLPPAYTNSFTRGVYYPDKVFRSSVLHSTQDLFLPFFSNVTWFHAIHVSGTNGTKRFDNPVLPFNDGVYFASTEKSNIIRGWIFGTTLDSKTQSLLIVNNATNVVIKVCEFQFCNDPFLGVYYHKNNKSWMESEFRVYSSANNCTFEYVSQPFLMDLEGKQGNFKNLREFVFKNIDGYFKIYSKHTPINLVRDLPQGFSALEPLVDLPIGINITRFQTLLALHRSYLTPGDSSSGWTAGAAAYYVGYLQPRTFLLKYNENGTITDAVDCALDPLSETKCTLKSFTVEKGIYQTSNFRVQPTESIVRFPNITNLCPFGEVFNATRFASVYAWNRKRISNCVADYSVLYNSASFSTFKCYGVSPTKLNDLCFTNVYADSFVIRGDEVRQIAPGQTGKIADYNYKLPDDFTGCVIAWNSNNLDSKVGGNYNYLYRLFRKSNLKPFERDISTEIYQAGSTPCNGVEGFNCYFPLQSYGFQPTNGVGYQPYRVVVLSFELLHAPATVCGPKKSTNLVKNKCVNFNFNGLTGTGVLTESNKKFLPFQQFGRDIADTTDAVRDPQTLEILDITPCSFGGVSVITPGTNTSNQVAVLYQDVNCTEVPVAIHADQLTPTWRVYSTGSNVFQTRAGCLIGAEHVNNSYECDIPIGAGICASYQTQTNSPRRARSVASQSIIAYTMSLGAENSVAYSNNSIACPTNFTISVTTEILPVSMTKTSVDCTMYICGDSTECSNLLLQYGSFCTQLNRALTGIAVEQDKNTQEVFAQVKQIYKTPPIKDFGGFNFSQILPDPSKPSKRSFIEDLLFNKVTLADAGFIKQYGDCLGDIAARDLICAQKFNGLTVLPPLLTDEMIAQYTSALLAGTITSGWTFGAGAALQIPFAMQMAYRFNGIGVTQNVLYENQKLIANQFNSAIGKIQDSLSSTASALGKLQDVVNQNAQALNTLVKQLSSNFGAISSVLNDILSRLDKVEAEVQIDRLITGRLQSLQTYVTQQLIRAAEIRASANLAATKMSECVLGQSKRVDFCGKGYHLMSFPQSAPHGVVFLHVTYVPAQEKNFTTAPAICHDGKAHFPREGVFVSNGTHWFVTQRNFCEPQIITTDNTFVSGNCDVVIGIVNNTVYDPLQPELDSGGGGSDIIKLLNEQVNKEMQSSNLYMSMSSWCYTHSLDGAGLFLFDHAAEEYEHAKKLIIFLNENNVPVQLTSISAPEHKFEGLTQIFQKAYEHEQHISESINNIVDHAIKSKDHATFNFLQWYVAEQHEEEVLFKDILDKIELIGNENHGLYLADQYVKGIAKSRKS

SEQ ID NO: 9052 - protein, 1311 aa, Artificial Sequence
  SARS-CoV-2/bat/Yunnan/RaTG13/2013__EPI_ISL_402131 spike protein (1-1143)(I710C_Y1106C) Ferritin construct
MFVFLVLLPLVSSQCVNLTTRTQLPPAYTNSSTRGVYYPDKVFRSSVLHLTQDLFLPFFSNVTWFHAIHVSGTNGIKRFDNPVLPFNDGVYFASTEKSNIIRGWIFGTTLDSKTQSLLIVNNATNVVIKVCEFQFCNDPFLGVYYHKNNKSWMESEFRVYSSANNCTFEYVSQPFLMDLEGKQGNFKNLREFVFKNIDGYFKIYSKHTPINLVRDLPPGFSALEPLVDLPIGINITRFQTLLALHRSYLTPGDSSSGWTAGAAAYYVGYLQPRTFLLKYNENGTITDAVDCALDPLSETKCTLKSFTVEKGIYQTSNFRVQPTDSIVRFPNITNLCPFGEVFNATTFASVYAWNRKRISNCVADYSVLYNSTSFSTFKCYGVSPTKLNDLCFTNVYADSFVITGDEVRQIAPGQTGKIADYNYKLPDDFTGCVIAWNSKHIDAKEGGNFNYLYRLFRKANLKPFERDISTEIYQAGSKPCNGQTGLNCYYPLYRYGFYPTDGVGHQPYRVVVLSFELLNAPATVCGPKKSTNLVKNKCVNFNFNGLTGTGVLTESNKKFLPFQQFGRDIADTTDAVRDPQTLEILDITPCSFGGVSVITPGTNASNQVAVLYQDVNCTEVPVAIHADQLTPTWRVYSTGSNVFQTRAGCLIGAEHVNNSYECDIPIGAGICASYQTQTNSRSVASQSIIAYTMSLGAENSVAYSNNSIACPTNFTISVTTEILPVSMTKTSVDCTMYICGDSTECSNLLLQYGSFCTQLNRALTGIAVEQDKNTQEVFAQVKQIYKTPPIKDFGGFNFSQILPDPSKPSKRSFIEDLLFNKVTLADAGFIKQYGDCLGDIAARDLICAQKFNGLTVLPPLLTDEMIAQYTSALLAGTITSGWTFGAGAALQIPFAMQMAYRFNGIGVTQNVLYENQKLIANQFNSAIGKIQDSLSSTASALGKLQDVVNQNAQALNTLVKQLSSNFGAISSVLNDILSRLDKVEAEVQIDRLITGRLQSLQTYVTQQLIRAAEIRASANLAATKMSECVLGQSKRVDFCGKGYHLMSFPQSAPHGVVFLHVTYVPAQEKNFTTAPAICHDGKAHFPREGVFVSNGTHWFVTQRNFCEPQIITTDNTFVSGSCDVVIGIVNNTVYDPLQPELDSGGGGSDIIKLLNEQVNKEMQSSNLYMSMSSWCYTHSLDGAGLFLFDHAAEEYEHAKKLIIFLNENNVPVQLTSISAPEHKFEGLTQIFQKAYEHEQHISESINNIVDHAIKSKDHATFNFLQWYVAEQHEEEVLFKDILDKIELIGNENHGLYLADQYVKGIAKSRKS

SEQ ID NO: 9053 - protein, 1315 aa, Artificial Sequence
  SARS-CoV-2/Wuhan/HBCDC-HB-01/2019__EPI_ISL_402132 spike protein (1-1147)(I714C_Y1110C) Ferritin construct
MFVFLVLLPLVSSQCVNLTTRTQLPPAYTNSITRGVYYPDKVFRSSVLHSTQDLFLPFFSNVTWFHAIHVSGTNGTKRFDNPVLPFNDGVYFASTEKSNIIRGWIFGTTLDSKTQSLLIVNNATNVVIKVCEFQFCNDPFLGVYYHKNNKSWMESEFRVYSSANNCTFEYVSQPFLMDLEGKQGNFKNLREFVFKNIDGYFKIYSKHTPINLVRDLPQGFSALEPLVDLPIGINITRFQTLLALHRSYLTPGDSSSGWTAGAAAYYVGYLQPRTFLLKYNENGTITDAVDCALDPLSETKCTLKSFTVEKGIYQTSNFRVQPTESIVRFPNITNLCPFGEVFNATRFASVYAWNRKRISNCVADYSVLYNSASFSTFKCYGVSPTKLNDLCFTNVYADSFVIRGDEVRQIAPGQTGKIADYNYKLPDDFTGCVIAWNSNNLDSKVGGNYNYLYRLFRKSNLKPFERDISTEIYQAGSTPCNGVEGFNCYFPLQSYGFQPTNGVGYQPYRVVVLSFELLHAPATVCGPKKSTNLVKNKCVNFNFNGLTGTGVLTESNKKFLPFQQFGRDIADTTDAVRDPQTLEILDITPCSFGGVSVITPGTNTSNQVAVLYQDVNCTEVPVAIHADQLTPTWRVYSTGSNVFQTRAGCLIGAEHVNNSYECDIPIGAGICASYQTQTNSPRRARSVASQSIIAYTMSLGAENSVAYSNNSIACPTNFTISVTTEILPVSMTKTSVDCTMYICGDSTECSNLLLQYGSFCTQLNRALTGIAVEQDKNTQEVFAQVKQIYKTPPIKDFGGFNFSQILPDPSKPSKRSFIEDLLFNKVTLADAGFIKQYGDCLGDIAARDLICAQKFNGLTVLPPLLTDEMIAQYTSALLAGTITSGWTFGAGAALQIPFAMQMAYRFNGIGVTQNVLYENQKLIANQFNSAIGKIQDSLSSTASALGKLQDVVNQNAQALNTLVKQLSSNFGAISSVLNDILSRLDKVEAEVQIDRLITGRLQSLQTYVTQQLIRAAEIRASANLAATKMSECVLGQSKRVDFCGKGYHLMSFPQSAPHGVVFLHVTYVPAQEKNFTTAPAICHDGKAHFPREGVFVSNGTHWFVTQRNFCEPQIITTDNTFVSGNCDVVIGIVNNTVYDPLQPELDSGGGGSDIIKLLNEQVNKEMQSSNLYMSMSSWCYTHSLDGAGLFLFDHAAEEYEHAKKLIIFLNENNVPVQLTSISAPEHKFEGLTQIFQKAYEHEQHISESINNIVDHAIKSKDHATFNFLQWYVAEQHEEEVLFKDILDKIELIGNENHGLYLADQYVKGIAKSRKS

SEQ ID NO: 9054 - protein, 1315 aa, Artificial Sequence
  SARS-CoV-2/Guangdong/20SF028/2020__EPI_ISL_403936 spike protein (1-1147)(I714C_Y1110C) Ferritin construct
MFVFLVLLPLVSSQCVNLTTRTQLPPAYTNSFTRGVYYPDKVFRSSVLYSTQDLFLPFFSNVTWFHAIHVSGTNGTKRFDNPVLPFNDGVYFASTEKSNIIRGWIFGTTLDSKTQSLLIVNNATNVVIKVCEFQFCNDPFLGVYYHKNNKSWMESEFRVYSSANNCTFEYVSQPFLMDLEGKQGNFKNLREFVFKNIDGYFKIYSKHTPINLVRDLPQGFSALEPLVDLPIGINITRFQTLLALHRSYLTPGDSSSGWTAGAAAYYVGYLQPRTFLLKYNENGTITDAVDCALDPLSETKCTLKSFTVEKGIYQTSNFRVQPTESIVRFPNITNLCPFGEVFNATRFASVYAWNRKRISNCVADYSVLYNSASFSTFKCYGVSPTKLNDLCFTNVYADSFVIRGDEVRQIAPGQTGKIADYNYKLPDDFTGCVIAWNSNNLDSKVGGNYNYLYRLFRKSNLKPFERDISTEIYQAGSTPCNGVEGFNCYFPLQSYGFQPTNGVGYQPYRVVVLSFELLHAPATVCGPKKSTNLVKNKCVNFNFNGLTGTGVLTESNKKFLPFQQFGRDIADTTDAVRDPQTLEILDITPCSFGGVSVITPGTNTSNQVAVLYQDVNCTEVPVAIHADQLTPTWRVYSTGSNVFQTRAGCLIGAEHVNNSYECDIPIGAGICASYQTQTNSPRRARSVASQSIIAYTMSLGAENSVAYSNNSIACPTNFTISVTTEILPVSMTKTSVDCTMYICGDSTECSNLLLQYGSFCTQLNRALTGIAVEQDKNTQEVFAQVKQIYKTPPIKDFGGFNFSQILPDPSKPSKRSFIEDLLFNKVTLADAGFIKQYGDCLGDIAARDLICAQKFNGLTVLPPLLTDEMIAQYTSALLAGTITSGWTFGAGAALQIPFAMQMAYRFNGIGVTQNVLYENQKLIANQFNSAIGKIQDSLSSTASALGKLQDVVNQNAQALNTLVKQLSSNFGAISSVLNDILSRLDKVEAEVQIDRLITGRLQSLQTYVTQQLIRAAEIRASANLAATKMSECVLGQSKRVDFCGKGYHLMSFPQSAPHGVVFLHVTYVPAQEKNFTTAPAICHDGKAHFPREGVFVSNGTHWFVTQRNFCEPQIITTDNTFVSGNCDVVIGIVNNTVYDPLQPELDSGGGGSDIIKLLNEQVNKEMQSSNLYMSMSSWCYTHSLDGAGLFLFDHAAEEYEHAKKLIIFLNENNVPVQLTSISAPEHKFEGLTQIFQKAYEHEQHISESINNIVDHAIKSKDHATFNFLQWYVAEQHEEEVLFKDILDKIELIGNENHGLYLADQYVKGIAKSRKS

SEQ ID NO: 9055 - protein, 1315 aa, Artificial Sequence
  SARS-CoV-2/Shenzhen/SZTH-001/2020__EPI_ISL_406592 spike protein (1-1147)(I714C_Y1110C) Ferritin construct
MFVFLVLLPLVSSQCVNLTTRTQLPPAYTNSFTRGVYYPDKVFRSSVLHSTQDLFLPFFSNVTWFHAIHVSGTNGTKRFDNPVLPFNDGVYFASTEKSNIIRGWIFGTTLDSKTQSLLIVNNATNVVIKVCEFQFCNDPFLGVYYHKNNKSWMESEFRVYSSANNCTFEYVSQPFLMDLEGKQGNFKNLREFVFKNIDGYFKIYSKHTPINLVRDLPQGFSALEPLVDLPIGINITRFQTLLALHRSYLTPGDSSSGWTAGAAAYYVGYLQPRTFLLKYNENGTITDAVDCALDPLSETKCTLKSFTVEKGIYQTSNFRVQPTESIVRFPNITNLCPFGEVFNATRFASVYAWNRKRISNCVADYSVLYNSASFSTFKCYGVSPTKLNDLCFTNVYADSFVIRGDEVRQIAPGQTGKIADYNYKLPDDFTGCVIAWNSNNLDSKVGGNYNYLYRLFRKSNLKPFERDISTEIYQAGSTPCNGVEGFNCYFPLQSYGFQPTNGVGYQPYRVVVLSFELLHAPATVCGPKKSTNLVKNKCVNFNFNGLTGTGVLTESNKKFLPFQQFGRDIADTTDAVRDPQTLEILDITPCSFGGVSVITPGTNTSNQVAVLYQDVNCTEVPVAIHADQLTPTWRVYSTGSNVFQTRAGCLIGAEHVNNSYECDIPIGAGICASYQTQTNSPRRARSVASQSIIAYTMSLGAENSVAYSNNSIACPTNFTISVTTEILPVSMTKTSVDCTMYICGDSTECSNLLLQYGSFCTQLNRALTGIAVEQDKNTQEVFAQVKQIYKTPPIKDFGGFNFSQILPDPSKPSKRSFIEDLLFNKVTLADAGFIKQYGDCLGDIAARDLICAQKFNGLTVLPPLLTDEMIAQYTSALLAGTITSGWTFGAGAALQIPFAMQMAYRFNGIGVTQNVLYENQKLIANQFNSAIGKIQDSLSSTASALGKLQDVVNQNAQALNTLVKQLSSNFGAISSVLNDILSRLDKVEAEVQIDRLITGRLQSLQTYVTQQLIRAAEIRASANLAATKMSECVLGQSKRVDFCGKGYHLMSFPQSAPHGVVFLHVTYVPAQEKNFTTAPAICHDGKAHFPREGVFVSNGTHWFVTQRNFCEPQIITTDNTFVSGNCDVLIGIVNNTVYDPLQPELDSGGGGSDIIKLLNEQVNKEMQSSNLYMSMSSWCYTHSLDGAGLFLFDHAAEEYEHAKKLIIFLNENNVPVQLTSISAPEHKFEGLTQIFQKAYEHEQHISESINNIVDHAIKSKDHATFNFLQWYVAEQHEEEVLFKDILDKIELIGNENHGLYLADQYVKGIAKSRKS

SEQ ID NO: 9056 - protein, 1315 aa, Artificial Sequence
  SARS-CoV-2/Shenzhen/SZTH-004/2020__EPI_ISL_406595 spike protein (1-1147)(I714C_Y1110C) Ferritin construct
MFVFLVLLPLVSSQCVNLTTRTQLPPAYTNSFTRGVYYPDKVFRSSVLHSTQDLFLPFFSNVTWFHAIHVSGTNGTKRFDNPVLPFNDGVYFASTEKSNIIRGWIFGTTLDSKTQSLLIVNNATNVVIKVCEFQFCNDPFLGVYYHKNNKSWMESEFRVYSSANNCTFEYVSQPFLMDLEGKQGNFKNLREFVFKNIDGYFKIYSKHTPINLVRDLPQGFSALEPLVDLPIGINITRFQTLLALHRSYLTPGDSSSGWTAGAAAYYVGYLQPRTFLLKYNENGTITDAVDCALDPLSETKCTLKSFTVEKGIYQTSNFRVQPTESIVRFPNITNLCPFGEVFNATRFASVYAWDRKRISNCVAYYSVLYNSASFSTFKCYGVSPTKLNDLCFTNVYADSFVIRGDEVRQIAPGQTGKIADYNYKLPDDFTGCVIAWNSNNLDSKVGGNYNYLYRLFRKSNLKPFERDISTEIYQAGSTPCNGVEGFNCYFPLQSYGFQPTNGVGYQPYRVVVLSFELLHAPATVCGPKKSTNLVKNKCVNFNFNGLTGTGVLTESNKKFLPFQQFGRDIADTTDAVRDPQTLEILDITPCSFGGVSVITPGTNTSNQVAVLYQDVNCTEVPVAIHADQLTPTWRVYSTGSNVFQTRAGCLIGAEHVNNSYECDIPIGAGICASYQTQTNSPRRARSVASQSIIAYTMSLGAENSVAYSNNSIACPTNFTISVTTEILPVSMTKTSVDCTMYICGDSTECSNLLLQYGSFCTQLNRALTGIAVEQDKNTQEVFAQVKQIYKTPPIKDFGGFNFSQILPDPSKPSKRSFIEDLLFNKVTLADAGFIKQYGDCLGDIAARDLICAQKFNGLTVLPPLLTDEMIAQYTSALLAGTITSGWTFGAGAALQIPFAMQMAYRFNGIGVTQNVLYENQKLIANQFNSAIGKIQDSLSSTASALGKLQDVVNQNAQALNTLVKQLSSNFGAISSVLNDILSRLDKVEAEVQIDRLITGRLQSLQTYVTQQLIRAAEIRASANLAATKMSECVLGQSKRVDFCGKGYHLMSFPQSAPHGVVFLHVTYVPAQEKNFTTAPAICHDGKAHFPREGVFVSNGTHWFVTQRNFCEPQIITTDNTFVSGNCDVVIGIVNNTVYDPLQPELDSGGGGSDIIKLLNEQVNKEMQSSNLYMSMSSWCYTHSLDGAGLFLFDHAAEEYEHAKKLIIFLNENNVPVQLTSISAPEHKFEGLTQIFQKAYEHEQHISESINNIVDHAIKSKDHATFNFLQWYVAEQHEEEVLFKDILDKIELIGNENHGLYLADQYVKGIAKSRKS

SEQ ID NO: 9057 - protein, 1315 aa, Artificial Sequence
  SARS-CoV-2/France/IDF0372/2020__EPI_ISL_406596 spike protein (1-1147)(I714C_Y1110C) Ferritin construct
MFVFLVLLPLVSSQCVNLTTRTQLPPAYTNSFTRGVYYPDKVFRSSVLHSTQDLFLPFFSNVTWFHAIHVSGTNGTKRFDNPVLPFNDGVYFASTEKSNIIRGWIFGTTLDSKTQSLLIVNNATNVVIKVCEFQFCNDPFLGVYYHKNNKSWMESEFRVYSSANNCTFEYVSQPFLMDLEGKQGNFKNLREFVFKNIDGYFKIYSKHTPINLVRDLPQGFSALEPLVDLPIGINITRFQTLLALHRSYLTPGDSSSGWTAGAAAYYVGYLQPRTFLLKYNENGTITDAVDCALDPLSETKCTLKSFTVEKGIYQTSNFRVQPTESIVRFPNITNLCPFGEVFNATRFASVYAWNRKRISNCVADYSFLYNSASFSTFKCYGVSPTKLNDLCFTNVYADSFVIRGDEVRQIAPGQTGKIADYNYKLPDDFTGCVIAWNSNNLDSKVGGNYNYLYRLFRKSNLKPFERDISTEIYQAGSTPCNGVEGFNCYFPLQSYGFQPTNGVGYQPYRVVVLSFELLHAPATVCGPKKSTNLVKNKCVNFNFNGLTGTGVLTESNKKFLPFQQFGRDIADTTDAVRDPQTLEILDITPCSFGGVSVITPGTNTSNQVAVLYQDVNCTEVPVAIHADQLTPTWRVYSTGSNVFQTRAGCLIGAEHVNNSYECDIPIGAGICASYQTQTNSPRRARSVASQSIIAYTMSLGAENSVAYSNNSIACPTNFTISVTTEILPVSMTKTSVDCTMYICGDSTECSNLLLQYGSFCTQLNRALTGIAVEQDKNTQEVFAQVKQIYKTPPIKDFGGFNFSQILPDPSKPSKRSFIEDLLFNKVTLADAGFIKQYGDCLGDIAARDLICAQKFNGLTVLPPLLTDEMIAQYTSALLAGTITSGWTFGAGAALQIPFAMQMAYRFNGIGVTQNVLYENQKLIANQFNSAIGKIQDSLSSTASALGKLQDVVNQNAQALNTLVKQLSSNFGAISSVLNDILSRLDKVEAEVQIDRLITGRLQSLQTYVTQQLIRAAEIRASANLAATKMSECVLGQSKRVDFCGKGYHLMSFPQSAPHGVVFLHVTYVPAQEKNFTTAPAICHDGKAHFPREGVFVSNGTHWFVTQRNFCEPQIITTDNTFVSGNCDVVIGIVNNTVYDPLQPELDSGGGGSDIIKLLNEQVNKEMQSSNLYMSMSSWCYTHSLDGAGLFLFDHAAEEYEHAKKLIIFLNENNVPVQLTSISAPEHKFEGLTQIFQKAYEHEQHISESINNIVDHAIKSKDHATFNFLQWYVAEQHEEEVLFKDILDKIELIGNENHGLYLADQYVKGIAKSRKS

SEQ ID NO: 9058 - protein, 1315 aa, Artificial Sequence
  SARS-CoV-2/Australia/VIC01/2020__EPI_ISL_406844 spike protein (1-1147)(I714C_Y1110C) Ferritin construct
MFVFLVLLPLVSSQCVNLTTRTQLPPAYTNSFTRGVYYPDKVFRSSVLHSTQDLFLPFFSNVTWFHAIHVSGTNGTKRFDNPVLPFNDGVYFASTEKSNIIRGWIFGTTLDSKTQSLLIVNNATNVVIKVCEFQFCNDPFLGVYYHKNNKSWMESEFRVYSSANNCTFEYVSQPFLMDLEGKQGNFKNLREFVFKNIDGYFKIYSKHTPINLVRDLPQGFSALEPLVDLPIGINITRFQTLLALHRRYLTPGDSSSGWTAGAAAYYVGYLQPRTFLLKYNENGTITDAVDCALDPLSETKCTLKSFTVEKGIYQTSNFRVQPTESIVRFPNITNLCPFGEVFNATRFASVYAWNRKRISNCVADYSVLYNSASFSTFKCYGVSPTKLNDLCFTNVYADSFVIRGDEVRQIAPGQTGKIADYNYKLPDDFTGCVIAWNSNNLDSKVGGNYNYLYRLFRKSNLKPFERDISTEIYQAGSTPCNGVEGFNCYFPLQSYGFQPTNGVGYQPYRVVVLSFELLHAPATVCGPKKSTNLVKNKCVNFNFNGLTGTGVLTESNKKFLPFQQFGRDIADTTDAVRDPQTLEILDITPCSFGGVSVITPGTNTSNQVAVLYQDVNCTEVPVAIHADQLTPTWRVYSTGSNVFQTRAGCLIGAEHVNNSYECDIPIGAGICASYQTQTNSPRRARSVASQSIIAYTMSLGAENSVAYSNNSIACPTNFTISVTTEILPVSMTKTSVDCTMYICGDSTECSNLLLQYGSFCTQLNRALTGIAVEQDKNTQEVFAQVKQIYKTPPIKDFGGFNFSQILPDPSKPSKRSFIEDLLFNKVTLADAGFIKQYGDCLGDIAARDLICAQKFNGLTVLPPLLTDEMIAQYTSALLAGTITSGWTFGAGAALQIPFAMQMAYRFNGIGVTQNVLYENQKLIANQFNSAIGKIQDSLSSTASALGKLQDVVNQNAQALNTLVKQLSSNFGAISSVLNDILSRLDKVEAEVQIDRLITGRLQSLQTYVTQQLIRAAEIRASANLAATKMSECVLGQSKRVDFCGKGYHLMSFPQSAPHGVVFLHVTYVPAQEKNFTTAPAICHDGKAHFPREGVFVSNGTHWFVTQRNFCEPQIITTDNTFVSGNCDVVIGIVNNTVYDPLQPELDSGGGGSDIIKLLNEQVNKEMQSSNLYMSMSSWCYTHSLDGAGLFLFDHAAEEYEHAKKLIIFLNENNVPVQLTSISAPEHKFEGLTQIFQKAYEHEQHISESINNIVDHAIKSKDHATFNFLQWYVAEQHEEEVLFKDILDKIELIGNENHGLYLADQYVKGIAKSRKS

SEQ ID NO: 9059 - protein, 1315 aa, Artificial Sequence
  SARS-CoV-2/Germany/BavPat1/2020__EPI_ISL_406862 spike protein (1-1147)(I714C_Y1110C) Ferritin construct
MFVFLVLLPLVSSQCVNLTTRTQLPPAYTNSFTRGVYYPDKVFRSSVLHSTQDLFLPFFSNVTWFHAIHVSGTNGTKRFDNPVLPFNDGVYFASTEKSNIIRGWIFGTTLDSKTQSLLIVNNATNVVIKVCEFQFCNDPFLGVYYHKNNKSWMESEFRVYSSANNCTFEYVSQPFLMDLEGKQGNFKNLREFVFKNIDGYFKIYSKHTPINLVRDLPQGFSALEPLVDLPIGINITRFQTLLALHRSYLTPGDSSSGWTAGAAAYYVGYLQPRTFLLKYNENGTITDAVDCALDPLSETKCTLKSFTVEKGIYQTSNFRVQPTESIVRFPNITNLCPFGEVFNATRFASVYAWNRKRISNCVADYSVLYNSASFSTFKCYGVSPTKLNDLCFTNVYADSFVIRGDEVRQIAPGQTGKIADYNYKLPDDFTGCVIAWNSNNLDSKVGGNYNYLYRLFRKSNLKPFERDISTEIYQAGSTPCNGVEGFNCYFPLQSYGFQPTNGVGYQPYRVVVLSFELLHAPATVCGPKKSTNLVKNKCVNFNFNGLTGTGVLTESNKKFLPFQQFGRDIADTTDAVRDPQTLEILDITPCSFGGVSVITPGTNTSNQVAVLYQGVNCTEVPVAIHADQLTPTWRVYSTGSNVFQTRAGCLIGAEHVNNSYECDIPIGAGICASYQTQTNSPRRARSVASQSIIAYTMSLGAENSVAYSNNSIACPTNFTISVTTEILPVSMTKTSVDCTMYICGDSTECSNLLLQYGSFCTQLNRALTGIAVEQDKNTQEVFAQVKQIYKTPPIKDFGGFNFSQILPDPSKPSKRSFIEDLLFNKVTLADAGFIKQYGDCLGDIAARDLICAQKFNGLTVLPPLLTDEMIAQYTSALLAGTITSGWTFGAGAALQIPFAMQMAYRFNGIGVTQNVLYENQKLIANQFNSAIGKIQDSLSSTASALGKLQDVVNQNAQALNTLVKQLSSNFGAISSVLNDILSRLDKVEAEVQIDRLITGRLQSLQTYVTQQLIRAAEIRASANLAATKMSECVLGQSKRVDFCGKGYHLMSFPQSAPHGVVFLHVTYVPAQEKNFTTAPAICHDGKAHFPREGVFVSNGTHWFVTQRNFCEPQIITTDNTFVSGNCDVVIGIVNNTVYDPLQPELDSGGGGSDIIKLLNEQVNKEMQSSNLYMSMSSWCYTHSLDGAGLFLFDHAAEEYEHAKKLIIFLNENNVPVQLTSISAPEHKFEGLTQIFQKAYEHEQHISESINNIVDHAIKSKDHATFNFLQWYVAEQHEEEVLFKDILDKIELIGNENHGLYLADQYVKGIAKSRKS

SEQ ID NO: 9060 - protein, 1315 aa, Artificial Sequence
  SARS-CoV-2/Wuhan/HBCDC-HB-02/2020__EPI_ISL_412978 spike protein (1-1147)(I714C_Y1110C) Ferritin construct
MFVFLVLLPLVSSQCVNLTTRTQLPPAYTNSFTRGVYYPDKVFRSSVLHSTQDLFLPFFSNVTWFHAIHVSGTNGTKRFDNPVLPFNDGVYFASTEKSNIIRGWIFGTTLDSKTQSLLIVNNATNVVIKVCEFQFCNDPFLGVYYHKNNKSWMESEFRVYSSANNCTFEYVSQPFLMDLEGKQGNFKNLREFVFKNIDGYFKIYSKHTPINLVRDLPQGFSALEPLVDLPIGINITRFQTLLALHRSYLTPGDSSSGWTAGAAAYYVGYLQPRTFLLKYNENGTITDAVDCALDPLSETKCTLKSFTVEKGIYQTSNFRVQPTESIVRFPNITNLCPFGEVFNATRFASVYAWNRKRISNCVADYSVLYNSASFSTFKCYGVSPTKLNDLCFTNVYADSFVIRGDEVRQIAPGQTGKIADYNYKLPDDFTGCVIAWNSNNLDSKVGGNYNYLYRLFRKSNLKPFERDISTEIYQAGSTPCNGVEGFNCYFPLQSYGFQPTNGVGYQPYRVVVLSFELLHAPATVCGPKKSTNLVKNKCVNFNFNGLTGTGVLTESNKKFLPFQQFGRDIADTTDAVRDPQTLEILDITPCSFGGVSVITPGTNTSNQVAVLYQDVNCTEVPVAIHADQLTPTWRVYSTGSNVFQTRAGCLIGAEHVNNSYECDIPIGAGICASYQTQTNSPRRARSVASQSIIAYTMSLGAENSVAYSNNSIACPTNFTISVTTEILPVSMTKTSVDCTMYICGDSTECSNFLLQYGSFCTQLNRALTGIAVEQDKNTQEVFAQVKQIYKTPPIKDFGGFNFSQILPDPSKPSKRSFIEDLLFNKVTLADAGFIKQYGDCLGDIAARDLICAQKFNGLTVLPPLLTDEMIAQYTSALLAGTITSGWTFGAGAALQIPFAMQMAYRFNGIGVTQNVLYENQKLIANQFNSAIGKIQDSLSSTASALGKLQDVVNQNAQALNTLVKQLSSNFGAISSVLNDILSRLDKVEAEVQIDRLITGRLQSLQTYVTQQLIRAAEIRASANLAATKMSECVLGQSKRVDFCGKGYHLMSFPQSAPHGVVFLHVTYVPAQEKNFTTAPAICHDGKAHFPREGVFVSNGTHWFVTQRNFCEPQIITTDNTFVSGNCDVVIGIVNNTVYDPLQPELDSGGGGSDIIKLLNEQVNKEMQSSNLYMSMSSWCYTHSLDGAGLFLFDHAAEEYEHAKKLIIFLNENNVPVQLTSISAPEHKFEGLTQIFQKAYEHEQHISESINNIVDHAIKSKDHATFNFLQWYVAEQHEEEVLFKDILDKIELIGNENHGLYLADQYVKGIAKSRKS

SEQ ID NO: 9061 - protein, 1315 aa, Artificial Sequence
  SARS-CoV-2/Australia/QLD02/2020__EPI_ISL_407896 spike protein (1-1147)(I714C_Y1110C) Ferritin construct
MFVFLVLLPLVSSQCVNLTTRTQLPPAYTNSFTRGVYYPDKVFRSSVLHSTQDLFLPFFSNVTWFHAIHVSGTNGTKRFDNPVLPFNDGVYFASTEKSNIIRGWIFGTTLDSKTQSLLIVNNATNVVIKVCEFQFCNDPFLGVYYHKNNKSWMESEFRVYSSANNCTFEYVSQPFLMDLEGKQGNFKNLREFVFKNIDGYFKIYSKHTPINLVRDLPQGFSALEPLVDLPIGINITRFQTLLALHRSYLTPGDSSSGWTAGAAAYYVGYLQPRTFLLKYNENGTITDAVDCALDPLSETKCTLKSFTVEKGIYQTSNFRVQPTESIVRFPNITNLCPFGEVFNATRFASVYAWNRKRISNCVADYSVLYNSASFSTFKCYGVSPTKLNDLCFTNVYADSFVIRGDEVRQIAPGQTGKIADYNYKLPDDFTGCVIAWNSNNLDSKVGGNYNYLYRLFRKSNLKPFERDISTEIYQAGSTPCNGVEGFNCYFPLQSYGFQPTNGVGYQPYRVVVLSFELLHAPATVCGPKKSTNLVKNKCVNFNFNGLTGTGVLTESNKKFLPFQQFGRDIADTTDAVRDPQTLEILDITPCSFGGVSVITPGTNTSNQVAVLYQDVNCTEVPVAIHADQLTPTWRVYSTGSNVFQTRAGCLIGAEHVNNSYECDIPIGAGICASYQTQTNSPRRARSVASQSIIAYTMSLGAENSVAYSNNSIACPTNFTISVTTEILPVSMTKTSVDCTMYICGDSTECSNLLLQYGSFCTQLNRALTGIAVEQDKNTQEVFAQVKQIYKTPPIKDFGGFNFSQILPDPSKPSKRSFIEDLLFNKVTLADAGFIKQYGDCLGDIAARDLICAQKFNGLTVLPPLLTDEMIAQYTSALLAGTITSGWTFGAGAALQIPFAMQMAYRFNGIGVTQNVLYENQKLIANQFNSAIGKIQDSLSSTASALGKLQDVVNQNAQALNTLVKQLSSNFGAISSVLNDILSRLDKVEAEVQIDRLITGRLQSLQTYVTQQLIRAAEIRASANLAATKMSECVLGQSKRVDFCGKGYHLMSFPQSAPHGVVFLHVTYVPAQEKNFTTAPAICHDGKAHFPREGVFVSNGTHWFVTQRNFCEPQIITTDNTFVSGNCDVVIGIVNNTVYDPLQLELDSGGGGSDIIKLLNEQVNKEMQSSNLYMSMSSWCYTHSLDGAGLFLFDHAAEEYEHAKKLIIFLNENNVPVQLTSISAPEHKFEGLTQIFQKAYEHEQHISESINNIVDHAIKSKDHATFNFLQWYVAEQHEEEVLFKDILDKIELIGNENHGLYLADQYVKGIAKSRKS

SEQ ID NO: 9062 - protein, 1315 aa, Artificial Sequence
  SARS-CoV-2/India/1-31/2020__EPI_ISL_413523 spike protein (1-1147)(I714C_Y1110C) Ferritin construct
MFVFLVLLPLVSSQCVNLTTRTQLPPAYTNSFTRGVYYPDKVFRSSVLHSTQDLFLPFFSNVTWFHAIHVSGTNGTKRFDNPVLPFNDGVYFASTEKSNIIRGWIFGTTLDSKTQSLLIVNNATNVVIKVCEFQFCNDPFLGVYYHKNNKSWMESEFRVYSSANNCTFEYVSQPFLMDLEGKQGNFKNLREFVFKNIDGYFKIYSKHTPINLVRDLPQGFSALEPLVDLPIGINITRFQTLLALHRSYLTPGDSSSGWTAGAAAYYVGYLQPRTFLLKYNENGTITDAVDCALDPLSETKCTLKSFTVEKGIYQTSNFRVQPTESIVRFPNITNLCPFGEVFNATRFASVYAWNRKRISNCVADYSVLYNSASFSTFKCYGVSPTKLNDLCFTNVYADSFVIRGDEVRQIAPGQTGKIADYNYKLPDDFTGCVIAWNSNNLDSKVGGNYNYLYRLFRKSNLKPFERDISTEIYQAGSTPCNGVEGFNCYFPLQSYGFQPTNGVGYQPYRVVVLSFELLHAPATVCGPKKSTNLVKNKCVNFNFNGLTGTGVLTESNKKFLPFQQFGRDIADTTDAVRDPQTLEILDITPCSFGGVSVITPGTNTSNQVAVLYQDVNCTEVPVAIHADQLTPTWRVYSTGSNVFQTRAGCLIGAEHVNNSYECDIPIGAGICASYQTQTNSPRRARSVASQSIIAYTMSLGAENSVAYSNNSIACPTNFTISVTTEILPVSMTKTSVDCTMYICGDSTECSNLLLQYGSFCTQLNRALTGIAVEQDKNTQEVFAQVKQIYKTPPIKDFGGFNFSQILPDPSKPSKRSFIEDLLFNKVTLADAGFIKQYGDCLGDIAARDLICAQKFNGLTVLPPLLTDEMIAQYTSALLAGTITSGWTFGAGAALQIPFAMQMAYRFNGIGVTQNVLYENQKLIANQFNSVIGKIQDSLSSTASALGKLQDVVNQNAQALNTLVKQLSSNFGAISSVLNDILSRLDKVEAEVQIDRLITGRLQSLQTYVTQQLIRAAEIRASANLAATKMSECVLGQSKRVDFCGKGYHLMSFPQSAPHGVVFLHVTYVPAQEKNFTTAPAICHDGKAHFPREGVFVSNGTHWFVTQRNFCEPQIITTDNTFVSGNCDVVIGIVNNTVYDPLQPELDSGGGGSDIIKLLNEQVNKEMQSSNLYMSMSSWCYTHSLDGAGLFLFDHAAEEYEHAKKLIIFLNENNVPVQLTSISAPEHKFEGLTQIFQKAYEHEQHISESINNIVDHAIKSKDHATFNFLQWYVAEQHEEEVLFKDILDKIELIGNENHGLYLADQYVKGIAKSRKS

SEQ ID NO: 9063 - protein, 1315 aa, Artificial Sequence
  SARS-CoV-2/Guangdong/GD2020087-P0008/2020__EPI_ISL_413863 spike protein (1-1147)(I714C_Y1110C) Ferritin construct
MFVFLVLLPLVSSQCVNLTTRTQLPPAYTNSFTRGVYYPDKVFRSSVLHSTQDLFLPFFSNVTWFHAIHVSGTNGTKRFDNPVLPFNDGVYFASTEKSNIIRGWIFGTTLDSKTQSLLIVNNATNVVIKVCEFQFCNDPFLGVYYHKNNKSWMESEFRVYSSANNCTFEYVSQPFLMDLEGKQGNFKNLREFVFKNIDGYFKIYSKHTPINLVRDLPQGFSALEPLVDLPIGINITRFQTLLALHRSYLTPGDSSSGWTAGAAAYYVGYLQPRTFLLKYNENGTITDAVDCALDPLSETKCTLKSFTVEKGIYQTSNFRVQPTESIVRFPNITNLCPFGEVFNATRFASVYAWNRKRISNCVADYSVLYNSASFSTFKCYGVSPTKLNDLCFTNVYADSFVIRGDEVREIAPGQTGKIADYNYKLPDDFTGCVIAWNSNNLDSKVGGNYNYLYRLFRKSNLKPFERDISTEIYQAGSTPCNGVEGFNCYFPLQSYGFQPTNGVGYQPYRVVVLSFELLHAPATVCGPKKSTNLVKNKCVNFNFNGLTGTGVLTESNKKFLPFQQFGRDIADTTDAVRDPQTLEILDITPCSFGGVSVITPGTNTSNQVAVLYQDVNCTEVPVAIHADQLTPTWRVYSTGSNVFQTRAGCLIGAEHVNNSYECDIPIGAGICASYQTQTNSPRRARSVASQSIIAYTMSLGAENSVAYSNNSIACPTNFTISVTTEILPVSMTKTSVDCTMYICGDSTECSNLLLQYGSFCTQLNRALTGIAVEQDKNTQEVFAQVKQIYKTPPIKDFGGFNFSQILPDPSKPSKRSFIEDLLFNKVTLADAGFIKQYGDCLGDIAARDLICAQKFNGLTVLPPLLTDEMIAQYTSALLAGTITSGWTFGAGAALQIPFAMQMAYRFNGIGVTQNVLYENQKLIANQFNSAIGKIQDSLSSTASALGKLQDVVNQNAQALNTLVKQLSSNFGAISSVLNDILSRLDKVEAEVQIDRLITGRLQSLQTYVTQQLIRAAEIRASANLAATKMSECVLGQSKRVDFCGKGYHLMSFPQSAPHGVVFLHVTYVPAQEKNFTTAPAICHDGKAHFPREGVFVSNGTHWFVTQRNFCEPQIITTDNTFVSGNCDVVIGIVNNTVYDPLQPELDSGGGGSDIIKLLNEQVNKEMQSSNLYMSMSSWCYTHSLDGAGLFLFDHAAEEYEHAKKLIIFLNENNVPVQLTSISAPEHKFEGLTQIFQKAYEHEQHISESINNIVDHAIKSKDHATFNFLQWYVAEQHEEEVLFKDILDKIELIGNENHGLYLADQYVKGIAKSRKS

SEQ ID NO: 9064 - protein, 1315 aa, Artificial Sequence
  SARS-CoV-2/Sweden/01/2020__EPI_ISL_411951 spike protein (1-1147)(I714C_Y1110C) Ferritin construct
MFVFLVLLPLVSSQCVNLTTRTQLPPAYTNSFTRGVYYPDKVFRSSVLHSTQDLFLPFFSNVTWFHAIHVSGTNGTKRFDNPVLPFNDGVYFASTEKSNIIRGWIFGTTLDSKTQSLLIVNNATNVVIKVCEFQFCNDPFLGVYYHKNNKSWMESEFRVYSSANNCTFEYVSQPFLMDLEGKQGNFKNLREFVFKNIDGYFKIYSKHTPINLVRDLPQGFSALEPLVDLPIGINITRFQTLLALHRSYLTPGDSSSGWTAGAAAYYVGYLQPRTFLLKYNENGTITDAVDCALDPLSETKCTLKSFTVEKGIYQTSNFRVQPTESIVRFPNITNLCPFGEVFNATRFASVYAWNRKRISNCVADYSVLYNSASFSTFKCYGVSPTKLNDLCFTNVYADSFVIRGDEVRQIAPGQTGKIADYNYKLPDDFTGCVIAWNSNNLDSKVGGNYNYLYRLFRKSNLKPFERDISTEIYQAGSTPCNGVEGFNCYFPLQSYGFQPTNGVGYQPYRVVVLSFELLHAPATVCGPKKSTNLVKNKCVNFNFNGLTGTGVLTESNKKFLPFQQFGRDIADTTDAVRDPQTLEILDITPCSFGGVSVITPGTNTSNQVAVLYQDVNCTEVPVAIHADQLTPTWRVYSTGSNVFQTRAGCLIGAEHVNNSYECDIPIGAGICASYQTQTNSPRRARSVASQSIIAYTMSLGAENSVAYSNNSIACPTNFTISVTTEILPVSMTKTSVDCTMYICGDSTECSNLLLQYGSFCTQLNRALTGIAVEQDKNTQEVFAQVKQIYKTPPIKDCGGFNFSQILPDPSKPSKRSFIEDLLFNKVTLADAGFIKQYGDCLGDIAARDLICAQKFNGLTVLPPLLTDEMIAQYTSALLAGTITSGWTFGAGAALQIPFAMQMAYRFNGIGVTQNVLYENQKLIANQFNSAIGKIQDSLSSTASALGKLQDVVNQNAQALNTLVKQLSSNFGAISSVLNDILSRLDKVEAEVQIDRLITGRLQSLQTYVTQQLIRAAEIRASANLAATKMSECVLGQSKRVDFCGKGYHLMSFPQSAPHGVVFLHVTYVPAQEKNFTTAPAICHDGKAHFPREGVFVSNGTHWFVTQRNFCEPQIITTDNTFVSGNCDVVIGIVNNTVYDPLQPELDSGGGGSDIIKLLNEQVNKEMQSSNLYMSMSSWCYTHSLDGAGLFLFDHAAEEYEHAKKLIIFLNENNVPVQLTSISAPEHKFEGLTQIFQKAYEHEQHISESINNIVDHAIKSKDHATFNFLQWYVAEQHEEEVLFKDILDKIELIGNENHGLYLADQYVKGIAKSRKS

SEQ ID NO: 9065 - protein, 1315 aa, Artificial Sequence
  SARS-CoV-2/Tianmen/HBCDC-HB-07/2020__EPI_ISL_412983 spike protein (1-1147)(I714C_Y1110C) Ferritin construct
MFVFLVLLPLVSSQCVNLTTRTQLPPAYTNSFTRGVYYPDKVFRSSVLHSTQDLFLPFFSNVTWFHAIHVSGTNGTKRFDNPVLPFNDGVYFASTEKSNIIRGWIFGTTLDSKTQSLLIVNNATNVVIKVCEFQFCNDPFLGVYYHKNNKSWMESEFRVYSSANNCTFEYVSQPFLMDLEGKQGNFKNLREFVFKNIDGYFKIYSKHTPINLVRDLPQGFSALEPLVDLPIGINITRFQTLLALHRSYLTPGDSSSGWTAGAAAYYVGYLQPRTFLLKYNENGTITDAVDCALDPLSETKCTLKSFTVEKGIYQTSNFRVQPTESIVRFPNITNLCPFGEVFNATRFASVYAWNRKRISNCVADYSVLYNSASFSTFKCYGVSPTKLNDLCFTNVYADSFVIRGDEVRQIAPGQTGKIADYNYKLPDDFTGCVIAWNSNNLDSKVGGNYNYLYRLFRKSNLKPFERDISTEIYQAGSTPCNGVEGFNCYFPLQSYGFQPTNGVGYQPYRVVVLSFELLHAPATVCGPKKSTNLVKNKCVNFNFNGLTGTGVLTESNKKFLPFQQFGRDIADTTDAVRDPQTLEILDITPCSFGGVSVITPGTNTSNQVAVLYQDLNCTEVPVAIHADQLTPTWRVYSTGSNVFQTRAGCLIGAEHVNNSYECDIPIGAGICASYQTQTNSPRRARSVASQSIIAYTMSLGAENSVAYSNNSIACPTNFTISVTTEILPVSMTKTSVDCTMYICGDSTECSNLLLQYGSFCTQLNRALTGIAVEQDKNTQEVFAQVKQIYKTPPIKDFGGFNFSQILPDPSKPSKRSFIEDLLFNKVTLADAGFIKQYGDCLGDIAARDLICAQKFNGLTVLPPLLTDEMIAQYTSALLAGTITSGWTFGAGAALQIPFAMQMAYRFNGIGVTQNVLYENQKLIANQFNSAIGKIQDSLSSTASALGKLQDVVNQNAQALNTLVKQLSSNFGAISSVLNDILSRLDKVEAEVQIDRLITGRLQSLQTYVTQQLIRAAEIRASANLAATKMSECVLGQSKRVDFCGKGYHLMSFPQSAPHGVVFLHVTYVPAQEKNFTTAPAICHDGKAHFPREGVFVSNGTHWFVTQRNFCEPQIITTDNTFVSGNCDVVIGIVNNTVYDPLQPELDSGGGGSDIIKLLNEQVNKEMQSSNLYMSMSSWCYTHSLDGAGLFLFDHAAEEYEHAKKLIIFLNENNVPVQLTSISAPEHKFEGLTQIFQKAYEHEQHISESINNIVDHAIKSKDHATFNFLQWYVAEQHEEEVLFKDILDKIELIGNENHGLYLADQYVKGIAKSRKS

SEQ ID NO: 9066 - protein, 1315 aa, Artificial Sequence
  SARS-CoV-2/Hong Kong/case42_VM20002493/2020__EPI_ISL_414527 spike protein (1-1147)(I714C_Y1110C) Ferritin construct
MFVFLVLLPLVSSQCVNLTTRTQLPPAYTNSFTRGVYYPDKVFRSSVLHSTQDLFLPFFSNVTWFHAIHVSGTNGTKRFDNPVLPFNDGVYFASTEKSNIIRGWIFGTTLDSKTQSLLIVNNATNVVIKVCEFQFCNDPFLGVYYHKNNKSWMESEFRVYSSANNCTFEYVSQPFLMDLEGKQGNFKNLREFVFKNIDGYFKIYSKHTPINLVRDLPQGFSALEPLVDLPIGINITRFQTLLALHRSYLTPGDSSSGWTAGAAAYYVGYLQPRTFLLKYNENGTITDAVDCALDPLSETKCTLKSFTVEKGIYQTSNFRVQPTESIVRFPNITNLCPFGEVFNATRFASVYAWNRKRISNCVADYSVLYNSASFSTFKCYGVSPTKLNDLCFTNVYADSFVIRGDEVRQIAPGQTGKIADYNYKLPDDFTGCVIAWNSNNLDSKVGGNYNYLYRLFRKSNLKPFERDISTEIYQAGSTPCNGVEGFNCYFPLQSYGFQPTNGVGYQPYRVVVLSFELLHAPATVCGPKKSTNLVKNKCVNFNFNGLTGTGVLTESNKKFLPFQQFGRDIADTTDAVRDPQTLEILDITPCSFGGVSVITPGTNTSNQVAVLYQDVNCTEVPVAIHADQLTPTWRVYSTGSNVFQTRAGCLIGAEHVNNSYECDIPIGAGICASYQTQTNSPRRARSVASQSIIAYTMSLGAENSVAYSNNSIACPTNFAISVTTEILPVSMTKTSVDCTMYICGDSTECSNLLLQYGSFCTQLNRALTGIAVEQDKNTQEVFAQVKQIYKTPPIKDFGGFNFSQILPDPSKPSKRSFIEDLLFNKVTLADAGFIKQYGDCLGDIAARDLICAQKFNGLTVLPPLLTDEMIAQYTSALLAGTITSGWTFGAGAALQIPFAMQMAYRFNGIGVTQNVLYENQKLIANQFNSAIGKIQDSLSSTASALGKLQDVVNQNAQALNTLVKQLSSNFGAISSVLNDILSRLDKVEAEVQIDRLITGRLQSLQTYVTQQLIRAAEIRASANLAATKMSECVLGQSKRVDFCGKGYHLMSFPQSAPHGVVFLHVTYVPAQEKNFTTAPAICHDGKAHFPREGVFVSNGTHWFVTQRNFCEPQIITTDNTFVSGNCDVVIGIVNNTVYDPLQPELDSGGGGSDIIKLLNEQVNKEMQSSNLYMSMSSWCYTHSLDGAGLFLFDHAAEEYEHAKKLIIFLNENNVPVQLTSISAPEHKFEGLTQIFQKAYEHEQHISESINNIVDHAIKSKDHATFNFLQWYVAEQHEEEVLFKDILDKIELIGNENHGLYLADQYVKGIAKSRKS

SEQ ID NO: 9067 - protein, 1315 aa, Artificial Sequence
  SARS-CoV-2/USA/CruiseA-23/2020__EPI_ISL_414482 spike protein (1-1147)(I714C_Y1110C) Ferritin construct
MFVFLVLLPLVSSQCVNLTTRTQLPPAYTNSFTRGVYYPDKVFRSSVLHSTQDLFLPFFSNVTWFHAIHVSGTNGTKRFDNPVLPFNDGVYFASTEKSNIIRGWIFGTTLDSKTQSLLIVNNATNVVIKVCEFQFCNDPFLGVYYHKNNKSWMESEFRVYSSANNCTFEYVSQPFLMDLEVKQGNFKNLREFVFKNIDGYFKIYSKHTPINLVRDLPQGFSALEPLVDLPIGINITRFQTLLALHRSYLTPGDSSSGWTAGAAAYYVGYLQPRTFLLKYNENGTITDAVDCALDPLSETKCTLKSFTVEKGIYQTSNFRVQPTESIVRFPNITNLCPFGEVFNATRFASVYAWNRKRISNCVADYSVLYNSASFSTFKCYGVSPTKLNDLCFTNVYADSFVIRGDEVRQIAPGQTGKIADYNYKLPDDFTGCVIAWNSNNLDSKVGGNYNYLYRLFRKSNLKPFERDISTEIYQAGSTPCNGVEGFNCYFPLQSYGFQPTNGVGYQPYRVVVLSFELLHAPATVCGPKKSTNLVKNKCVNFNFNGLTGTGVLTESNKKFLPFQQFGRDIADTTDAVRDPQTLEILDITPCSFGGVSVITPGTNTSNQVAVLYQDVNCTEVPVAIHADQLTPTWRVYSTGSNVFQTRAGCLIGAEHVNNSYECDIPIGAGICASYQTQTNSPRRARSVASQSIIAYTMSLGAENSVAYSNNSIACPTNFTISVTTEILPVSMTKTSVDCTMYICGDSTECSNLLLQYGSFCTQLNRALTGIAVEQDKNTQEVFAQVKQIYKTPPIKDFGGFNFSQILPDPSKPSKRSFIEDLLFNKVTLADAGFIKQYGDCLGDIAARDLICAQKFNGLTVLPPLLTDEMIAQYTSALLAGTITSGWTFGAGAALQIPFAMQMAYRFNGIGVTQNVLYENQKLIANQFNSAIGKIQDSLSSTASALGKLQDVVNQNAQALNTLVKQLSSNFGAISSVLNDILSRLDKVEAEVQIDRLITGRLQSLQTYVTQQLIRAAEIRASANLAATKMSECVLGQSKRVDFCGKGYHLMSFPQSAPHGVVFLHVTYVPAQEKNFTTAPAICHDGKAHFPREGVFVSNGTHWFVTQRNFCEPQIITTDNTFVSGNCDVVIGIVNNTVYDPLQPELDSGGGGSDIIKLLNEQVNKEMQSSNLYMSMSSWCYTHSLDGAGLFLFDHAAEEYEHAKKLIIFLNENNVPVQLTSISAPEHKFEGLTQIFQKAYEHEQHISESINNIVDHAIKSKDHATFNFLQWYVAEQHEEEVLFKDILDKIELIGNENHGLYLADQYVKGIAKSRKS

SEQ ID NO: 9068 - protein, 1315 aa, Artificial Sequence
  SARS-CoV-2/Hong Kong/case85_VM20002868/2020__EPI_ISL_414519 spike protein (1-1147)(I714C_Y1110C) Ferritin construct
MFVFLVLVPLVSSQCVNLTTRTQLPPAYTNSFTRGVYYPDKVFRSSVLHSTQDLFLPFFSNVTWFHAIHVSGTNGTKRFDNPVLPFNDGVYFASTEKSNIIRGWIFGTTLDSKTQSLLIVNNATNVVIKVCEFQFCNDPFLGVYYHKNNKSWMESEFRVYSSANNCTFEYVSQPFLMDLEGKQGNFKNLREFVFKNIDGYFKIYSKHTPINLVRDLPQGFSALEPLVDLPIGINITRFQTLLALHRSYLTPGDSSSGWTAGAAAYYVGYLQPRTFLLKYNENGTITDAVDCALDPLSETKCTLKSFTVEKGIYQTSNFRVQPTESIVRFPNITNLCPFGEVFNATRFASVYAWNRKRISNCVADYSVLYNSASFSTFKCYGVSPTKLNDLCFTNVYADSFVIRGDEVRQIAPGQTGKIADYNYKLPDDFTGCVIAWNSNNLDSKVGGNYNYLYRLFRKSNLKPFERDISTEIYQAGSTPCNGVEGFNCYFPLQSYGFQPTNGVGYQPYRVVVLSFELLHAPATVCGPKKSTNLVKNKCVNFNFNGLTGTGVLTESNKKFLPFQQFGRDIADTTDAVRDPQTLEILDITPCSFGGVSVITPGTNTSNQVAVLYQDVNCTEVPVAIHADQLTPTWRVYSTGSNVFQTRAGCLIGAEHVNNSYECDIPIGAGICASYQTQTNSPRRARSVASQSIIAYTMSLGAENSVAYSNNSIACPTNFTISVTTEILPVSMTKTSVDCTMYICGDSTECSNLLLQYGSFCTQLNRALTGIAVEQDKNTQEVFAQVKQIYKTPPIKDFGGFNFSQILPDPSKPSKRSFIEDLLFNKVTLADAGFIKQYGDCLGDIAARDLICAQKFNGLTVLPPLLTDEMIAQYTSALLAGTITSGWTFGAGAALQIPFAMQMAYRFNGIGVTQNVLYENQKLIANQFNSAIGKIQDSLSSTASALGKLQDVVNQNAQALNTLVKQLSSNFGAISSVLNDILSRLDKVEAEVQIDRLITGRLQSLQTYVTQQLIRAAEIRASANLAATKMSECVLGQSKRVDFCGKGYHLMSFPQSAPHGVVFLHVTYVPAQEKNFTTAPAICHDGKAHFPREGVFVSNGTHWFVTQRNFCEPQIITTDNTFVSGNCDVVIGIVNNTVYDPLQPELDSGGGGSDIIKLLNEQVNKEMQSSNLYMSMSSWCYTHSLDGAGLFLFDHAAEEYEHAKKLIIFLNENNVPVQLTSISAPEHKFEGLTQIFQKAYEHEQHISESINNIVDHAIKSKDHATFNFLQWYVAEQHEEEVLFKDILDKIELIGNENHGLYLADQYVKGIAKSRKS

SEQ ID NO: 9069 - protein, 1315 aa, Artificial Sequence; identical to SEQ ID NO: 9059
  SARS-CoV-2/England/200990660/2020__EPI_ISL_414523 spike protein (1-1147)(I714C_Y1110C) Ferritin construct

SEQ ID NO: 9070 - protein, 1315 aa, Artificial Sequence
  SARS-CoV-2/Australia/NSW09/2020__EPI_ISL_413595 spike protein (1-1147)(I714C_Y1110C) Ferritin construct
MFVFLVLLPLVSSQCVNLTTRTQLPPAYTNSFTRGVYYPDKVFRSSVLHSTQDLFLPFFSNVTWFHAIHVSGTNGTKRFDNPVLPFNDGVYFASTEKSNIIRGWIFGTTLDSKTQSLLIVNNATNVVIKVCEFQFCNDPFLGVYYHKNNKSWMESEFRVYSSANNCTFEYVSQPFLMDLEGKQGNFKNLREFVFKNIDGYFKIYSKHTPINLVRDLPQGFSALEPLVDLPIGINITRFQTLLALHRSYLTPGDSSSGWTAGAAAYYVGYLQPRTFLLKYNENGTITDAVDCALDPLSETKCTLKSFTVEKGIYQTSNFRVQPTESIVRFPNITNLCPFGEVFNATRFASVYAWNRKRISNCVADYSVLYNSASFSTFKCYGVSPTKLNDLCFTNVYADSFVIRGDEVRQIAPGQTGKIADYNYKLPDDFTGCVIAWNSNNLDSKVGGNYNYLYRLFRKSNLKPFERDISTEIYQAGSTPCNGVEGFNCYFPLQSYGFQPTNGVGYQPYRVVVLSFELLHAPATVCGPKKSTNLVKNKCVNFNFNGLTGTGVLTESNKKFLPFQQFGRDIADTTDAVRDPQTLEILDITPCSFGGVSVITPGTNTSNQVAVLYQDVNCTEVPVAIHADQLTPTWRVYSTGSNVFQTRAGCLIGAEHVNNSYECDIPIGAGICASYQTQTNSPRRARSVASQSIIAYTMSLGAENSVAYSNNSIACPTNFTISVTTEILPVSMTKTSVDCTMYICGDSTECSNLLLQYGSFCTQLNRALTGIAVEQDKNTQEVFAQVKQIYKTPPIKDFGGFNFSQILPDPSKPSKRSFIEDLLFNKVTLADAGFIKQYGDCLGDIAARDLICAQKFNGLTVLPPLLTDEMIAQYTSALLAGTITSGWTFGAGAALQIPFAMQMAYRFNGIGVTQNVLYENQKLIANQFNSAIGKIQDSLSFTASALGKLQDVVNQNAQALNTLVKQLSSNFGAISSVLNDILSRLDKVEAEVQIDRLITGRLQSLQTYVTQQLIRAAEIRASANLAATKMSECVLGQSKRVDFCGKGYHLMSFPQSAPHGVVFLHVTYVPAQEKNFTTAPAICHDGKAHFPREGVFVSNGTHWFVTQRNFCEPQIITTDNTFVSGNCDVVIGIVNNTVYDPLQPELDSGGGGSDIIKLLNEQVNKEMQSSNLYMSMSSWCYTHSLDGAGLFLFDHAAEEYEHAKKLIIFLNENNVPVQLTSISAPEHKFEGLTQIFQKAYEHEQHISESINNIVDHAIKSKDHATFNFLQWYVAEQHEEEVLFKDILDKIELIGNENHGLYLADQYVKGIAKSRKS

SEQ ID NO: 9071 - protein, 1315 aa, Artificial Sequence; identical to SEQ ID NO: 9051
  SARS-CoV-2/Australia/NSW10/2020__EPI_ISL_413596 spike protein (1-1147)(I714C_Y1110C) Ferritin construct

SEQ ID NO: 9072 - protein, 1315 aa, Artificial Sequence
  SARS-CoV-2/Switzerland/1000477797/2020__EPI_ISL_413023 spike protein (1-1147)(I714C_Y1110C) Ferritin construct
MFVFLVLLPLVSSQCVNLTTRTQLPPAYTNSFTRGVYYPDKVFRSSVLHSTQDLFLPFFSNVTWFHAIHVSGTNGTKRFDNPVLPFNDGVYFASTEKSNIIRGWIFGTTLDSKTQSLLIVNNATNVVIKVCEFQFCNDPFLGVYYHKNNKSWMESEFRVYSSANNCTFEYVSQPFLMDLEGKQGNFKNLREFVFKNIDGYFNIYSKHTPINLVRDLPQGFSALEPLVDLPIGINITRFQTLLALHRSYLTPGDSSSGWTAGAAAYYVGYLQPRTFLLKYNENGTITDAVDCALDPLSETKCTLKSFTVEKGIYQTSNFRVQPTESIVRFPNITNLCPFGEVFNATRFASVYAWNRKRISNCVADYSVLYNSASFSTFKCYGVSPTKLNDLCFTNVYADSFVIRGDEVRQIAPGQTGKIADYNYKLPDDFTGCVIAWNSNNLDSKVGGNYNYLYRLFRKSNLKPFERDISTEIYQAGSTPCNGVEGFNCYFPLQSYGFQPTNGVGYQPYRVVVLSFELLHAPATVCGPKKSTNLVKNKCVNFNFNGLTGTGVLTESNKKFLPFQQFGRDIADTTDAVRDPQTLEILDITPCSFGGVSVITPGTNTSNQVAVLYQGVNCTEVPVAIHADQLTPTWRVYSTGSNVFQTRAGCLIGAEHVNNSYECDIPIGAGICASYQTQTNSPRRARSVASQSIIAYTMSLGAENSVAYSNNSIACPTNFTISVTTEILPVSMTKTSVDCTMYICGDSTECSNLLLQYGSFCTQLNRALTGIAVEQDKNTQEVFAQVKQIYKTPPIKDFGGFNFSQILPDPSKPSKRSFIEDLLFNKVTLADAGFIKQYGDCLGDIAARDLICAQKFNGLTVLPPLLTDEMIAQYTSALLAGTITSGWTFGAGAALQIPFAMQMAYRFNGIGVTQNVLYENQKLIANQFNSAIGKIQDSLSSTASALGKLQDVVNQNAQALNTLVKQLSSNFGAISSVLNDILSRLDKVEAEVQIDRLITGRLQSLQTYVTQQLIRAAEIRASANLAATKMSECVLGQSKRVDFCGKGYHLMSFPQSAPHGVVFLHVTYVPAQEKNFTTAPAICHDGKAHFPREGVFVSNGTHWFVTQRNFCEPQIITTDNTFVSGNCDVVIGIVNNTVYDPLQPELDSGGGGSDIIKLLNEQVNKEMQSSNLYMSMSSWCYTHSLDGAGLFLFDHAAEEYEHAKKLIIFLNENNVPVQLTSISAPEHKFEGLTQIFQKAYEHEQHISESINNIVDHAIKSKDHATFNFLQWYVAEQHEEEVLFKDILDKIELIGNENHGLYLADQYVKGIAKSRKS

SEQ ID NO: 9073 - protein, 1315 aa, Artificial Sequence
  SARS-CoV-2/Belgium/BA-02291/2020__EPI_ISL_415159 spike protein (1-1147)(I714C_Y1110C) Ferritin construct
MFVFLVLLPLVSSQCVNLTTRTQLPPAYTNSFTRGVYYPDKVFRSSVLHSTQDLFLPFFSNVTWFHAIHVSGTNGTKRFDNPVLPFNDGVYFASTEKSNIIRGWIFGTTLDSKTQSLLIVNNATNVVIKVCEFQFCNDPFLGVYYHKNNKSWMESEFRVYSSANNCTFEYVSQPFLMDLEGKQGNFKNLREFVFKNIDGYFKIYSKHTPINLVRDLPQGFSALEPLVDLPIGINITRFQTLLALHRSYLTPGDSSSGWTAGAAAYYVGYLQPRTFLLKYNENGTITDAVDCALDPLSETKCTLKSFTVEKGIYQTSNFRVQPTESIVRFPNITNLCPFGEVFNATRFASVYAWNRKRISNCVADYSVLYNSASFSTFKCYGVSPTKLNDLCFTNVYADSFVIRGDEVRQIAPGQTGKIADYNYKLPDDFTGCVIAWNSNNLDSKVGGNYNYLYRLFRRSNLKPFERDISTEIYQAGSTPCNGVEGFNCYFPLQSYGFQPTNGVGYQPYRVVVLSFELLPAPATVCGPKKSTNLVKNKCVNFNFNGLTGTGVLTESNKKFLPFQQFGRDIADTTDAVRDPQTLEILDITPCSFGGVSVITPGTNTSNQVAVLYQGVNCTEVPVAIHADQLTPTWRVYSTGSNVFQTRAGCLIGAEHVNNSYECDIPIGAGICASYQTQTNSPRRARSVASQSIIAYTMSLGAENSVAYSNNSIACPTNFTISVTTEILPVSMTKTSVDCTMYICGDSTECSNLLLQYGSFCTQLNRALTGIAVEQDKNTQEVFAQVKQIYKTPPIKDFGGFNFSQILPDPSKPSKRSFIEDLLFNKVTLADAGFIKQYGDCLGDIAARDLICAQKFNGLTVLPPLLTDEMIAQYTSALLAGTITSGWTFGAGAALQIPFAMQMAYRFNGIGVTQNVLYENQKLIANQFNSAIGKIQDSLSSAAPALGKLQDVVNQNAQALNTLVKQLSSNFGAISSVLNDILSRLDKVEAEVQIDRLITGRLQSLQTYVTQQLIRAAEIRASANLAATKMSECVLGQSKRVDFCGKGYHLMSFPQSAPHGVVFLHVTYVPAQEKNFTTAPAICHDGKAHFPREGVFVSNGTHWFVTQRNFCEPQIITTDNTFVSGNCDVVIGIVNNTVYDPLQPELDSGGGGSDIIKLLNEQVNKEMQSSNLYMSMSSWCYTHSLDGAGLFLFDHAAEEYEHAKKLIIFLNENNVPVQLTSISAPEHKFEGLTQIFQKAYEHEQHISESINNIVDHAIKSKDHATFNFLQWYVAEQHEEEVLFKDILDKIELIGNENHGLYLADQYVKGIAKSRKS

SEQ ID NO: 9074 - protein, 1315 aa, Artificial Sequence
  SARS-CoV-2/USA/WA8-UW5/2020__EPI_ISL_413486 spike protein (1-1147)(I714C_Y1110C) Ferritin construct
MFVFLVLLPLVSSQCVNLTTRTQLPPAYTNSFTRGVYYPDKVFRSSVLHSTQDLFLPFFSNVTWFHAIHVSGTNGTKRFDNPVLPFNDGVYFASTEKSNIIRGWIFGTTLDSKTQSLLIVNNATNVVIKVCEFQFCNDPFLGVYYHKNNKSWMESEFRVYSSANNCTFEYVSQPFLMDLEGKQGNFKNLREFVFKNIDGYFKIYSKHTPINLVRDLPQGFSALEPLVDLPIGINITRFQTLLALHRSYLTPGDSSSGWTAGAAAYYVGYLQPRTFLLKYNENGTITDAVDCALDPLSETKCTLKSFTVEKGIYQTSNFRVQPTESIVRFPNITNLCPFGEVFNATRFASVYAWNRKRISNCVADYSVLYNSASFSTFKCYGVSPTKLNDLCFTNVYADSFVIRGDEVRQIAPGQTGKIADYNYKLPDDFTGCVIAWNSNNLDSKVGGNYNYLYRLFRKSNLKPFERDISTEIYQAGSTPCNGVEGFNCYFPLQSYGFQPTNGVGYQPYRVVVLSFELLHAPATVCGPKKSTNLVKNKCVNFNFNGLTGTGVLTESNKKFLPFQQFGRDIADTTDAVRDPQTLEILDITPCSFGGVSVITPGTNTSNQVAVLYQDVNCTEVPVAIHADQLTPTWRVYSTGSNVFQTRAGCLIGAEYVNNSYECDIPIGAGICASYQTQTNSPRRARSVASQSIIAYTMSLGAENSVAYSNNSIACPTNFTISVTTEILPVSMTKTSVDCTMYICGDSTECSNLLLQYGSFCTQLNRALTGIAVEQDKNTQEVFAQVKQIYKTPPIKDFGGFNFSQILPDPSKPSKRSFIEDLLFNKVTLADAGFIKQYGDCLGDIAARDLICAQKFNGLTVLPPLLTDEMIAQYTSALLAGTITSGWTFGAGAALQIPFAMQMAYRFNGIGVTQNVLYENQKLIANQFNSAIGKIQDSLSSTASALGKLQDVVNQNAQALNTLVKQLSSNFGAISSVLNDILSRLDKVEAEVQIDRLITGRLQSLQTYVTQQLIRAAEIRASANLAATKMSECVLGQSKRVDFCGKGYHLMSFPQSAPHGVVFLHVTYVPAQEKNFTTAPAICHDGKAHFPREGVFVSNGTHWFVTQRNFCEPQIITTDNTFVSGNCDVVIGIVNNTVYDPLQPELDSGGGGSDIIKLLNEQVNKEMQSSNLYMSMSSWCYTHSLDGAGLFLFDHAAEEYEHAKKLIIFLNENNVPVQLTSISAPEHKFEGLTQIFQKAYEHEQHISESINNIVDHAIKSKDHATFNFLQWYVAEQHEEEVLFKDILDKIELIGNENHGLYLADQYVKGIAKSRKS

SEQ ID NO: 9075 - protein, 1315 aa, Artificial Sequence
  SARS-CoV-2/England/20102000506/2020__EPI_ISL_415147 spike protein (1-1147)(I714C_Y1110C) Ferritin construct
MFVFLVLLPLVSSQCVNLTTRTQLPPAYTNSFTRGVYYPDKVFRSSVLHSTQDLFLPFFSNVTWFHAIHVSGTNGTKRFDNPVLPFNDGVYFASTEKSNIIRGWIFGTTLDSKTQSLLIVNNATNVVIKVCEFQFCNDPFLGVYYHKNNKSWMESEFRVYSSANNCTFEYVSQPFLMDLEGKQGNFKNLREFVFKNIDGYFKIYSKHTPINLVRDLPQGFSALEPLVDLPIGINITRFQTLLALHRSYLTPGDSSSGWTAGAAAYYVGYLQPRTFLLKYNENGTITDAVDCALDPLSETKCTLKSFTVEKGIYQTSNFRVQPTESIVRFPNITNLCPFGEVFNATRFASVYAWNRKRISNCVADYSVLYNSASFSTFKCYGVSPTKLNDLCFTNVYADSFVIRGDEVRQIAPGQTGKIADYNYKLPDDFTGCVIAWNSNNLDSKVGGNYNYLYRLFRKSNLKPFERDISTEIYQAGSTPCNGVEGFNCYFPLQSYGFQPTNGVGYQPYRVVVLSFELLHAPATVCGPKKSTNLVKNKCVNFNFNGLTGTGVLTESNKKFLPFQQFGRDIADTTDAVRDPQTLEILDITPCSFGGVSVITPGTNTSNQVAVLYQGVNCTEVPVAIHADQLTPTWRVYSTGSNVFQTRAGCLIGAEHVNNSYECDIPIGAGICASYQTQTNSPRRARSVASQSIIAYTMSLGAENSVAYSNNSIACPTNFTISVTTEILPVSMTKTSVDCTMYICGDSTECSNLLLQYGSFCTQLNRALTGIAVEQDKNTQEVFAQVKQIYKTPPIKDFGGFNFSQILPDPSKPSKRSFIEDLLFNKVTLADAGFIKQYGYCLGDIAARDLICAQKFNGLTVLPPLLTDEMIAQYTSALLAGTITSGWTFGAGAALQIPFAMQMAYRFNGIGVTQNVLYENQKLIANQFNSAIGKIQDSLSSTASALGKLQDVVNQNAQALNTLVKQLSSNFGAISSVLNDILSRLDKVEAEVQIDRLITGRLQSLQTYVTQQLIRAAEIRASANLAATKMSECVLGQSKRVDFCGKGYHLMSFPQSAPHGVVFLHVTYVPAQEKNFTTAPAICHDGKAHFPREGVFVSNGTHWFVTQRNFCEPQIITTDNTFVSGNCDVVIGIVNNTVYDPLQPELDSGGGGSDIIKLLNEQVNKEMQSSNLYMSMSSWCYTHSLDGAGLFLFDHAAEEYEHAKKLIIFLNENNVPVQLTSISAPEHKFEGLTQIFQKAYEHEQHISESINNIVDHAIKSKDHATFNFLQWYVAEQHEEEVLFKDILDKIELIGNENHGLYLADQYVKGIAKSRKS

SEQ ID NO: 9076 - protein, 1315 aa, Artificial Sequence
  SARS-CoV-2/Belgium/VAG-03013/2020__EPI_ISL_415155 spike protein (1-1147)(I714C_Y1110C) Ferritin construct
MFVFLVLLPLVSSQCVNLTTRTQLPPAYTNSFTRGVYYPDKVFRSSVLHSTQDLFLPFFSNVTWFHAIHVSGTNGTKRFDNPVLPFNDGVYFASTEKSNIIRGWIFGTTLDSKTQSLLIVNNATNVVIKVCEFQFCNDPFLGVYYHKNNKSWMESEFRVYSSANNCTFEYVSQPFLMDLEGKQGNFKNLREFVFKNIDGYFKIYSKHTPINLVRDLPQGFSALEPLVDLPIGINITRFQTLLALHRSYLTPGDSSSGWTAGAAAYYVGYLQPRTFLLKYNENGTITDAVDCALDPLSETKCTLKSFTVEKGIYQTSNFRVQPTESIVRFPNITNLCPFGEVFNATRFASVYAWNRKRISNCVADYSVLYNSASFSTFKCYGVSPTKLNDLCFTNVYADSFVIRGDEVRQIAPGQTGKIADYNYKLPDDFTGCVIAWNSNNLDSKVGGNYNYLYRLFRKSNLKPFERDISTEIYQAGSTPCNGVEGFNCYFPLQSYGFQPTNGVGYQPYRVVVLSFELLHAPATVCGPKKSTNLVKNKCVNFNFNGLTGTGVLTESNKKFLPFQQFGRDIADTTDAVRDPQTLEILDITPCSFGGVSVITPGTNTSNQVAVLYQGVNCTEVPVAIHADQLTPTWRVYSTGSNVFQTRAGCLIGAEHVNNSYECDIPIGAGICASYQTQTNSPRRARSVASQSIIAYTMSLGAENSVAYSNNSIACPTNFTISVTTEILPVSMTKTSVDCTMYICGDSTECSNLLLQYGSFCTQLNRALTGIAVEQDKNTQEVFAQVKQIYKTPPIKDFGGFNFSQILPDPSKPSKRSFIEDLLFNKVTLADAGFIKQYGDCLGDIAARDLICAQKFNGLTVLPPLLTDEMIAQYTSALLAGTITSGWTFGAGAALQIPFAMQMAYRFNGIGVTQNVLYENQKLIANQFNSAIGKIQDSLSSTATALGKLQDVVNQNAQALNTLVKQLSSNFGAISSVLNDILSRLDKVEAEVQIDRLITGRLQSLQTYVTQQLIRAAEIRASANLAATKMSECVLGQSKRVDFCGKGYHLMSFPQSAPHGVVFLHVTYVPAQEKNFTTAPAICHDGKAHFPREGVFVSNGTHWFVTQRNFCEPQIITTDNTFVSGNCDVVIGIVNNTVYDPLQPELDSGGGGSDIIKLLNEQVNKEMQSSNLYMSMSSWCYTHSLDGAGLFLFDHAAEEYEHAKKLIIFLNENNVPVQLTSISAPEHKFEGLTQIFQKAYEHEQHISESINNIVDHAIKSKDHATFNFLQWYVAEQHEEEVLFKDILDKIELIGNENHGLYLADQYVKGIAKSRKS

SEQ ID NO: 9077 - protein, 1315 aa, Artificial Sequence
  SARS-CoV-2/Belgium/BC-03016/2020__EPI_ISL_415157 spike protein (1-1147)(I714C_Y1110C) Ferritin construct
MFVFLVLLPLVSSQCVNLTTRTQLPPAYTNSFTRGVYYPDKVFRSSVLHSTQDLFLPFFSNVTWFHAIHVSGTNGTKRFDNPVLPFNDGVYFASTEKSNIIRGWIFGTTLDSKTQSLLIVNNATNVVIKVCEFQFCNDPFLGVYYHKNNKSWMESEFRVYSSANNCTFEYVSQPFLMDLEGKQGNFKNLREFVFKNIDGYFKIYSKHTPINLVRDLPQGFSALEPLVDLPIGINITRFQTLLALHRSYLTPGDSSSGWTAGAAAYYVGYLQPRTFLLKYNENGTITDAVDCALDPLSETKCTLKSFTVEKGIYQTSNFRVQPTESIVRFPNITNLCPFGEVFNATRFASVYAWNRKRISNCVADYSVLYNSASFSTFKCYGVSPTKLNDLCFTNVYADSFVIRGDEVRQIAPGQTGKIADYNYKLPDDFTGCVIAWNSNNLDSKVGGNYNYLYRLFRKSNLKPFERDISTEIYQAGSTPCNGVEGFNCYFPLQSYGFQPTNGVGYQPYRVVVLSFELLHAPATVCGPKKSTNLVKNKCVNFNFNGLTGTGVLTESNKKFLPFQQFGRDIADTTDAVRDPQTLEILDITPCSFGGVSVITPGTNTSNQVAVLYQGVNCTEVPVAIHADQLTPTWRVYSTGSNVFQTRAGCLIGAEHVNNSYECDIPIGAGICASYQTQTNSPRRARSVASQSIIAYTMSLGAENSVAYSNNSIACPTNFTISVTTEILPVSMTKTSVDCTMYICGDSTECSNLLLQYGSFCTQLNRALTGIAVEQDKNTQEVFAQVKQIYKTPPIKDFGGFNFSQILPDPSKPSKRSFIEDLLFNKVTLADAGFIKQYGDCLGDIAARDLICAQKFNGLTVLPPLLTDEMIAQYTSALLAGTITSGWTFGAGAALQIPFAMQMAYRFNGIGVTQNVLYENQKLIANQFNSAIGKIQDSLSSTAPALGKLQDVVNQNAQALNTLVKQLSSNFGAISSVLNDILSRLDKVEAEVQIDRLITGRLQSLQTYVTQQLIRAAEIRASANLAATKMSECVLGQSKRVDFCGKGYHLMSFPQSAPHGVVFLHVTYVPAQEKNFTTAPAICHDGKAHFPREGVFVSNGTHWFVTQRNFCEPQIITTDNTFVSGNCDVVIGIVNNTVYDPLQPELDSGGGGSDIIKLLNEQVNKEMQSSNLYMSMSSWCYTHSLDGAGLFLFDHAAEEYEHAKKLIIFLNENNVPVQLTSISAPEHKFEGLTQIFQKAYEHEQHISESINNIVDHAIKSKDHATFNFLQWYVAEQHEEEVLFKDILDKIELIGNENHGLYLADQYVKGIAKSRKS

SEQ ID NO: 9078 - protein, 1315 aa, Artificial Sequence
  SARS-CoV-2/Germany/BavPat3/2020__EPI_ISL_414521 spike protein (1-1147)(I714C_Y1110C) Ferritin construct
MFVFLVLLPLVSSQCVNLTTRTQLPPAYTNSFTRGVYYPDKVFRSSVLHSTQDLFLPFFSNVTWFHAIHVSGTNGTKRFDNPVLPFNDGVYFASTEKSNIIRGWIFGTTLDSKTQSLLIVNNATNVVIKVCEFQFCNDPFLGVYYHKNNKSWMESEFRVYSSANNCTFEYVSQPFLMDLEGKQGNFKNLREFVFKNIDGYFKIYSKHTPINLVRDLPQGFSALEPLVDLPIGINITRFQTLLALHRSYLTPGDSSSGWTAGAAAYYVGYLQPRTFLLKYNENGTITDAVDCALDPLSETKCTLKSFTVEKGIYQTSNFRVQPTESIVRFPNITNLCPFGEVFNATRFASVYAWNRKRISNCVADYSVLYNSASFSTFKCYGVSPTKLNDLCFTNVYADSFVIRGDEVRQIAPGQTGKIADYNYKLPDDFTGCVIAWNSNNLDSKVGGNYNYLYRLFRKSNLKPFERDISTEIYQAGSTPCNGVEGFNCYFPLQSYGFQPTNGVGYQPYRVVVLSFELLHAPATVCGPKKSTNLVKNKCVNFNFNGLTGTGVLTESNKKFLPFQQFGRDIADTTDAVRDPQTLEILDITPCSFGGVSVITPGTNTSNQVAVLYQDVNCTEVPVAIHADQLTPTWRVYSTGSNVFQTRAGCLIGAEHVNNSYECDIPIGAGICASYQTQTNSPRRARSVASQSIIAYTMSLGAENSVAYSNNSIACPTNFTISVTTEILPVSMTKTSVDCTMYICGDSTECSNLLLQYGSFCTQLNRALTGIAVEQDKNTQQVFAQVKQIYKTPPIKDFGGFNFSQILPDPSKPSKRSFIEDLLFNKVTLADAGFIKQYGDCLGDIAARDLICAQKFNGLTVLPPLLTDEMIAQYTSALLAGTITSGWTFGAGAALQIPFAMQMAYRFNGIGVTQNVLYENQKLIANQFNSAIGKIQDSLSSTASALGKLQDVVNQNAQALNTLVKQLSSNFGAISSVLNDILSRLDKVEAEVQIDRLITGRLQSLQTYVTQQLIRAAEIRASANLAATKMSECVLGQSKRVDFCGKGYHLMSFPQSAPHGVVFLHVTYVPAQEKNFTTAPAICHDGKAHFPREGVFVSNGTHWFVTQRNFCEPQIITTDNTFVSGNCDVVIGIVNNTVYDPLQPELDSGGGGSDIIKLLNEQVNKEMQSSNLYMSMSSWCYTHSLDGAGLFLFDHAAEEYEHAKKLIIFLNENNVPVQLTSISAPEHKFEGLTQIFQKAYEHEQHISESINNIVDHAIKSKDHATFNFLQWYVAEQHEEEVLFKDILDKIELIGNENHGLYLADQYVKGIAKSRKS

SEQ ID NO: 9079 - protein, 1315 aa, Artificial Sequence
  SARS-CoV-2/France/HF1805/2020__EPI_ISL_414628 spike protein (1-1147)(I714C_Y1110C) Ferritin construct
MFVFLVLLPLVSSQCVNLTTRTQLPPAYTNSFTRGVYYPDKVFRSSVLHSTQDLFLPFFSNVTWFHAIHVSGTNGTKRFDNPVLPFNDGVYFASTEKSNIIRGWIFGTTLDSKTQSLLIVNNATNVVIKVCEFQFCNDPFLGVYYHKNNKSWMESEFRVYSSANNCTFEYVSQPFLMDLEGKQGNFKNLREFVFKNIDGYFKIYSKHTPINLVRDLPQGFSALEPLVDLPIGINITRFQTLLALHRSYLTPGDSSSGWTAGAAAYYVGYLQPRTFLLKYNENGTITDAVDCALDPLSETKCTLKSFTVEKGIYQTSNFRVQPTESIVRFPNITNLCPFGEVFNATRFASVYAWNRKRISNCVADYSVLYNSASFSTFKCYGVSPTKLNDLCFTNVYADSFVIRGDEVRQIAPGQTGKIADYNYKLPDDFTGCVIAWNSNNLDSKVGGNYNYLYRLFRKSNLKPFERDISTEIYQAGSTPCNGVEGFNCYFPLQSYGFQPTNGVGYQPYRVVVLSFELLHAPATVCGPKKSTNLVKNKCVNFNFNGLTGTGVLTESNKKFLPFQQFGRDIADTTDAVRDPQTLEILDITPCSFGGVSVITPGTNTSNQVAVLYQGVNCTEVPVAIHADQLTPTWRVYSTGSNVFQTRAGCLIGAEHVNNSYECDIPIGAGICASYQTQTNSPRRARSVASQSIIAYTMSLGAENSVAYSNNSIACPTNFTISVTTEILPVSMTKTSVDCTMYICGDSTECSNLLLQYGSFCTQLNRALTGIAVEQDKNTQEVFAQVKQIYKTPPIKDFGGFNFSQILPDPSKPSKRSFIEDLLFNKVTLADAGFIKQYGDCLGDIAARDLICAQKFNGLTVLPPLLTDEMIAQYTSALLAGTITSGWTFGAGAALQIPFAMQMAYRFNGIGVTQNVLYENQKLIANQFNSAIGKIQDSLSSTASALGKLQDVVNQNAQALNTLVKQLSSNFGAISSVLNDILSRLDKVEAEVQIDRLITGRLQSLQTYVTQQLIRAAEIRASANLAATKMSECVLGQSKRVDFCGKGYHLMSFPQSAPHGVVFLHVTYVPAQEKNFTTAPAICHDGKAHFPREGVFVSNGTHWFVTQRNFCEPQIITTDNTFVSGNCDVVIGVVNNTVYDPLQPELDSGGGGSDIIKLLNEQVNKEMQSSNLYMSMSSWCYTHSLDGAGLFLFDHAAEEYEHAKKLIIFLNENNVPVQLTSISAPEHKFEGLTQIFQKAYEHEQHISESINNIVDHAIKSKDHATFNFLQWYVAEQHEEEVLFKDILDKIELIGNENHGLYLADQYVKGIAKSRKS

SEQ ID NO: 9080 - protein, 1315 aa, Artificial Sequence
  SARS-CoV-2/Netherlands/ZuidHolland_9/2020__EPI_ISL_414445 spike protein (1-1147)(I714C_Y1110C) Ferritin construct
MFVFLVLLPLVSSQCVNLTTRTQLPPAYTNSFTRGVYYPDKVFRSSVLHSTQDLFLPFFSNVTWFHAIHVSGTNGTKRFDNPVLPFNDGVYFASTEKSNIIRGWIFGTTLDSKTQSLLIVNNATNVVIKVCEFQFCNDPFLGVYYHKNNKSWMESEFRVYSSANNCTFEYVSQPFLMDLEGKQGNFKNLREFVFKNIDGYFKIYSKHTPINLVRDLPQGFSALEPLVDLPIGINITRFQTLLALHRSYLTPGDSSSGWTAGAAAYYVGYLQPRTFLLKYNENGTITDAVDCALDPLSETKCTLKSFTVEKGIYQTSNFRVQPTESIVRFPNITNLCPFGEVFNATRFASVYAWNRKRISNCVADYSVLYNSASFSTFKCYGVSPTKLNDLCFTNVYADSFVIRGDEVRQIAPGQTGKIADYNYKLPDDFTGCVIAWNSNNLDSKVGGNYNYLYRLFRKSNLKPFERDISTEIYQAGSTPCNGVEGFNCYFPLQSYGFQPTNGVGYQPYRVVVLSFELLHAPATVCGPKKSTNLVKNKCVNFNFNGLTGTGVLTESNKKFLPFQQFGRDIADTTDAVRDPQTLEILDITPCSFGGVSVITPGTNTSNQVAVLYQGVNCTEVPVAIHADQLTPTWRVYSTGSNVFQTRAGCLIGAEHVNNSYECDIPIGAGICASYQTQTNSPRRARSVASQSIIAYTMSLGAENSVAYSNNSIACPTNFTISVTTEILPVSMTKTSVDCTMYICGDSTECSNLLLQYGSFCTQLNRALTGIAVEQDKNTQEVFAQVKQIYKTPPIKDFGGFNFSQILPDPSKPSKRSFIEDLLFNKVTLADAGFIKQYGDCLGDIAARDLICVQKFNGLTVLPPLLTDEMIAQYTSALLAGTITSGWTFGAGAALQIPFAMQMAYRFNGIGVTQNVLYENQKLIANQFNSAIGKIQDSLSSTASALGKLQDVVNQNAQALNTLVKQLSSNFGAISSVLNDILSRLDKVEAEVQIDRLITGRLQSLQTYVTQQLIRAAEIRASANLAATKMSECVLGQSKRVDFCGKGYHLMSFPQSAPHGVVFLHVTYVPAQEKNFTTAPAICHDGKAHFPREGVFVSNGTHWFVTQRNFCEPQIITTDNTFVSGNCDVVIGIVNNTVYDPLQPELDSGGGGSDIIKLLNEQVNKEMQSSNLYMSMSSWCYTHSLDGAGLFLFDHAAEEYEHAKKLIIFLNENNVPVQLTSISAPEHKFEGLTQIFQKAYEHEQHISESINNIVDHAIKSKDHATFNFLQWYVAEQHEEEVLFKDILDKIELIGNENHGLYLADQYVKGIAKSRKS

SEQ ID NO: 9081 - protein, 1315 aa, Artificial Sequence
  SARS-CoV-2/Finland/FIN03032020A/2020__EPI_ISL_413602 spike protein (1-1147)(I714C_Y1110C) Ferritin construct
MFVFLVLLPLVSSQCVNLTTRTQLPPAYTNSFTRGVYYPDKVFRSSVLHSTQDLFLPFFSNVTWFHAIHVSGTNGTKRFDNPVLPFNDGVYFASTEKSNIIRGWIFGTTLDSKTQSLLIVNNATNVVIKVCEFQFCNDPFLGVYYHKNNKSWMESEFRVYSSANNCTFEYVSQPFLMDLEGKQGNFKNLREFVFKNIDGYFKIYSKHTPINLVRDLPQGFSALEPLVDLPIGINITRFQTLLALHRSYLTPGDSSSGWTAGAAAYYVGYLQPRTFLLKYNENGTITDAVDCALDPLSETKCTLKSFTVEKGIYQTSNFRVQPTESIVRFPNITNLCPFGEVFNATRFASVYAWNRKRISNCVADYSVLYNSASFSTFKCYGVSPTKLNDLCFTNVYADSFVIRGDEVRQIAPGQTGKIADYNYKLPDDFTGCVISWNSNNLDSKVGGNYNYLYRLFRKSNLKPFERDISTEIYQAGSTPCNGVEGFNCYFPLQSYGFQPTNGVGYQPYRVVVLSFELLHAPATVCGPKKSTNLVKNKCVNFNFNGLTGTGVLTESNKKFLPFQQFGRDIADTTDAVRDPQTLEILDITPCSFGGVSVITPGTNTSNQVAVLYQGVNCTEVPVAIHADQLTPTWRVYSTGSNVFQTRAGCLIGAEHVNNSYECDIPIGAGICASYQTQTNSPRRARSVASQSIIAYTMSLGAENSVAYSNNSIACPTNFTISVTTEILPVSMTKTSVDCTMYICGDSTECSNLLLQYGSFCTQLNRALTGIAVEQDKNTQEVFAQVKQIYKTPPIKDFGGFNFSQILPDPSKPSKRSFIEDLLFNKVTLADAGFIKQYGDCLGDIAARDLICAQKFNGLTVLPPLLTDEMIAQYTSALLAGTITSGWTFGAGAALQIPFAMQMAYRFNGIGVTQNVLYENQKLIANQFNSAIGKIQDSLSSTASALGKLQDVVNQNAQALNTLVKQLSSNFGAISSVLNDILSRLDKVEAEVQIDRLITGRLQSLQTYVTQQLIRAAEIRASANLAATKMSECVLGQSKRVDFCGKGYHLMSFPQSAPHGVVFLHVTYVPAQEKNFTTAPAICHDGKAHFPREGVFVSNGTHWFVTQRNFCEPQIITTDNTFVSGNCDVVIGIVNNTVYDPLQPELDSGGGGSDIIKLLNEQVNKEMQSSNLYMSMSSWCYTHSLDGAGLFLFDHAAEEYEHAKKLIIFLNENNVPVQLTSISAPEHKFEGLTQIFQKAYEHEQHISESINNIVDHAIKSKDHATFNFLQWYVAEQHEEEVLFKDILDKIELIGNENHGLYLADQYVKGIAKSRKS

SEQ ID NO: 9082 - protein, 1315 aa, Artificial Sequence
  SARS-CoV-2/France/GE1977/2020__EPI_ISL_414632 spike protein (1-1147)(I714C_Y1110C) Ferritin construct
MFVFLVLLPLVSSQCVNLTTRTQLPPAYTNSFTRGVYYPDKVFRSSVLHSTQDLFLPFFSNVTWFHAIHVSGTNGTKRFDNPVLPFNDGVYFASTEKSNIIRGWIFGTTLDSKTQSLLIVNNATNVVIKVCEFQFCNDPFLGVYYHKNNKSWMESEFRVYSSANNCTFEYVSQPFLMDLEGKQGNFKNLREFVFKNIDGYFKIYSKHTPINLVRDLPQGFSALEPLVDLPIGINITRFQTLLALHRSYLTPGDSSSGWTAGAAAYYVGYLQPRTFLLKYNENGTITDAVDCALDPLSETKCTLKSFTVEKGIYQTSNFRVQPTESIVRFPNITNLCPFGEVFNATRFASVYAWNRKRISNCVADYSVLYNSASFSTFKCYGVSPTKLNDLCFTNVYADSFVIRGDEVRQIAPGQTGKIADYNYKLPDDFTGCVIAWNSNNLDSKVGGNYNYLYRLFRKSNLKPFERDISTEIYQAGSTPCNGVEGFNCYFPLQSYGFQPTNGVGYQPYRVVVLSFELLHAPATVCGPKKSTNLVKNKCVNFNFNGLTGTGVLTESNKKFLPFQQFGRDIADTTDAVRDPQTLEILDITPCSFGGVSVITPGTNTSNQVAVLYQGVNCTEVPVAIHADQLTPTWRVYSTGSNVFQTRAGCLIGAEHVNNSYECDIPIGAGICASYQTQTNSPRRARSVASQSIIAYTMSLGAENSVAYSNNSIACPTNFTISVTTEILPVSMTKTSVDCTMYICGDSTECSNLLLQYGSFCTQLNRALTGIAVEQDKNTQEVFAQVKQIYKTPPIKDFGGFNFSQILPDPSKPSKRSFIEDLLFNKVTLADAGFIKQYGDCLGDIAARDLICAQKFNGLTVLPPLLTDEMIAQYTSALLAGTITSGWTFGAGAALQIPFAMQMAYRFNGIGVTQNVLYENQKLIANQFNSAIGKIQDSLFSTASALGKLQDVVNQNAQALNTLVKQLSSNFGAISSVLNDILSRLDKVEAEVQIDRLITGRLQSLQTYVTQQLIRAAEIRASANLAATKMSECVLGQSKRVDFCGKGYHLMSFPQSAPHGVVFLHVTYVPAQEKNFTTAPAICHDGKAHFPREGVFVSNGTHWFVTQRNFCEPQIITTDNTFVSGNCDVVIGIVNNTVYDPLQPELDSGGGGSDIIKLLNEQVNKEMQSSNLYMSMSSWCYTHSLDGAGLFLFDHAAEEYEHAKKLIIFLNENNVPVQLTSISAPEHKFEGLTQIFQKAYEHEQHISESINNIVDHAIKSKDHATFNFLQWYVAEQHEEEVLFKDILDKIELIGNENHGLYLADQYVKGIAKSRKS

SEQ ID NO: 9083 - protein, 1315 aa, Artificial Sequence
  SARS-CoV-2/Finland/FIN-313/2020__EPI_ISL_414641 spike protein (1-1147)(I714C_Y1110C) Ferritin construct
MFVFLVLLPLVSSQCVNLTTRTQLPPAYTNSFTRGVYYPDKVFRSSVLHSTQDLFLPFFSNVTWFHAIHVSGTNGTKRFDNPVLPFNDGVYFASTEKSNIIRGWIFGTTLDSKTQSLLIVNNATNVVIKVCEFQFCNDPFLGVYYHKNNKSWMESEFRVYSSANNCTFEYVSQPFLMDLEGKQGNFKNLREFVFKNIDGYFKIYSKHTPINLVRDLPQGFSALEPLVDLPIGINITRFKTLLALHRSYLTPGDSSSGWTAGAAAYYVGYLQPRTFLLKYNENGTITDAVDCALDPLSETKCTLKSFTVEKGIYQTSNFRVQPTESIVRFPNITNLCPFGEVFNATRFASVYAWNRKRISNCVADYSVLYNSASFSTFKCYGVSPTKLNDLCFTNVYADSFVIRGDEVRQIAPGQTGKIADYNYKLPDDFTGCVIAWNSNNLDSKVGGNYNYLYRLFRKSNLKPFERDISTEIYQAGSTPCNGVEGFNCYFPLQSYGFQPTNGVGYQPYRVVVLSFELLHAPATVCGPKKSTNLVKNKCVNFNFNGLTGTGVLTESNKKFLPFQQFGRDIADTTDAVRDPQTLEILDITPCSFGGVSVITPGTNTSNQVAVLYQGVNCTEVPVAIHADQLTPTWRVYSTGSNVFQTRAGCLIGAEHVNNSYECDIPIGAGICASYQTQTNSPRRARSVASQSIIAYTMSLGAENSVAYSNNSIACPTNFTISVTTEILPVSMTKTSVDCTMYICGDSTECSNLLLQYGSFCTQLNRALTGIAVEQDKNTQEVFAQVKQIYKTPPIKDFGGFNFSQILPDPSKPSKRSFIEDLLFNKVTLADAGFIKQYGDCLGDIAARDLICAQKFNGLTVLPPLLTDEMIAQYTSALLAGTITSGWTFGAGAALQIPFAMQMAYRFNGIGVTQNVLYENQKLIANQFNSAIGKIQDSLSSTASALGKLQDVVNQNAQALNTLVKQLSSNFGAISSVLNDILSRLDKVEAEVQIDRLITGRLQSLQTYVTQQLIRAAEIRASANLAATKMSECVLGQSKRVDFCGKGYHLMSFPQSAPHGVVFLHVTYVPAQEKNFTTAPAICHDGKAHFPREGVFVSNGTHWFVTQRNFCEPQIITTDNTFVSGNCDVVIGIVNNTVYDPLQPELDSGGGGSDIIKLLNEQVNKEMQSSNLYMSMSSWCYTHSLDGAGLFLFDHAAEEYEHAKKLIIFLNENNVPVQLTSISAPEHKFEGLTQIFQKAYEHEQHISESINNIVDHAIKSKDHATFNFLQWYVAEQHEEEVLFKDILDKIELIGNENHGLYLADQYVKGIAKSRKS

SEQ ID NO: 9084 - protein, 1315 aa, Artificial Sequence
  SARS-CoV-2/Netherlands/ZuidHolland_2/2020__EPI_ISL_414556 spike protein (1-1147)(I714C_Y1110C) Ferritin construct
MFVFLVLLPLVSSQCVNLTTRTQLPPAYTNSFTRGVYYPDKVFRSSVLHSTQDLFLPFFSNVTWFHAIHVSGTNGTKRFDNPVLPFNDGVYFASTEKSNIIRGWIFGTTLDSKTQSLLIVNNATNVVIKVCEFQFCNDPFLGVYYHKNNKSWMESEFRVYSSANNCTFEYVSQPFLMDLEGKQGNFKNLREFVFKNIDGYFKIYSKHTPINLVRDLPQGFSALEPLVDLPIGINITRFQTLLALHRSYLTPGDSSSGWTAGAAAYYVGYLQPRTFLLKYNENGTITDAVDCALDPLSETKCTLKSFTVEKGIYQTSNFRVQPTESIVRFPNITNLCPFGEVFNATRFASVYAWNRKRISNCVADYSVLYNSASFSTFKCYGVSPTKLNDLCFTNVYADSFVIRGDEVRQIAPGQTGKIADYNYKLPDDFTGCVIAWNSNNLDSKVGGNYNYLYRLFRKSNLKPFERDISTEIYQAGSTPCNGVEGFNCYFPLQSYGFQPTNGVGYQPYRVVVLSFELLHAPATVCGPKKSTNLVKNKCVNFNFNGLTGTGVLTESNKKFLPFQQFGRDIADTTDAVRDPQTLEILDITPCSFGGVSVITPGTNTSNQVAVLYQGVNCTEVPVAIHADQLTPTWRVYSTGSNVFQTRAGCLIGAEHVNNSYECDIPIGAGICASYQTQTNSPRRARSVASQSIIAYTMSLGAENSVAYSNNSIACPTNFTISVTTEILPVSMTKTSVDCTMYICGDSTECSNLLLQYGSFCTQLNRALTGIALEQDKNTQEVFAQVKQIYKTPPIKDFGGFNFSQILPDPSKPSKRSFIEDLLFNKVTLADAGFIKQYGDCLGDIAARDLICAQKFNGLTVLPPLLTDEMIAQYTSALLAGTITSGWTFGAGAALQIPFAMQMAYRFNGIGVTQNVLYENQKLIANQFNSAIGKIQDSLSSTASALGKLQDVVNQNAQALNTLVKQLSSNFGAISSVLNDILSRLDKVEAEVQIDRLITGRLQSLQTYVTQQLIRAAEIRASANLAATKMSECVLGQSKRVDFCGKGYHLMSFPQSAPHGVVFLHVTYVPAQEKNFTTAPAICHDGKAHFPREGVFVSNGTHWFVTQRNFCEPQIITTDNTFVSGNCDVVIGIVNNTVYDPLQPELDSGGGGSDIIKLLNEQVNKEMQSSNLYMSMSSWCYTHSLDGAGLFLFDHAAEEYEHAKKLIIFLNENNVPVQLTSISAPEHKFEGLTQIFQKAYEHEQHISESINNIVDHAIKSKDHATFNFLQWYVAEQHEEEVLFKDILDKIELIGNENHGLYLADQYVKGIAKSRKS

SEQ ID NO: 9085 - protein, 1315 aa, Artificial Sequence
  SARS-CoV-2/USA/WA-UW31/2020__EPI_ISL_414618 spike protein (1-1147)(I714C_Y1110C) Ferritin construct
MFVFLVLLPLVSSQCVNLTTRTQLPPAYTNSFTRGVYYPDKVFRSSVLHSTQDLFLPFFSNVTWFHAIHVSGTNGTKRFDNPVLPFNDGVYFASTEKSNIIRGWIFGTTLDSKTQSLLIVNNATNVVIKVCEFQFCNDPFLGVYYHKNNKSWMESEFRVYSSANNCTFEYVSQPFLMDLEGKQGNFKNLREFVFKNIDGYFKIYSKHTPINLVRDLPQGFSALEPLVDLPIGINITRFQTLLALHRSYLTPGDSSSGWTAGAAAYYVGYLQPRTFLLKYNENGTITDAVDCALDPLSETKCTLKSFTVEKGIYQTSNFRVQPTESIVRFPNITNLCPFGEVFNATRFASVYAWNRKRISNCVADYSVLYNSASFSTFKCYGVSPTKLNDLCFTNVYADSFVIRGDEVRQIAPGQTGKIADYNYKLPDDFTGCVIAWNSNNLDSKVGGNYNYLYRLFRKSNLKPFERDISTEIYQAGSTPCNGAEGFNCYFPLQSYGFQPTNGVGYQPYRVVVLSFELLHAPATVCGPKKSTNLVKNKCVNFNFNGLTGTGVLTESNKKFLPFQQFGRDIADTTDAVRDPQTLEILDITPCSFGGVSVITPGTNTSNQVAVLYQDVNCTEVPVAIHADQLTPTWRVYSTGSNVFQTRAGCLIGAEHVNNSYECDIPIGAGICASYQTQTNSPRRARSVASQSIIAYTMSLGAENSVAYSNNSIACPTNFTISVTTEILPVSMTKTSVDCTMYICGDSTECSNLLLQYGSFCTQLNRALTGIAVEQDKNTQEVFAQVKQIYKTPPIKDFGGFNFSQILPDPSKPSKRSFIEDLLFNKVTLADAGFIKQYGDCLGDIAARDLICAQKFNGLTVLPPLLTDEMIAQYTSALLAGTITSGWTFGAGAALQIPFAMQMAYRFNGIGVTQNVLYENQKLIANQFNSAIGKIQDSLSSTASALGKLQDVVNQNAQALNTLVKQLSSNFGAISSVLNDILSRLDKVEAEVQIDRLITGRLQSLQTYVTQQLIRAAEIRASANLAATKMSECVLGQSKRVDFCGKGYHLMSFPQSAPHGVVFLHVTYVPAQEKNFTTAPAICHDGKAHFPREGVFVSNGTHWFVTQRNFCEPQIITTDNTFVSGNCDVVIGIVNNTVYDPLQPELDSGGGGSDIIKLLNEQVNKEMQSSNLYMSMSSWCYTHSLDGAGLFLFDHAAEEYEHAKKLIIFLNENNVPVQLTSISAPEHKFEGLTQIFQKAYEHEQHISESINNIVDHAIKSKDHATFNFLQWYVAEQHEEEVLFKDILDKIELIGNENHGLYLADQYVKGIAKSRKS

SEQ ID NO: 9086 - protein, 1315 aa, Artificial Sequence
  SARS-CoV-2/South Korea/SNU01/2020__EPI_ISL_411929 spike protein (1-1147)(I714C_Y1110C) Ferritin construct
MFVFLVLLPLVSSQCVNLTTRTQLPPAYTNSFTRGVYYPDKVFRSSVLHSTQDLFLPFFSNVTWFHAIHVSGTNGTKRFDNPVLPFNDGVYFASTEKSNIIRGWIFGTTLDSKTQSLLIVNNATNVVIKVCEFQFCNDPFLGVYYHKNNKSWMESEFRVYSSANNCTFEYVSQPFLMDLEGKQGNFKNLREFVFKNIDGYFKIYSKHTPINLVRDLPQGFWALEPLVDLPIGINITRFQTLLALHRSYLTPGDSSSGWTAGAAAYYVGYLQPRTFLLKYNENGTITDAVDCALDPLSETKCTLKSFTVEKGIYQTSNFRVQPTESIVRFPNITNLCPFGEVFNATRFASVYAWNRKRISNCVADYSVLYNSASFSTFKCYGVSPTKLNDLCFTNVYADSFVIRGDEVRQIAPGQTGKIADYNYKLPDDFTGCVIAWNSNNLDSKVGGNYNYLYRLFRKSNLKPFERDISTEIYQAGSTPCNGVEGFNCYFPLQSYGFQPTNGVGYQPYRVVVLSFELLHAPATVCGPKKSTNLVKNKCVNFNFNGLTGTGVLTESNKKFLPFQQFGRDIADTTDAVRDPQTLEILDITPCSFGGVSVITPGTNTSNQVAVLYQDVNCTEVPVAIHADQLTPTWRVYSTGSNVFQTRAGCLIGAEHVNNSYECDIPIGAGICASYQTQTNSPRRARSVASQSIIAYTMSLGAENSVAYSNNSIACPTNFTISVTTEILPVSMTKTSVDCTMYICGDSTECSNLLLQYGSFCTQLNRALTGIAVEQDKNTQEVFAQVKQIYKTPPIKDFGGFNFSQILPDPSKPSKRSFIEDLLFNKVTLADAGFIKQYGDCLGDIAARDLICAQKFNGLTVLPPLLTDEMIAQYTSALLAGTITSGWTFGAGAALQIPFAMQMAYRFNGIGVTQNVLYENQKLIANQFNSAIGKIQDSLSSTASALGKLQDVVNQNAQALNTLVKQLSSNFGAISSVLNDILSRLDKVEAEVQIDRLITGRLQSLQTYVTQQLIRAAEIRASANLAATKMSECVLGQSKRVDFCGKGYHLMSFPQSAPHGVVFLHVTYVPAQEKNFTTAPAICHDGKAHFPREGVFVSNGTHWFVTQRNFCEPQIITTDNTFVSGNCDVVIGIVNNTVYDPLQPELDSGGGGSDIIKLLNEQVNKEMQSSNLYMSMSSWCYTHSLDGAGLFLFDHAAEEYEHAKKLIIFLNENNVPVQLTSISAPEHKFEGLTQIFQKAYEHEQHISESINNIVDHAIKSKDHATFNFLQWYVAEQHEEEVLFKDILDKIELIGNENHGLYLADQYVKGIAKSRKS

SEQ ID NO: 9087 - protein, 1315 aa, Artificial Sequence
  SARS-CoV-2/China/WF0004/2020__EPI_ISL_413694 spike protein (1-1147)(I714C_Y1110C) Ferritin construct
MFVFLVLLPLVSSQCVNLTTRTQLPPAYTNSFTRGVYYPDKVFRSSVLHSTQDLFLPFFSNVTWFHAIHVSGTNGTKRFDNPVLPFNDGVYFASTEKSNIIRGWIFGTTLDSKTQSLLIVNNATNVVIKVCEFQFCNDPFLGVYYHKNNKSWTESEFRVYSSANNCTFEYVSQPFLMDLEGKQGNFKNLREFVFKNIDGYFKIYSKHTPINLVRDLPQGFSALEPLVDLPIGINITRFQTLLALHRSYLTPGDSSSGWTAGAAAYYVGYLQPRTFLLKYNENGTITDAVDCALDPLSETKCTLKSFTVEKGIYQTSNFRVQPTESIVRFPNITNLCPFGEVFNATRFASVYAWNRKRISNCVADYSVLYNSASFSTFKCYGVSPTKLNDLCFTNVYADSFVIRGDEVRQIAPGQTGKIADYNYKLPDDFTGCVIAWNSNNLDSKVGGNYNYLYRLFRKSNLKPFERDISTEIYQAGSTPCNGVEGFNCYFPLQSYGFQPTNGVGYQPYRVVVLSFELLHAPATVCGPKKSTNLVKNKCVNFNFNGLTGTGVLTESNKKFLPFQQFGRDIADTTDAVRDPQTLEILDITPCSFGGVSVITPGTNTSNQVAVLYQDVNCTEVPVAIHADQLTPTWRVYSTGSNVFQTRAGCLIGAEHVNNSYECDIPIGAGICASYQTQTNSPRRARSVASQSIIAYTMSLGAENSVAYSNNSIACPTNFTISVTTEILPVSMTKTSVDCTMYICGDSTECSNLLLQYGSFCTQLNRALTGIAVEQDKNTQEVFAQVKQIYKTPPIKDFGGFNFSQILPDPSKPSKRSFIEDLLFNKVTLADAGFIKQYGDCLGDIAARDLICAQKFNGLTVLPPLLTDEMIAQYTSALLAGTITSGWTFGAGAALQIPFAMQMAYRFNGIGVTQNVLYENQKLIANQFNSAIGKIQDSLSSTASALGKLQDVVNQNAQALNTLVKQLSSNFGAISSVLNDILSRLDKVEAEVQIDRLITGRLQSLQTYVTQQLIRAAEIRASANLAATKMSECVLGQSKRFDFCGKGYHLMSFPQSAPHGVVFLHVTYVPAQEKNFTTAPAICHDGKAHFPREGVFVSNGTHWFVTQRNFCEPQIITTDNTFVSGNCDVVIGIVNNTVYDPLQPELDSGGGGSDIIKLLNEQVNKEMQSSNLYMSMSSWCYTHSLDGAGLFLFDHAAEEYEHAKKLIIFLNENNVPVQLTSISAPEHKFEGLTQIFQKAYEHEQHISESINNIVDHAIKSKDHATFNFLQWYVAEQHEEEVLFKDILDKIELIGNENHGLYLADQYVKGIAKSRKS

SEQ ID NO: 9088 - protein, 1315 aa, Artificial Sequence
  SARS-CoV-2/China/WF0028/2020__EPI_ISL_413791 spike protein (1-1147)(I714C_Y1110C) Ferritin construct
MFVFLVLLPLVSSQCVNLTTRTQLPPAYTNSFTRGVYYPDKVFRSSVLHSTQDLFLPFFSNVTWFHAIHVSGTNGTKRFDNPVLPFNDGVYFASTEKSNIIRGWIFGTTLDSKTQSLLIVNNATNVVIKVCEFQFCNDPFLGVYYHKNNKSWMESEFRVYSSANNCTFEYVSQPFLMDLEGKQGNFKNLREFVFKNIDGYFKIYSKHTPINLVRDLPQGFSALEPLVDLPIGINITRFQTLLALHRSYLTPGDSSSGWTAGAAAYYVGYLQPRTFLLKYNENGTITDAVDCALDPLSETKCTLKSFTVEKGIYQTSNFRVQPTESIVRFPNITNLCPFGEVFNATRFASVYAWNRKRISNCVADYSVLYNSASFSTFKCYGVSPTKLNDLCFTNVYADSFVIRGDEVRQIAPGQTGKIADYNYKLPDDFTGCVIAWNSNNLDSKVGGNYNYLYRLFRKSNLKPFERDISTEIYQAGSTPCNGVEGFNCYFPLQSYGFQPTNGVGYQPYRVVVLSFELLHAPATVCGPKKSTNLVKNKCVNFNFNGLTGTGVLTESNKKFLPFQQFGRDIADTTDAVRDPQTLEILDITPCSFGGVSVITPGTNTSNQVAVLYQDVNCTEVPVAIHADQLTPTWRVYSTGSNVFQTRAGCLIGAEHVNNSYECDIPIGAGICASYQTQTNSPRRARSVASQSIIAYTMSLGAENSVAYSNNSIACPTNFTISVTTEILPVSMTKTSVDCTMYICGDSTECSNLLLQYGSFCTQLNRALTGIAVEQDKNTQEVFAQVKQIYKTPPIKDFGGFNFSQILPDPSKPSKRSFIEDLLFNKVTLADAGFIKQYGDCLGDIAARDLICAQKFNGLTVLPPLLTDEMIAQYTSALLAGTITSGWTFGAGAALQIPFAMQMAYRFNGIGVTQNVLYENQKLIANQFNSAIGKIQDSLSSTASALGKLQDVVNQNAQALNTLVKQLSSNFGAISSVLNDILSRLDKVEAEVQIDRLITGRLQSLQTYVTQQLIRAAEIRASANLAATKMSECVLGQSKRVDFCGKGYHLMSFPQSAPHGVVFLHVTYVPAQEKNFTTAPAICHDGKAHFPREGVFVSNGTHWFVTQRNFCEPQIITTDNTFVSGNCDVVIGIVNNTVYDPLQPELESGGGGSDIIKLLNEQVNKEMQSSNLYMSMSSWCYTHSLDGAGLFLFDHAAEEYEHAKKLIIFLNENNVPVQLTSISAPEHKFEGLTQIFQKAYEHEQHISESINNIVDHAIKSKDHATFNFLQWYVAEQHEEEVLFKDILDKIELIGNENHGLYLADQYVKGIAKSRKS

SEQ ID NO: 9089 - protein, 1315 aa, Artificial Sequence
  SARS-CoV-2/2019-nCoV/USA-CruiseA-18/2020__MT159716.1 spike protein (1-1147)(I714C_Y1110C) Ferritin construct
MFVFLVLLPLVSSQCVNLTTRTQLPPAYTNSFTRGVYYPDKVFRSSVLHSTQDLFLPFFSNVTWFHAIHVSGTNGTKRFDNPVLPFNDGVYFASTEKSNIIRGWIFGTTLDSKTQSLLIVNNATNVVIKVCEFQFCNDPFLGVYYHKNNKSWMESELRVYSSANNCTFEYVSQPFLMDLEGKQGNFKNLREFVFKNIDGYFKIYSKHTPINLVRDLPQGFSALEPLVDLPIGINITRFQTLLALHRSYLTPGDSSSGWTAGAAAYYVGYLQPRTFLLKYNENGTITDAVDCALDPLSETKCTLKSFTVEKGIYQTSNFRVQPTESIVRFPNITNLCPFGEVFNATRFASVYAWNRKRISNCVADYSVLYNSASFSTFKCYGVSPTKLNDLCFTNVYADSFVIRGDEVRQIAPGQTGKIADYNYKLPDDFTGCVIAWNSNNLDSKVGGNYNYLYRLFRKSNLKPFERDISTEIYQAGSTPCNGVEGFNCYFPLQSYGFQPTNGVGYQPYRVVVLSFELLHAPATVCGPKKSTNLVKNKCVNFNFNGLTGTGVLTESNKKFLPFQQFGRDIADTTDAVRDPQTLEILDITPCSFGGVSVITPGTNTSNQVAVLYQDVNCTEVPVAIHADQLTPTWRVYSTGSNVFQTRAGCLIGAEHVNNSYECDIPIGAGICASYQTQTNSPRRARSVASQSIIAYTMSLGAENSVAYSNNSIACPTNFTISVTTEILPVSMTKTSVDCTMYICGDSTECSNLLLQYGSFCTQLNRALTGIAVEQDKNTQEVFAQVKQIYKTPPIKDFGGFNFSQILPDPSKPSKRSFIEDLLFNKVTLADAGFIKQYGDCLGDIAARDLICAQKFNGLTVLPPLLTDEMIAQYTSALLAGTITSGWTFGAGAALQIPFAMQMAYRFNGIGVTQNVLYENQKLIANQFNSAIGKIQDSLSSTASALGKLQDVVNQNAQALNTLVKQLSSNFGAISSVLNDILSRLDKVEAEVQIDRLITGRLQSLQTYVTQQLIRAAEIRASANLAATKMSECVLGQSKRVDFCGKGYHLMSFPQSAPHGVVFLHVTYVPAQEKNFTTAPAICHDGKAHFPREGVFVSNGTHWFVTQRNFCEPQIITTDNTFVSGNCDVVIGIVNNTVYDPLQPELDSGGGGSDIIKLLNEQVNKEMQSSNLYMSMSSWCYTHSLDGAGLFLFDHAAEEYEHAKKLIIFLNENNVPVQLTSISAPEHKFEGLTQIFQKAYEHEQHISESINNIVDHAIKSKDHATFNFLQWYVAEQHEEEVLFKDILDKIELIGNENHGLYLADQYVKGIAKSRKS

SEQ ID NO: 9090 - protein, 1315 aa, Artificial Sequence
  SARS-CoV-2/SARS-CoV-2/Yunnan-01/human/2020/CHN__MT049951.1 spike protein (1-1147)(I714C_Y1110C) Ferritin construct
MFVFLVLLPLVSSQCVNLTTRTQLPPANTNSFTRGVYYPDKVFRSSVLHSTQDLFLPFFSNVTWFHAIHVSGTNGTKRFDNPVLPFNDGVYFASTEKSNIIRGWIFGTTLDSKTQSLLIVNNATNVVIKVCEFQFCNDPFLGVYYHKNNKSWMESEFRVYSSANNCTFEYVSQPFLMDLEGKQGNFKNLREFVFKNIDGYFKIYSKHTPINLVRDLPQGFSALEPLVDLPIGINITRFQTLLALHRSYLTPGDSSSGWTAGAAAYYVGYLQPRTFLLKYNENGTITDAVDCALDPLSETKCTLKSFTVEKGIYQTSNFRVQPTESIVRFPNITNLCPFGEVFNATRFASVYAWNRKRISNCVADYSVLYNSASFSTFKCYGVSPTKLNDLCFTNVYADSFVIRGDEVRQIAPGQTGKIADYNYKLPDDFTGCVIAWNSNNLDSKVGGNYNYLYRLFRKSNLKPFERDISTEIYQAGSTPCNGVEGFNCYFPLQSYGFQPTNGVGYQPYRVVVLSFELLHAPATVCGPKKSTNLVKNKCVNFNFNGLTGTGVLTESNKKFLPFQQFGRDIADTTDAVRDPQTLEILDITPCSFGGVSVITPGTNTSNQVAVLYQDVNCTEVPVAIHADQLTPTWRVYSTGSNVFQTRAGCLIGAEHVNNSYECDIPIGAGICASYQTQTNSPRRARSVASQSIIAYTMSLGAENSVAYSNNSIACPTNFTISVTTEILPVSMTKTSVDCTMYICGDSTECSNLLLQYGSFCTQLNRALTGIAVEQDKNTQEVFAQVKQIYKTPPIKDFGGFNFSQILPDPSKPSKRSFIEDLLFNKVTLADAGFIKQYGDCLGDIAARDLICAQKFNGLTVLPPLLTDEMIAQYTSALLAGTITSGWTFGAGAALQIPFAMQMAYRFNGIGVTQNVLYENQKLIANQFNSAIGKIQDSLSSTASALGKLQDVVNQNAQALNTLVKQLSSNFGAISSVLNDILSRLDKVEAEVQIDRLITGRLQSLQTYVTQQLIRAAEIRASANLAATKMSECVLGQSKRVDFCGKGYHLMSFPQSAPHGVVFLHVTYVPAQEKNFTTAPAICHDGKAHFPREGVFVSNGTHWFVTQRNFCEPQIITTDNTFVSGNCDVVIGIVNNTVYDPLQPELDSGGGGSDIIKLLNEQVNKEMQSSNLYMSMSSWCYTHSLDGAGLFLFDHAAEEYEHAKKLIIFLNENNVPVQLTSISAPEHKFEGLTQIFQKAYEHEQHISESINNIVDHAIKSKDHATFNFLQWYVAEQHEEEVLFKDILDKIELIGNENHGLYLADQYVKGIAKSRKS

SEQ ID NO: 9091 - protein, 1315 aa, Artificial Sequence
  SARS-CoV-2/USA/WA-UW292/2020__EPI_ISL_418077 spike protein (1-1147)(I714C_Y1110C) Ferritin construct
MFVFLVLLPLVSSQCVNLTTRTQLPPAYTNSFTRGVYYPDKVFRSSVLHSTQDLFLPFFSNVTWFHAIHVSGTNGTKRFDNPVLPFNDGVYFASTEKSNIIRGWIFGTTLDSKTQSLLIVNNATNVVIKVCEFQFCNDPFLGVYYHKNNKSWMESEFRVYSSANNCTFEYVSQPFLMDLEGKQGNFKNLREFVFKNIDGYFKIYSKHTPINLVRDLPQGFSALEPLVDLPIGINITRFQTLLALHRSYLTPGDSSSGWTAGAAAYYVGYLQPRTFLLKYNENGTITDAVDCALDPLSETKCTLKSFTVEKGIYQTSNFRVQPTESIVRFPNITNLCPFGEVFNATRFASVYAWNRKRISNCVADYSVLYNSASFSTFKCYGVSPTKLNDLCFTNVYADSFVIRGDEVRQIAPGQTGKIADYNYKLPDDFTGCVIAWNSNNLDSKVGGNYNYLYRLFRKSNLKPFERDISTEIYQASSTPCNGVEGFNCYFPLQSYGFQPTNGVGYQPYRVVVLSFELLHAPATVCGPKKSTNLVKNKCVNFNFNGLTGTGVLTESNKKFLPFQQFGRDIADTTDAVRDPQTLEILDITPCSFGGVSVITPGTNTSNQVAVLYQDVNCTEVPVAIHADQLTPTWRVYSTGSNVFQTRAGCLIGAEHVNNSYECDIPIGAGICASYQTQTNSPRRARSVASQSIIAYTMSLGAENSVAYSNNSIACPTNFTISVTTEILPVSMTKTSVDCTMYICGDSTECSNLLLQYGSFCTQLNRALTGIAVEQDKNTQEVFAQVKQIYKTPPIKDFGGFNFSQILPDPSKPSKRSFIEDLLFNKVTLADAGFIKQYGDCLGDIAARDLICAQKFNGLTVLPPLLTDEMIAQYTSALLAGTITSGWTFGAGAALQIPFAMQMAYRFNGIGVTQNVLYENQKLIANQFNSAIGKIQDSLSSTASALGKLQDVVNQNAQALNTLVKQLSSNFGAISSVLNDILSRLDKVEAEVQIDRLITGRLQSLQTYVTQQLIRAAEIRASANLAATKMSECVLGQSKRVDFCGKGYHLMSFPQSAPHGVVFLHVTYVPAQEKNFTTAPAICHDGKAHFPREGVFVSNGTHWFVTQRNFCEPQIITTDNTFVSGNCDVVIGIVNNTVYDPLQPELDSGGGGSDIIKLLNEQVNKEMQSSNLYMSMSSWCYTHSLDGAGLFLFDHAAEEYEHAKKLIIFLNENNVPVQLTSISAPEHKFEGLTQIFQKAYEHEQHISESINNIVDHAIKSKDHATFNFLQWYVAEQHEEEVLFKDILDKIELIGNENHGLYLADQYVKGIAKSRKS

SEQ ID NO: 9092 - protein, 1315 aa, Artificial Sequence
  SARS-CoV-2/Iceland/192/2020__EPI_ISL_417819 spike protein (1-1147)(I714C_Y1110C) Ferritin construct
MFVFFVLLPLVSSQCVNLTTRTQLPPAYTNSFTRGVYYPDKVFRSSVLHSTQDLFLPFFSNVTWFHAIHVSGTNGTKRFDNPVLPFNDGVYFASTEKSNIIRGWIFGTTLDSKTQSLLIVNNATNVVIKVCEFQFCNDPFLGVYYHKNNKSWMESEFRVYSSANNCTFEYVSQPFLMDLEGKQGNFKNLREFVFKNIDGYFKIYSKHTPINLVRDLPQGFSALEPLVDLPIGINITRFQTLLALHRSYLTPGDSSSGWTAGAAAYYVGYLQPRTFLLKYNENGTITDAVDCALDPLSETKCTLKSFTVEKGIYQTSNFRVQPTESIVRFPNITNLCPFGEVFNATRFASVYAWNRKRISNCVADYSVLYNSASFSTFKCYGVSPTKLNDLCFTNVYADSFVIRGDEVRQIAPGQTGKIADYNYKLPDDFTGCVIAWNSNNLDSKVGGNYNYLYRLFRKSNLKPFERDISTEIYQAGSTPCNGVEGFNCYFPLQSYGFQPTNGVGYQPYRVVVLSFELLHAPATVCGPKKSTNLVKNKCVNFNFNGLTGTGVLTESNKKFLPFQQFGRDIADTTDAVRDPQTLEILDITPCSFGGVSVITPGTNTSNQVAVLYQGVNCTEVPVAIHADQLTPTWRVYSTGSNVFQTRAGCLIGAEHVNNSYECDIPIGAGICASYQTQTNSPRRARSVASQSIIAYTMSLGAENSVAYSNNSIACPTNFTISVTTEILPVSMTKTSVDCTMYICGDSTECSNLLLQYGSFCTQLNRALTGIAVEQDKNTQEVFAQVKQIYKTPPIKDFGGFNFSQILPDPSKPSKRSFIEDLLFNKVTLADAGFIKQYGDCLGDIAARDLICAQKFNGLTVLPPLLTDEMIAQYTSALLAGTITSGWTFGAGAALQIPFAMQMAYRFNGIGVTQNVLYENQKLIANQFNSAIGKIQDSLSSTASALGKLQDVVNQNAQALNTLVKQLSSNFGAISSVLNDILSRLDKVEAEVQIDRLITGRLQSLQTYVTQQLIRAAEIRASANLAATKMSECVLGQSKRVDFCGKGYHLMSFPQSAPHGVVFLHVTYVPAQEKNFTTAPAICHDGKAHFPREGVFVSNGTHWFVTQRNFCEPQIITTDNTFVSGNCDVVIGIVNNTVYDPLQPELDSGGGGSDIIKLLNEQVNKEMQSSNLYMSMSSWCYTHSLDGAGLFLFDHAAEEYEHAKKLIIFLNENNVPVQLTSISAPEHKFEGLTQIFQKAYEHEQHISESINNIVDHAIKSKDHATFNFLQWYVAEQHEEEVLFKDILDKIELIGNENHGLYLADQYVKGIAKSRKS

SEQ ID NO: 9093 - protein, 1315 aa, Artificial Sequence
  SARS-CoV-2/Belgium/ULG-6939/2020__EPI_ISL_417020 spike protein (1-1147)(I714C_Y1110C) Ferritin construct
MFVFLVLLPLVSSQCVNLTTRTQLPPAYTNSFTRGVYYPDKVFRSSVLHSTQDLFLPFFSNVTWFHAIHVSGTNGTKRFDNPVLPFNDGVYFASTEKSNIIRGWIFGTTLDSKTQSLLIVNNATNVVIKVCEFQFCNDPFLGVYYHKNNKSWMESEFRVYSSANNCTFEYVSQPFLMDLEGKQGNFKNLREFVFKNIDGYFKIYSKHTPINLVRDLPQGFSALEPLVDLPIGINITRFQTLLALHRSYLTPGDSSSGWTAGAAAYYVGYLQPRTFLLKYNENGTITDAVDCALDPLSETKCTLKSFTVEKGIYQTSNFRVQPTESIVRFPNITNLCPFGEVFNATRFASVYAWNRKRISNCVADYSVLYNSASFSTFKCYGVSPTKLNDLCFTNVYADSFVIRGDEVRQIAPGQTGKIADYNYKLPDDFTGCVIAWNSNNLDSKVGGNYNYLYRLFRKSNLKPFERDISTEIYQAGSTPCNGVEGFNCYFPLQSYGFQPTNGVGYQPYRVVVLSFELLHAPATVCGPKKSTNLVKNKCVNFNFNGLTGTGVLTESNKKFLPFQQFGRDIADTTDAVRDPQTLEILDITPCSFGGVSVITPGTNTSNQVAVLYQGVNCTEVPVAIHADQLTPTWRVYSTGSNVFQTRAGCLIGAEHVNNSYECDIPIGAGICASYQTQTNSPRRARSVASQSIIAYTMSLGAENSVVYSNNSIACPTNFTISVTTEILPVSMTKTSVDCTMYICGDSTECSNLLLQYGSFCTQLNRALTGIAVEQDKNTQEVFAQVKQIYKTPPIKDFGGFNFSQILPDPSKPSKRSFIEDLLFNKVTLADAGFIKQYGDCLGDIAARDLICAQKFNGLTVLPPLLTDEMIAQYTSALLAGTITSGWTFGAGAALQIPFAMQMAYRFNGIGVTQNVLYENQKLIANQFNSAIGKIQDSLSSTASALGKLQDVVNQNAQALNTLVKQLSSNFGAISSVLNDILSRLDKVEAEVQIDRLITGRLQSLQTYVTQQLIRAAEIRASANLAATKMSECVLGQSKRVDFCGKGYHLMSFPQSAPHGVVFLHVTYVPAQEKNFTTAPAICHDGKAHFPREGVFVSNGTHWFVTQRNFCEPQIITTDNTFVSGNCDVVIGIVNNTVYDPLQPELDSGGGGSDIIKLLNEQVNKEMQSSNLYMSMSSWCYTHSLDGAGLFLFDHAAEEYEHAKKLIIFLNENNVPVQLTSISAPEHKFEGLTQIFQKAYEHEQHISESINNIVDHAIKSKDHATFNFLQWYVAEQHEEEVLFKDILDKIELIGNENHGLYLADQYVKGIAKSRKS

SEQ ID NO: 9094 - protein, 1315 aa, Artificial Sequence
  SARS-CoV-2/France/HF2496/2020__EPI_ISL_418231 spike protein (1-1147)(I714C_Y1110C) Ferritin construct
MFVFLVLLPLVSSQCVNLTTRTQLPPAYTNSFTRGVYYPDKVFRSSVLHSTQDLFLPFFSNVTWFHAIHVSGTNGTKRFDNPVLPFNDGVYFASTEKSNIIRGWIFGTTLDSKTQSLLIVNNATNVVIKVCEFQFCNDPFLGVYYHKNNKSWMESEFRVYSSANNCTFEYVSQPFLMDLEGKQGNFKNLREFVFKNIDGYFKIYSKHTPINLVRDLPQGFSALEPLVDLPIGINITRFQTLLALHRSYLTPGDSSSGWTAGAAAYYVGYLQPRTFLLKYNENGTITDAVDCALDPLSETKCTLKSFTVEKGIYQTSNFRVQPTESIVRFPNITNLCPFGEVFNATRFASVYAWNRKRISNCVADYSVLYNSASFSTFKCYGVSPTKLNDLCFTNVYADSFVIRGDEVRQIAPGQTGKIADYNYKLPDDFTGCVIAWNSNNLDSKVGGNYNYLYRLFRKSNLKPFERDISTEIYQAGSTPCNGVEGFNCYFPLQSYGFQPTNGVGYQPYRVVVLSFELLHAPATVCGPKKSTNLVKNKCVNFNFNGLTGTGVLTESNKKFLPFQQFGRDIADTTDAVRDPQTLEILDITPCSFGGVSVITPGTNTSNQVAVLYQGVNCTEVPVAIHADQLTPTWRVYSTGSNVFQTRAGCLIGAEHVNNSYECDIPIGAGICASYQTQTNSPRRARSVASQSIIAYTMSLGAENSVAYSNNSIACPTNFTISVTTEILPVSMTKTSVDCTMYICGDSTECSNLLLQYGSFCTQLNRALTGIAVEQDKNTQEVFAQVKQIYKTPPIKDFGGFNFSQILPDPSKPSKRSFIEDLLFNKVTLADAGFIKQYGDCLGDIVARDLICAQKFNGLTVLPPLLTDEMIAQYTSALLAGTITSGWTFGAGAALQIPFAMQMAYRFNGIGVTQNVLYENQKLIANQFNSAIGKIQDSLSSTASALGKLQDVVNQNAQALNTLVKQLSSNFGAISSVLNDILSRLDKVEAEVQIDRLITGRLQSLQTYVTQQLIRAAEIRASANLAATKMSECVLGQSKRVDFCGKGYHLMSFPQSAPHGVVFLHVTYVPAQEKNFTTAPAICHDGKAHFPREGVFVSNGTHWFVTQRNFCEPQIITTDNTFVSGNCDVVIGIVNNTVYDPLQPELDSGGGGSDIIKLLNEQVNKEMQSSNLYMSMSSWCYTHSLDGAGLFLFDHAAEEYEHAKKLIIFLNENNVPVQLTSISAPEHKFEGLTQIFQKAYEHEQHISESINNIVDHAIKSKDHATFNFLQWYVAEQHEEEVLFKDILDKIELIGNENHGLYLADQYVKGIAKSRKS

SEQ ID NO: 9095 - protein, 1315 aa, Artificial Sequence
  SARS-CoV-2/USA/WA-UW291/2020__EPI_ISL_418076 spike protein (1-1147)(I714C_Y1110C) Ferritin construct
MFVFLVLLPLVSSQCVNLTTRTQLPPAYTNSFTRGVYYPDKVFRSSVLHSTQDLFLPFFSNVTWFHAIHVSGTNGTKRFDNPVLPFNDGVYFASTEKSNIIRGWIFGTTLDSKTQSLLIVNNATNVVIKVCEFQFCNDPFLGVYYHKNNKSWMESEFRVYSSANNCTFEYVSQPFLMDLEGKQGNFKNLREFVFKNIDGYFKIYSKHTPINLVRDLPQGFSALEPLVDLPIGINITRFQTLLALHRSYLTPGDSSSGWTAGAAAYYVGYLQPRTFLLKYNENGTITDAVDCALDPLSETKCTLKSFTVEKGIYQTSNFRVQPTESIVRFPNITNLCPFGEVFNATRFASVYAWNRKRISNCVADYSVLYNSASFSTFKCYGVSPTKLNDLCFTNVYADSFVIRGDEVRQIAPGQTGKIADYNYKLPDDFTGCVIAWNSNNLDSKVGGNYNYLYRLFRKSNLKPFERDISTEIYQAGSTPCNGVEGFNCYFPLQSYGFQPTNGVGYQPYRVVVLSFELLHAPATVCGPKKSTNLVKNKCVNFNFNGLTGTGVLTESNKKFLPFQQFGRDIADTTDAVRDPQTLEILDITPCSFGGVSVITPGTNTSNQVAVLYQGVNCTEVPVAIHADQLTPTWRVYSTGSNVFQTRAGCLIGAEHVNNSYECDIPIGAGICASYQTQTNSPRRARSVASQSIIAYTMSLGAENSVAYSNNSIACPTNFTISVTTEILPVSMTKTSVDCTMYICGDSTECSNLLLQYGSFCTQLNRALTGIAVEQDKNTQEVFAQVKQIYKTPPIKDFGGFNFSQILPDPSKPSKRSFIEDLLFNKVTLADAGFIKQYGDCLGDIAARDLICAQKFNGLTVLPPLLTDEMIAQYTSALLAGTITSGWTFGAGAALQIPFAMQMAYRFNGIGVTQNVLYENQKLIANQFNSAIGKIQYSLSSTASALGKLQDVVNQNAQALNTLVKQLSSNFGAISSVLNDILSRLDKVEAEVQIDRLITGRLQSLQTYVTQQLIRAAEIRASANLAATKMSECVLGQSKRVDFCGKGYHLMSFPQSAPHGVVFLHVTYVPAQEKNFTTAPAICHDGKAHFPREGVFVSNGTHWFVTQRNFCEPQIITTDNTFVSGNCDVVIGIVNNTVYDPLQPELDSGGGGSDIIKLLNEQVNKEMQSSNLYMSMSSWCYTHSLDGAGLFLFDHAAEEYEHAKKLIIFLNENNVPVQLTSISAPEHKFEGLTQIFQKAYEHEQHISESINNIVDHAIKSKDHATFNFLQWYVAEQHEEEVLFKDILDKIELIGNENHGLYLADQYVKGIAKSRKS

SEQ ID NO: 9096 - protein, 1315 aa, Artificial Sequence; identical to SEQ ID NO: 9059
  SARS-CoV-2/Portugal/PT0034/2020__EPI_ISL_418019 spike protein (1-1147)(I714C_Y1110C) Ferritin construct

SEQ ID NO: 9097 - protein, 1315 aa, Artificial Sequence; identical to SEQ ID NO: 9051
  SARS-CoV-2/Iceland/202/2020__EPI_ISL_417750 spike protein (1-1147)(I714C_Y1110C) Ferritin construct

SEQ ID NO: 9098 - protein, 1315 aa, Artificial Sequence
  SARS-CoV-2/USA/WA-UW261/2020__EPI_ISL_418046 spike protein (1-1147)(I714C_Y1110C) Ferritin construct
MFVFLVLLPLVSSQCVNLTTRTQLPPAYTNSFTRGVYYPDKVFRSSVLHSTQDLFLPFFSNVTWFHAIHVSGTNGTKRFDNPVLPFNDGVYFASTEKSNIIRGWIFGTTLDSKTQSLLIVNNATNVVIKVCEFQFCNDPFLGVYYHKNNKSWMESEFRVYSSANNCTFEYVSQPFLMDLEGKQGNFKNLREFVFKNIDGYFKIYSKHTPINLVRDLPQGFSALEPLVDLPIGINITRFQTLLALHRSYLTPGDSSSGWTAGAAAYYVGYLQPRTFLLKYNENGTITDAVDCALDPLSETKCTLKSFTVEKGIYQTSNFRVQPTESIVRFPNITNLCPFGEVFNATRFTSVYAWNRKRISNCVADYSVLYNSASFSTFKCYGVSPTKLNDLCFTNVYADSFVIRGDEVRQIAPGQTGKIADYNYKLPDDFTGCVIAWNSNNLDSKVGGNYNYLYRLFRKSNLKPFERDISTEIYQAGSTPCNGVEGFNCYFPLQSYGFQPTNGVGYQPYRVVVLSFELLHAPATVCGPKKSTNLVKNKCVNFNFNGLTGTGVLTESNKKFLPFQQFGRDIADTTDAVRDPQTLEILDITPCSFGGVSVITPGTNTSNQVAVLYQDVNCTEVPVAIHADQLTPTWRVYSTGSNVFQTRAGCLIGAEHVNNSYECDIPIGAGICASYQTQTNSPRRARSVASQSIIAYTMSLGAENSVAYSNNSIACPTNFTISVTTEILPVSMTKTSVDCTMYICGDSTECSNLLLQYGSFCTQLNRALTGIAVEQDKNTQEVFAQVKQIYKTPPIKDFGGFNFSQILPDPSKPSKRSFIEDLLFNKVTLADAGFIKQYGDCLGDIAARDLICAQKFNGLTVLPPLLTDEMIAQYTSALLAGTITSGWTFGAGAALQIPFAMQMAYRFNGIGVTQNVLYENQKLIANQFNSAIGKIQDSLSSTASALGKLQDVVNQNAQALNTLVKQLSSNFGAISSVLNDILSRLDKVEAEVQIDRLITGRLQSLQTYVTQQLIRAAEIRASANLAATKMSECVLGQSKRVDFCGKGYHLMSFPQSAPHGVVFLHVTYVPAQEKNFTTAPAICHDGKAHFPREGVFVSNGTHWFVTQRNFCEPQIITTDNTFVSGNCDVVIGIVNNTVYDPLQPELDSGGGGSDIIKLLNEQVNKEMQSSNLYMSMSSWCYTHSLDGAGLFLFDHAAEEYEHAKKLIIFLNENNVPVQLTSISAPEHKFEGLTQIFQKAYEHEQHISESINNIVDHAIKSKDHATFNFLQWYVAEQHEEEVLFKDILDKIELIGNENHGLYLADQYVKGIAKSRKS

SEQ ID NO: 9099 - protein, 1315 aa, Artificial Sequence
  SARS-CoV-2/Portugal/PT0035/2020__EPI_ISL_418020 spike protein (1-1147)(I714C_Y1110C) Ferritin construct
MFVFLVLLPLVSSQCVNLTTRTQLPPAYTNSFTRGVYYPDKVFRSSVLHSTQDLFLPFFSNVTWFHAIHVSGTNGTKRFDNPVLPFNDGVYFASTEKSNIIRGWIFGTTLDSKTQSLLIVNNATNVVIKVCEFQFCNDPFLGVYYHKNNKSWMESEFRVYSSANNCTFEYVSQPFLMDLEGKQGNFKNLREFVFKNIDGYFKIYSKHTPINLVRDLPQGFSALEPLVDLPIGINITRFQTLLALHRSYLTPGDSSSGWTAGAAAYYVGYLQPRTFLLKYNENGTITDAVDCALDPLSETKCTLKSFTVEKGIYQTSNFRVQPTESIVRFPNITNLCPFGEVFNATRFASVYAWNRKRISNCVADYSVLYNSASFSTFKCYGVSPTKLNDLCFTNVYADSFVIRGDEVRQIAPGQTGKIADYNYKLPDDFTGCVIAWNSNNLDSKVGGNYNYLYRLFRKSNLKPFERDISTEIYQAGSTPCNGVEGFNCYFPLQSYGFQPTNGVGYQPYRVVVLSFELLHAPATVCGPKKSTNLVKNKCVNFNFNGLTGTGVLTESNKKFLPFQQFGRDIADTTDAVRDPQTLEILDITPCSFGGVSVITPGTNTSNQVAVLYQDVNCTEVPVAIHADQLTPTWRVYSTGSNVFQTRAGCLIGAEHVNNSYECDIPIGAGICASYQTQTNSPRRARSVASQSIIAYTMSLGAENSVAYSNNSIACPTNFTISVTTEILPVSMTKTSVDCTMYICGDSTECSNLLLQYGSFCTQLNRALTGIAVEQDKNTQEVFAQVKQIYKTPPIKDFGGFNFSQILPDPSKPSKRSFIEDLLFNKVTLADAGFIKQYGDCLGDISARDLICAQKFNGLTVLPPLLTDEMIAQYTSALLAGTITSGWTFGAGAALQIPFAMQMAYRFNGIGVTQNVLYENQKLIANQFNSAIGKIQDSLSSTASALGKLQDVVNQNAQALNTLVKQLSSNFGAISSVLNDILSRLDKVEAEVQIDRLITGRLQSLQTYVTQQLIRAAEIRASANLAATKMSECVLGQSKRVDFCGKGYHLMSFPQSAPHGVVFLHVTYVPAQEKNFTTAPAICHDGKAHFPREGVFVSNGTHWFVTQRNFCEPQIITTDNTFVSGNCDVVIGIVNNTVYDPLQPELDSGGGGSDIIKLLNEQVNKEMQSSNLYMSMSSWCYTHSLDGAGLFLFDHAAEEYEHAKKLIIFLNENNVPVQLTSISAPEHKFEGLTQIFQKAYEHEQHISESINNIVDHAIKSKDHATFNFLQWYVAEQHEEEVLFKDILDKIELIGNENHGLYLADQYVKGIAKSRKS

SEQ ID NO: 9100 - protein, 1315 aa, Artificial Sequence
  SARS-CoV-2/USA/NY-NYUMC7/2020__EPI_ISL_418192 spike protein (1-1147)(I714C_Y1110C) Ferritin construct
MFVFLVLLPLVSSQCVNLTTRTQLPPAYTNSFTRGVYYPDKVFRSSVLHSTQDLFLPFFSNVTWFHAIHVSGTNGTKRFDNPVLPFNDGVYFASTEKSNIIRGWIFGTTLDSKTQSLLIVNNATNVVIKVCEFQFCNDPFLGVYHHKNNKSWMESEFRVYSSANNCTFEYVSQPFLMDLEGKQGNFKNLREFVFKNIDGYFKIYSKHTPINLVRDLPQGFSALEPLVDLPIGINITRFQTLLALHRSYLTPGDSSSGWTAGAAAYYVGYLQPRTFLLKYNENGTITDAVDCALDPLSETKCTLKSFTVEKGIYQTSNFRVQPTESIVRFPNITNLCPFGEVFNATRFASVYAWNRKRISNCVADYSVLYNSASFSTFKCYGVSPTKLNDLCFTNVYADSFVIRGDEVRQIAPGQTGKIADYNYKLPDDFTGCVIAWNSNNLDSKVGGNYNYLYRLFRKSNLKPFERDISTEIYQAGSTPCNGVEGFNCYFPLQSYGFQPTNGVGYQPYRVVVLSFELLHAPATVCGPKKSTNLVKNKCVNFNFNGLTGTGVLTESNKKFLPFQQFGRDIADTTDAVRDPQTLEILDITPCSFGGVSVITPGTNTSNQVAVLYQGVNCTEVPVAIHADQLTPTWRVYSTGSNVFQTRAGCLIGAEHVNNSYECDIPIGAGICASYQTQTNSPRRARSVASQSIIAYTMSLGAENSVAYSNNSIACPTNFTISVTTEILPVSMTKTSVDCTMYICGDSTECSNLLLQYGSFCTQLNRALTGIAVEQDKNTQEVFAQVKQIYKTPPIKDFGGFNFSQILPDPSKPSKRSFIEDLLFNKVTLADAGFIKQYGDCLGDIAARDLICAQKFNGLTVLPPLLTDEMIAQYTSALLAGTITSGWTFGAGAALQIPFAMQMAYRFNGIGVTQNVLYENQKLIANQFNSAIGKIQDSLSSTASALGKLQDVVNQNAQALNTLVKQLSSNFGAISSVLNDILSRLDKVEAEVQIDRLITGRLQSLQTYVTQQLIRAAEIRASANLAATKMSECVLGQSKRVDFCGKGYHLMSFPQSAPHGVVFLHVTYVPAQEKNFTTAPAICHDGKAHFPREGVFVSNGTHWFVTQRNFCEPQIITTDNTFVSGNCDVVIGIVNNTVYDPLQPELDSGGGGSDIIKLLNEQVNKEMQSSNLYMSMSSWCYTHSLDGAGLFLFDHAAEEYEHAKKLIIFLNENNVPVQLTSISAPEHKFEGLTQIFQKAYEHEQHISESINNIVDHAIKSKDHATFNFLQWYVAEQHEEEVLFKDILDKIELIGNENHGLYLADQYVKGIAKSRKS

SEQ ID NO: 9101 - protein, 1315 aa, Artificial Sequence
  SARS-CoV-2/Iceland/189/2020__EPI_ISL_417709 spike protein (1-1147)(I714C_Y1110C) Ferritin construct
MFVFLVLLPLVSSQCVNLTTRTQLPPAYTNSFTRGVYYPDKVFRSSVLHSTQDLFLPFFSNVTWFHAIHVSGTNGTKRFDNPVLPFNDGVYFASTEKSNIIRGWIFGTTLDSKTQSLLIVNNATNVVIKVCEFQFCNDPFLGVYYHKNNKSWMESEFRVYSSANNCTFEYVSQPFLMDLEGKQGNFKNLREFVFKNIDGYFKIYSKHTPINLVRDLPQGFSALEPLVDLPIGINITRFQTLLALHRSYLTPGDSSSGWTAGAAAYYVGYLQPRTFLLKYNENGTITDAVDCALDPLSETKCTLKSFTVEKGIYQTSNFRVQPTESIVRFPNITNLCPFGEVFNATRFASVYAWNRKRISNCVADYSVLYNSASFSTFKCYGVSPTKLNDLCFTNVYADSFVIRGDEVRQIAPGQTGKIADYNYKLPDDFTGCVIAWNSNNLDSKVGGNYNYLYRLFRKSNLKPFERDISTEIYQAGSTPCNGVEGFNCYFPLQSYGFQPTNGVGYQPYRVVVLSFELLHAPATVCGPKKSTNLVKNKCVNFNFNGLTGTGVLTESNKKFLPFQQFGRDIADTTDAVRDPQTLEILDITPCSFGGVSVITPGTNTSNQVAVLYQGVNCTEVPVAIHADQLTPTWRVYSTGSNVFQTRAGCLIGAEHVNNSYECDIPIGAGICASYQTQTNSPRRARSVASQSIIAYTMSLGAENSVAYSNNSIACPTNFTISVTTEILPVSMTKTSVDCTMYICGDSTECSNLLLQYGSFCTQLNRALTGIAVEQDKNTQEVFAQVKQIYKTPPIKDFGGFNFSQILPDPSKPSKRSFIEDLLFNKVTLADAGFTKQYGDCLGDIAARDLICAQKFNGLTVLPPLLTDEMIAQYTSALLAGTITSGWTFGAGAALQIPFAMQMAYRFNGIGVTQNVLYENQKLIANQFNSAIGKIQDSLSSTASALGKLQDVVNQNAQALNTLVKQLSSNFGAISSVLNDILSRLDKVEAEVQIDRLITGRLQSLQTYVTQQLIRAAEIRASANLAATKMSECVLGQSKRVDFCGKGYHLMSFPQSAPHGVVFLHVTYVPAQEKNFTTAPAICHDGKAHFPREGVFVSNGTHWFVTQRNFCEPQIITTDNTFVSGNCDVVIGIVNNTVYDPLQPELDSGGGGSDIIKLLNEQVNKEMQSSNLYMSMSSWCYTHSLDGAGLFLFDHAAEEYEHAKKLIIFLNENNVPVQLTSISAPEHKFEGLTQIFQKAYEHEQHISESINNIVDHAIKSKDHATFNFLQWYVAEQHEEEVLFKDILDKIELIGNENHGLYLADQYVKGIAKSRKS

SEQ ID NO: 9102 - protein, 1315 aa, Artificial Sequence
  SARS-CoV-2/Australia/NSW56/2020__EPI_ISL_417408 spike protein (1-1147)(I714C_Y1110C) Ferritin construct
MFVFLVLLPLVSSQCVNLTTRTQLPPAYTNSFTRGVYYPDKVFRSSVLHSTQDLFLPFFSNVTWFHAIHVSGTNGTKRFDNPVLPFNDGVYFASTEKSNIIRGWIFGTTLDSKTQSLLIVNNATNVVIKVCEFQFCNDPFLGVYYHKNNKSWMESEFRVYSSANNCTFEYVSQPFLMDLEGKQGNFKNLREFVFKNIDGYFKIYSKHTPINLVRDLPQGFSALEPLVDLPIGINITRFQTLLALHRSYLTPGDSSSGWTAGAAAYYVGYLQPRTFLLKYNENGTITDAVDCALDPLSETKCTLKSFTVEKGIYQTSNFRVQPTESIVRFPNITNLCPFGEVFNATRFASVYAWNRKRISNCVADYSVLYNSASFSTFKCYGVSPTKLNDLCFTNVYADSFVIRGDEVRQIAPGQTGKIADYNYKLPDDFTGCVIAWNSNNLDSKVGGNYNYLYRLFRKSNLKPFERDISTEIYQAGSTPCNGVEGFNCYFPLQSYGFQPTNGVGYQPYRVVVLSFELLHAPATVCGPKKSTNLVKNKCVNFNFNGLTGTGVLTESNKKFLPFQQFGRDIADTTDAVRDPQTLEILDITPCSFGGVSVITPGTNTSNQVAVLYQDVNCTEVPVAIHADQLTPTWRVYSTGSNVFQTRAGCLIGAEHVNNSYECDIPIGAGICASYQTQTNSPRRARSVASQSIIAYTMSLGAENSVAYSNNSIACPTNFTISVTTEILPVSMTKTSVDCTMYICGDSTECSNLLLQYGSFCTQLNRALTGIAVEQDKNTQEVFAQVKQIYKTPPIKDFGGFNFSQILPDSSKPSKRSFIEDLLFNKVTLADAGFIKQYGDCLGDIAARDLICAQKFNGLTVLPPLLTDEMIAQYTSALLAGTITSGWTFGAGAALQIPFAMQMAYRFNGIGVTQNVLYENQKLIANQFNSAIGKIQDSLSSTASALGKLQDVVNQNAQALNTLVKQLSSNFGAISSVLNDILSRLDKVEAEVQIDRLITGRLQSLQTYVTQQLIRAAEIRASANLAATKMSECVLGQSKRVDFCGKGYHLMSFPQSAPHGVVFLHVTYVPAQEKNFTTAPAICHDGKAHFPREGVFVSNGTHWFVTQRNFCEPQIITTDNTFVSGNCDVVIGIVNNTVYDPLQPELDSGGGGSDIIKLLNEQVNKEMQSSNLYMSMSSWCYTHSLDGAGLFLFDHAAEEYEHAKKLIIFLNENNVPVQLTSISAPEHKFEGLTQIFQKAYEHEQHISESINNIVDHAIKSKDHATFNFLQWYVAEQHEEEVLFKDILDKIELIGNENHGLYLADQYVKGIAKSRKS

SEQ ID NO: 9103 - protein, 1315 aa, Artificial Sequence
  SARS-CoV-2/Iceland/280/2020__EPI_ISL_417608 spike protein (1-1147)(I714C_Y1110C) Ferritin construct
MFVFLVLLPLVSSQCVNLTTRTQLPPAYTNSFTRGVYYPDKVFRSSVLHSTQDLFLPFFSNVTWFHAIHVSGTNGTKRFDNPVLPFNDGVYFASTEKSNIIRGWIFGTTLDSKTQSLLIVNNATNVVIKVCEFQFCNDPFLGVYYHKNNKSWMESEFRVYSSANNCTFEYVSQPFLMDLEGKQGNFKNLREFVFKNIDGYFKIYSKHTPINLVRDLPQGFSALEPLVDLPIGINITRFQTLLALHRSYLTPGDSSSGWTAGAAAYYVGYLQPRTFLLKYNENGTITDAVDCALDPLSETKCTLKSFTVEKGIYQTSNFRVQPTESIVRFPNITNLCPFGEVFNATRFASVYAWNRKRISNCVADYSVLYNSASFSTFKCYGVSPTKLNDLCFTNVYADSFVIRGDEVRQIAPGQTGKIADYNYKLPDDFTGCVIAWNSNNLDSKVGGNYNYLYRLFRKSNLKPFERDISTEIYQAGSTPCNGVEGFNCYFPLQSYGFQPTNGVGYQPYRVVVLSFELLHAPATVCGPKKSTNLVKNKCVNFNFNGLTGTGVLTESNKKFLPFQQFGRDIADTTDAVRDPQTLEILDITPCSFGGVSVITPGTNTSNQVAVLYQGVNCTEVPVAIHADQLTPTWRVYSTGSNVFQTRAGCLIGAEHVNNSYECDIPIGAGICASYHTQTNSPRRARSVASQSIIAYTMSLGAENSVAYSNNSIACPTNFTISVTTEILPVSMTKTSVDCTMYICGDSTECSNLLLQYGSFCTQLNRALTGIAVEQDKNTQEVFAQVKQIYKTPPIKDFGGFNFSQILPDPSKPSKRSFIEDLLFNKVTLADAGFIKQYGDCLGDIAARDLICAQKFNGLTVLPPLLTDEMIAQYTSALLAGTITSGWTFGAGAALQIPFAMQMAYRFNGIGVTQNVLYENQKLIANQFNSAIGKIQDSLSSTASALGKLQDVVNQNAQALNTLVKQLSSNFGAISSVLNDILSRLDKVEAEVQIDRLITGRLQSLQTYVTQQLIRAAEIRASANLAATKMSECVLGQSKRVDFCGKGYHLMSFPQSAPHGVVFLHVTYVPAQEKNFTTAPAICHDGKAHFPREGVFVSNGTHWFVTQRNFCEPQIITTDNTFVSGNCDVVIGIVNNTVYDPLQPELDSGGGGSDIIKLLNEQVNKEMQSSNLYMSMSSWCYTHSLDGAGLFLFDHAAEEYEHAKKLIIFLNENNVPVQLTSISAPEHKFEGLTQIFQKAYEHEQHISESINNIVDHAIKSKDHATFNFLQWYVAEQHEEEVLFKDILDKIELIGNENHGLYLADQYVKGIAKSRKS

SEQ ID NO: 9104 - protein, 1315 aa, Artificial Sequence; identical to SEQ ID NO: 9059
  SARS-CoV-2/Iceland/247/2020__EPI_ISL_417575 spike protein (1-1147)(I714C_Y1110C) Ferritin construct

SEQ ID NO: 9105 - protein, 1315 aa, Artificial Sequence
  SARS-CoV-2/Iceland/238/2020__EPI_ISL_417566 spike protein (1-1147)(I714C_Y1110C) Ferritin construct
MFVFLVLLPLVSSQCVNLTTRTQLPPAYTNSFTRGVYYPDKVFRSSVLHSTQDLFLPFFSNVTWFHAIHVSGTNGTKRFDNPVLPFNDGVYFASTEKSNIIRGWIFGTTLDSKTQSLLIVNNATNVVIKVCEFQFCNDPFLGVYYHKNNKSWMESEFRVYSSANNCTFEYVSQPFLMDLEGKQGNFKNLREFVFKNIDGYFKIYSKHTPINLVRDLPQGFSALEPLVDLPIGINITRFQTLLALHRSYLTPGDSSSGWTAGAAAYYVGYLQPRTFLLKYNENGTITDAVDCALDPLSETKCTLKSFTVEKGIYQTSNFRVQPTESIVRFPNITNLCPFGEVFNATRFASVYAWNRKRISNCVADYSVLYNSASFSTFKCYGVSPTKLNDLCFTNVYADSFVIRGDEVRQIAPGQTGKIADYNYKLPDDFTGCVIAWNSNNLDSKVGGNYNYLYRLFRKSNLKPFERDISTEIYQAGSTPCNGVEGFNCYFPLQSYGFQPTNGVGYQPYRVVVLSFELLHAPATVCGPKKSTNLVKNKCVNFNFNGLTGTGVLTESNKKFLPFQQFGRDIADTTDAVRDPQTLEILDITPCSFGGVSVITPGTNTSNQVAVLYQGVNCTEVPVAIHADQLTPTWRVYSTGSNVFQTRAGCLIGAEHVNNSYECDIPIGAGICASYQTQTNSPRRARSVASQSIIAYTMSLGAENSVAYSNNSIACPTNFTISVTTEILPVSMTKTSVDCTMYICGDSTECSNLLLQYGSFCTQLNRALTGIAVEQDKNTQEVFAQVKQIYKTPPIKDFGGFNFSQILPDPSKPSKRSFIEDLLFNKVTLADVGFIKQYGDCLGDIAARDLICAQKFNGLTVLPPLLTDEMIAQYTSALLAGTITSGWTFGAGAALQIPFAMQMAYRFNGIGVTQNVLYENQKLIANQFNSAIGKIQDSLSSTASALGKLQDVVNQNAQALNTLVKQLSSNFGAISSVLNDILSRLDKVEAEVQIDRLITGRLQSLQTYVTQQLIRAAEIRASANLAATKMSECVLGQSKRVDFCGKGYHLMSFPQSAPHGVVFLHVTYVPAQEKNFTTAPAICHDGKAHFPREGVFVSNGTHWFVTQRNFCEPQIITTDNTFVSGNCDVVIGIVNNTVYDPLQPELDSGGGGSDIIKLLNEQVNKEMQSSNLYMSMSSWCYTHSLDGAGLFLFDHAAEEYEHAKKLIIFLNENNVPVQLTSISAPEHKFEGLTQIFQKAYEHEQHISESINNIVDHAIKSKDHATFNFLQWYVAEQHEEEVLFKDILDKIELIGNENHGLYLADQYVKGIAKSRKS

SEQ ID NO: 9106 - protein, 1315 aa, Artificial Sequence
  SARS-CoV-2/Greece/16/2020__EPI_ISL_418265 spike protein (1-1147)(I714C_Y1110C) Ferritin construct
MFVFLVLLPLVSSQCVNLTTRTQLPPAYTNSFTRGVYYPDKVFRSSVLHSTQDLFLPFFSNVTWFHAIHVSGTNGTKRFDNPVLPFNDGVYFASTEKSNIIRGWIFGTTLDSKTQSLLIVNNATNVVIKVCEFQFCNDPFLGVYYHKNNKSWMESEFRVYSSANNCTFEYVSQPFLMDLEGKQGNFKNLREFVFKNVDGYFKIYSKHTPINLVRDLPQGFSALEPLVDLPIGINITRFQTLLALHRSYLTPGDSSSGWTAGAAAYYVGYLQPRTFLLKYNENGTITDAVDCALDPLSETKCTLKSFTVEKGIYQTSNFRVQPTESIVRFPNITNLCPFGEVFNATRFASVYAWNRKRISNCVADYSVLYNSASFSTFKCYGVSPTKLNDLCFTNVYADSFVIRGDEVRQIAPGQTGKIADYNYKLPDDFTGCVIAWNSNNLDSKVGGNYNYLYRLFRKSNLKPFERDISTEIYQAGSTPCNGVEGFNCYFPLQSYGFQPTNGVGYQPYRVVVLSFELLHAPATVCGPKKSTNLVKNKCVNFNFNGLTGTGVLTESNKKFLPFQQFGRDIADTTDAVRDPQTLEILDITPCSFGGVSVITPGTNTSNQVAVLYQDVNCTEVPVAIHADQLTPTWRVYSTGSNVFQTRAGCLIGAEHVNNSYECDIPIGAGICASYQTQTNSPRRARSVASQSIIAYTMSLGAENSVAYSNNSIACPTNFTISVTTEILPVSMTKTSVDCTMYICGDSTECSNLLLQYGSFCTQLNRALTGIAVEQDKNTQEVFAQVKQIYKTPPIKDFGGFNFSQILPDPSKPSKRSFIEDLLFNKVTLADAGFIKQYGDCLGDIAARDLICAQKFNGLTVLPPLLTDEMIAQYTSALLAGTITSGWTFGAGAALQIPFAMQMAYRFNGIGVTQNVLYENQKLIANQFNSAIGKIQDSLSSTASALGKLQDVVNQNAQALNTLVKQLSSNFGAISSVLNDILSRLDKVEAEVQIDRLITGRLQSLQTYVTQQLIRAAEIRASANLAATKMSECVLGQSKRVDFCGKGYHLMSFPQSAPHGVVFLHVTYVPAQEKNFTTAPAICHDGKAHFPREGVFVSNGTHWFVTQRNFCEPQIITTDNTFVSGNCDVVIGIVNNTVYDPLQPELDSGGGGSDIIKLLNEQVNKEMQSSNLYMSMSSWCYTHSLDGAGLFLFDHAAEEYEHAKKLIIFLNENNVPVQLTSISAPEHKFEGLTQIFQKAYEHEQHISESINNIVDHAIKSKDHATFNFLQWYVAEQHEEEVLFKDILDKIELIGNENHGLYLADQYVKGIAKSRKS

SEQ ID NO: 9107 - protein, 1315 aa, Artificial Sequence
  SARS-CoV-2/Iceland/319/2020__EPI_ISL_417648 spike protein (1-1147)(I714C_Y1110C) Ferritin construct
MFVFLVLLPLVSSQCVNLTTRTQLPPAYTNSFTRGVYYPDKVFRSSVLHSTQDLFLPFFSNVTWFHAIHVSGTNGTKRFDNPVLPFNDGVYFASTEKSNIIRGWIFGTTLDSKTQSLLIVNNATNVVIKVCEFQFCNDPFLGVYYHKNNKSWMESEFRVYSSANNCTFEYVSQPFLIDLEGKQGNFKNLREFVFKNIDGYFKIYSKHTPINLVRDLPQGFSALEPLVDLPIGINITRFQTLLALHRSYLTPGDSSSGWTAGAAAYYVGYLQPRTFLLKYNENGTITDAVDCALDPLSETKCTLKSFTVEKGIYQTSNFRVQPTESIVRFPNITNLCPFGEVFNATRFASVYAWNRKRISNCVADYSVLYNSASFSTFKCYGVSPTKLNDLCFTNVYADSFVIRGDEVRQIAPGQTGKIADYNYKLPDDFTGCVIAWNSNNLDSKVGGNYNYLYRLFRKSNLKPFERDISTEIYQAGSTPCNGVEGFNCYFPLQSYGFQPTNGVGYQPYRVVVLSFELLHAPATVCGPKKSTNLVKNKCVNFNFNGLTGTGVLTESNKKFLPFQQFGRDIADTTDAVRDPQTLEILDITPCSFGGVSVITPGTNTSNQVAVLYQGVNCTEVPVAIHADQLTPTWRVYSTGSNVFQTRAGCLIGAEHVNNSYECDIPIGAGICASYQTQTNSPRRARSVASQSIIAYTMSLGAENSVAYSNNSIACPTNFTISVTTEILPVSMTKTSVDCTMYICGDSTECSNLLLQYGSFCTQLNRALTGIAVEQDKNTQEVFAQVKQIYKTPPIKDFGGFNFSQILPDPSKPSKRSFIEDLLFNKVTLADAGFIKQYGDCLGDIAARDLICAQKFNGLTVLPPLLTDEMIAQYTSALLAGTITSGWTFGAGAALQIPFAMQMAYRFNGIGVTQNVLYENQKLIANQFNSAIGKIQDSLSSTASALGKLQDVVNQNAQALNTLVKQLSSNFGAISSVLNDILSRLDKVEAEVQIDRLITGRLQSLQTYVTQQLIRAAEIRASANLAATKMSECVLGQSKRVDFCGKGYHLMSFPQSAPHGVVFLHVTYVPAQEKNFTTAPAICHDGKAHFPREGVFVSNGTHWFVTQRNFCEPQIITTDNTFVSGNCDVVIGIVNNTVYDPLQPELDSGGGGSDIIKLLNEQVNKEMQSSNLYMSMSSWCYTHSLDGAGLFLFDHAAEEYEHAKKLIIFLNENNVPVQLTSISAPEHKFEGLTQIFQKAYEHEQHISESINNIVDHAIKSKDHATFNFLQWYVAEQHEEEVLFKDILDKIELIGNENHGLYLADQYVKGIAKSRKS

SEQ ID NO: 9108 - protein, 1315 aa, Artificial Sequence
  SARS-CoV-2/Congo/94/2020__EPI_ISL_417947 spike protein (1-1147)(I714C_Y1110C) Ferritin construct
MFVFLVLLPLVSSQCVNLTTRTQLPPAYTNSFTRGVYYPDKVFRSSVLHSTQDLFLPFFSNVTWFHAIHVSGTNGTKRFDNPVLPFNDGVYFASTEKSNIIRGWIFGTTLDSKTQSLLIVNNATNVVIKVCEFQFCNDPFLGVYYHKNNKSWMESEFRVYSSANNCTFEYVSQPFLMDLEGKQGNFKNLREFVFKNIDGYFKIYSKHTPINLVRDLPQGFSALEPLVDLPIGINITRFQTLLALHRSYLTPGDSSSGWTAGAAAYYVGYLQPRTFLLKYNENGTITDAVDCALDPLSETKCTLKSFTVEKGIYQTSNFRVQPTESIVRFPNITNLCPFGEVFNATRFASVYAWNRKRISNCVADYSVLYNSASFSTFKCYGVSPTKLNDLCFTNVYADSFVIRGDEVRQIAPGQTGKIADYNYKLPDDFTGCVIAWNSNNLDSKVGGNYNYLYRLFRKSNLKPFERDISTEIYQAGSTPCNGVEGFNCYFPLQSYGFQPTNGVGYQPYRVVVLSFELLHAPATVCGPKKSTNLVKNKCVNFNFNGLTGTGVLTESNKKFLPFQQFGRDIADTTDAVRDPQTLEILDITPCSFGGVSVITPGTNTSNQVAVLYQGVNCTEVPVAIHADQLTPTWRVYSTGSNVFQTRAGCLIGAEHVNNSYECDIPIGAGICASYQTQTNSPRRARSVASQSIIAYTMSLGAENSVAYSNNSIACPTNFTISVTTEILPVSMTKTSVDCTMYICGDSTECSNLLLQYGSFCTQLNRALTGIAVEQDKNTQEVFAQVKQIYKTPPIKDFGGFNFSQILPDPSKPSKRSFIEDILFNKVTLADAGFIKQYGDCLGDIAARDLICAQKFNGLTVLPPLLTDEMIAQYTSALLAGTITSGWTFGAGAALQIPFAMQMAYRFNGIGVTQNVLYENQKLIANQFNSAIGKIQDSLSSTASALGKLQDVVNQNAQALNTLVKQLSSNFGAISSVLNDILSRLDKVEAEVQIDRLITGRLQSLQTYVTQQLIRAAEIRASANLAATKMSECVLGQSKRVDFCGKGYHLMSFPQSAPHGVVFLHVTYVPAQEKNFTTAPAICHDGKAHFPREGVFVSNGTHWFVTQRNFCEPQIITTDNTFVSGNCDVVIGIVNNTVYDPLQPELDSGGGGSDIIKLLNEQVNKEMQSSNLYMSMSSWCYTHSLDGAGLFLFDHAAEEYEHAKKLIIFLNENNVPVQLTSISAPEHKFEGLTQIFQKAYEHEQHISESINNIVDHAIKSKDHATFNFLQWYVAEQHEEEVLFKDILDKIELIGNENHGLYLADQYVKGIAKSRKS

SEQ ID NO: 9109 - protein, 1315 aa, Artificial Sequence
  SARS-CoV-2/Congo/158/2020__EPI_ISL_417950 spike protein (1-1147)(I714C_Y1110C) Ferritin construct
MFVFLVLLPLVSSQCVNLTTRTQLPPAYTNSFTRGVYYPDKVFRSSVLHSTQDLFLPFFSNVTWFHAIHVSGTNGTKRFDNPVLPFNDGVYFASTEKSNIIRGWIFGTTLDSKTQSLLIVNNATNVVIKVCEFQFCNDPFLGVYYHKNNKSWMESEFRVYSSANNCTFEYVSQPFLMDLEGKQGNFKNLREFVFKNIDGYFKIYSKHTPINLVRDLPQGFSALEPLVDLPIGINITRFQTLLALHRSYLTPGDSSSGWTAGAAAYYVGYLQPRTFLLKYNENGTITDAVDCALDPLSETKCTLKSFTVEKGIYQTSNFRVQPTESIVRFPNITNLCPFGEVFNATRFASVYAWNRKRISNCVADYSVLYNSASFSTFKCYGVSPTKLNDLCFTNVYADSFVIRGDEVRQIAPGQTGKIADYNYKLPDDFTGCVIAWNSNNLDSKVGGNYNYLYRLFRKSNLKPFERDISTEIYQAGSTPCNGVEGFNCYFPLQSYGFQPTNGVGYQPYRVVVLSFELLHAPATVCGPKKSTNLVKNKCVNFNFNGLTGTGVLTESNKKFLPFQQFGRDIADTTDAVRDPQTLEILDITPCSFGGVSVITPGTNTSNQVAVLYQDVNCTEVPVAIHADQLTPTWRVYSTGSNVFQTRAGCLIGAEHVNNSYECDIPIGAGICASYQTQTNSPRRARSVASQSIIAYTMSLGAENSVAYSNNSIACPTNFTISVTTEILPVSMTKTSVDCTMYICGDSTECSNLLLQYGSFCTQLNRALTGIAVEQDKNTQEVFAQVKQIYKTPPIKDFGGFNFSQILPDPSKPSKRSFIEDLLFNKVTLADAGFIKQYGDCLGDIAARDLICAQKFNGLTVLPPLLTDEMIAQYTSALLAGTITSGWTFGAGAALQIPFAMQMAYRFNGIGVTQNVLYENQKLIANQFNSAIGKIQDSLSSTASALGKLQDVVNQNAQALNTLVKQLSSNFGAISSVLNDILSRLDKVEAEVQIDRLITGRLQSLQTYVTQQLIRAAEIRASANLAATKMSECVLGQSKRVDFCGKGYHLMSFPQSAPHGVVFLHVTYVPAQEKNFTTAPAICHDGKAHFPREGVFVSNGTHWFVTQRNFCEPQIITTDNTFLSGNCDVVIGIVNNTVYDPLQPELDSGGGGSDIIKLLNEQVNKEMQSSNLYMSMSSWCYTHSLDGAGLFLFDHAAEEYEHAKKLIIFLNENNVPVQLTSISAPEHKFEGLTQIFQKAYEHEQHISESINNIVDHAIKSKDHATFNFLQWYVAEQHEEEVLFKDILDKIELIGNENHGLYLADQYVKGIAKSRKS

SEQ ID NO: 9110 - protein, 1315 aa, Artificial Sequence
  SARS-CoV-2/USA/UT-00034/2020__EPI_ISL_417977 spike protein (1-1147)(I714C_Y1110C) Ferritin construct
MFVFLVLLPLVSSQCVNLTTRTQLPPAYTNSFTRGVYYPDKVFRSSVLHSTQDLFLPFFSNVTWFHAIHVSGTNGTKRFDNPVLPFNDGVYFASTEKSNIIRGWIFGTTLDSKTQSLLIVNNATNVVIKVCEFQFCNDPFLGVYYYKNNKSWMESEFRVYSSANNCTFEYVSQPFLMDLEGKQGNFKNLREFVFKNIDGYFKIYSKHTPINLVRDLPQGFSALEPLVDLPIGINITRFQTLLALHRSYLTPGDSSSGWTAGAAAYYVGYLQPRTFLLKYNENGTITDAVDCALDPLSETKCTLKSFTVEKGIYQTSNFRVQPTESIVRFPNITNLCPFGEVFNATRFASVYAWNRKRISNCVADYSVLYNSASFSTFKCYGVSPTKLNDLCFTNVYADSFVIRGDEVRQIAPGQTGKIADYNYKLPDDFTGCVIAWNSNNLDSKVGGNYNYLYRLFRKSNLKPFERDISTEIYQAGSTPCNGVEGFNCYFPLQSYGFQPTNGVGYQPYRVVVLSFELLHAPATVCGPKKSTNLVKNKCVNFNFNGLTGTGVLTESNKKFLPFQQFGRDIADTTDAVRDPQTLEILDITPCSFGGVSVITPGTNTSNQVAVLYQGVNCTEVPVAIHADQLTPTWRVYSTGSNVFQTRAGCLIGAEHVNNSYECDIPIGAGICASYQTQTNSPRRARSVASQSIIAYTMSLGAENSVAYSNNSIACPTNFTISVTTEILPVSMTKTSVDCTMYICGDSTECSNLLLQYGSFCTQLNRALTGIAVEQDKNTQEVFAQVKQIYKTPPIKDFGGFNFSQILPDPSKPSKRSFIEDLLFNKVTLADAGFIKQYGDCLGDIAARDLICAQKFNGLTVLPPLLTDEMIAQYTSALLAGTITSGWTFGAGAALQIPFAMQMAYRFNGIGVTQNVLYENQKLIANQFNSAIGKIQDSLSSTASALGKLQDVVNQNAQALNTLVKQLSSNFGAISSVLNDILSRLDKVEAEVQIDRLITGRLQSLQTYVTQQLIRAAEIRASANLAATKMSECVLGQSKRVDFCGKGYHLMSFPQSAPHGVVFLHVTYVPAQEKNFTTAPAICHDGKAHFPREGVFVSNGTHWFVTQRNFCEPQIITTDNTFVSGNCDVVIGIVNNTVYDPLQPELDSGGGGSDIIKLLNEQVNKEMQSSNLYMSMSSWCYTHSLDGAGLFLFDHAAEEYEHAKKLIIFLNENNVPVQLTSISAPEHKFEGLTQIFQKAYEHEQHISESINNIVDHAIKSKDHATFNFLQWYVAEQHEEEVLFKDILDKIELIGNENHGLYLADQYVKGIAKSRKS

SEQ ID NO: 9111 - protein, 1315 aa, Artificial Sequence
  SARS-CoV-2/USA/UT-00033/2020__EPI_ISL_417976 spike protein (1-1147)(I714C_Y1110C) Ferritin construct
MFVFLVLLPLVSSQCVNLTTRTQLPPAYTNSFTRGVYYPDKVFRSSVLHSTQDLFLPFFSNVTWFHAIHVSGTNGTKRFDNPVLPFNDGVYFASTEKSNIIRGWIFGTTLDSKTQSLLIVNNATNVVIKVCEFQFCNDPFLGVYYHKNNKSWMESEFRVYSSANNCTFEYVSQPFLMDLEGKQGNFKNLREFVFKNIDGYFKIYSKHTPINLVRDLPQGFSALEPLVDLPIGINITRFQTLLALHRSYLTPGDSSSGLTAGAAAYYVGYLQPRTFLLKYNENGTITDAVDCALDPLSETKCTLKSFTVEKGIYQTSNFRVQPTESIVRFPNITNLCPFGEVFNATRFASVYAWNRKRISNCVADYSVLYNSASFSTFKCYGVSPTKLNDLCFTNVYADSFVIRGDEVRQIAPGQTGKIADYNYKLPDDFTGCVIAWNSNNLDSKVGGNYNYLYRLFRKSNLKPFERDISTEIYQAGSTPCNGVEGFNCYFPLQSYGFQPTNGVGYQPYRVVVLSFELLHAPATVCGPKKSTNLVKNKCVNFNFNGLTGTGVLTESNKKFLPFQQFGRDIADTTDAVRDPQTLEILDITPCSFGGVSVITPGTNTSNQVAVLYQGVNCTEVPVAIHADQLTPTWRVYSTGSNVFQTRAGCLIGAEHVNNSYECDIPIGAGICASYQTQTNSPRRARSVASQSIIAYTMSLGAENSVAYSNNSIACPTNFTISVTTEILPVSMTKTSVDCTMYICGDSTECSNLLLQYGSFCTQLNRALTGIAVEQDKNTQEVFAQVKQIYKTPPIKDFGGFNFSQILPDPSKPSKRSFIEDLLFNKVTLADAGFIKQYGDCLGDIAARDLICAQKFNGLTVLPPLLTDEMIAQYTSALLAGTITSGWTFGAGAALQIPFAMQMAYRFNGIGVTQNVLYENQKLIANQFNSAIGKIQDSLSSTASALGKLQDVVNQNAQALNTLVKQLSSNFGAISSVLNDILSRLDKVEAEVQIDRLITGRLQSLQTYVTQQLIRAAEIRASANLAATKMSECVLGQSKRVDFCGKGYHLMSFPQSAPHGVVFLHVTYVPAQEKNFTTAPAICHDGKAHFPREGVFVSNGTHWFVTQRNFCEPQIITTDNTFVSGNCDVVIGIVNNTVYDPLQPELDSGGGGSDIIKLLNEQVNKEMQSSNLYMSMSSWCYTHSLDGAGLFLFDHAAEEYEHAKKLIIFLNENNVPVQLTSISAPEHKFEGLTQIFQKAYEHEQHISESINNIVDHAIKSKDHATFNFLQWYVAEQHEEEVLFKDILDKIELIGNENHGLYLADQYVKGIAKSRKS

SEQ ID NO: 9112 - protein, 1315 aa, Artificial Sequence
  SARS-CoV-2/USA/WI-13/2020__EPI_ISL_417516 spike protein (1-1147)(I714C_Y1110C) Ferritin construct
MFVFLVLLPLVSSQCVNLTTRTQLPPAYTNSFTRGVYYPDKVFRSSVLHSTQDLFLPFFSNVTWFHAIHVSGTNGTKRFDNPVLPFNDGVYFASTEKSNIIRGWIFGTTLDSKTQSLLIVNNATNVVIKVCEFQFCNDPFLGVYYHKNNKSWMESEFRVYSSANNCTFEYVSQPFLMDLEGKQGNFKNLREFVFKNIDGYFKIYSKHTPINLVRDLPQGFSALEPLVDLPIGINITRFQTLLALHRSYLTPGDSSSGWTAGAAAYYVGYLQPRTFLLKYNENGTITDAVDCALDPLSETKCTLKSFTVEKGIYQTSNFRVLPTESIVRFPNITNLCPFGEVFNATRFASVYAWNRKRISNCVADYSVLYNSASFSTFKCYGVSPTKLNDLCFTNVYADSFVIRGDEVRQIAPGQTGKIADYNYKLPDDFTGCVIAWNSNNLDSKVGGNYNYLYRLFRKSNLKPFERDISTEIYQAGSTPCNGVEGFNCYFPLQSYGFQPTNGVGYQPYRVVVLSFELLHAPATVCGPKKSTNLVKNKCVNFNFNGLTGTGVLTESNKKFLPFQQFGRDIADTTDAVRDPQTLEILDITPCSFGGVSVITPGTNTSNQVAVLYQGVNCTEVPVAIHADQLTPTWRVYSTGSNVFQTRAGCLIGAEHVNNSYECDIPIGAGICASYQTQTNSPRRARSVASQSIIAYTMSLGAENSVAYSNNSIACPTNFTISVTTEILPVSMTKTSVDCTMYICGDSTECSNLLLQYGSFCTQLNRALTGIAVEQDKNTQEVFAQVKQIYKTPPIKDFGGFNFSQILPDPSKPSKRSFIEDLLFNKVTLADAGFIKQYGDCLGDIAARDLICAQKFNGLTVLPPLLTDEMIAQYTSALLAGTITSGWTFGAGAALQIPFAMQMAYRFNGIGVTQNVLYENQKLIANQFNSAIGKIQDSLSSTASALGKLQDVVNQNAQALNTLVKQLSSNFGAISSVLNDILSRLDKVEAEVQIDRLITGRLQSLQTYVTQQLIRAAEIRASANLAATKMSECVLGQSKRVDFCGKGYHLMSFPQSAPHGVVFLHVTYVPAQEKNFTTAPAICHDGKAHFPREGVFVSNGTHWFVTQRNFCEPQIITTDNTFVSGNCDVVIGIVNNTVYDPLQPELDSGGGGSDIIKLLNEQVNKEMQSSNLYMSMSSWCYTHSLDGAGLFLFDHAAEEYEHAKKLIIFLNENNVPVQLTSISAPEHKFEGLTQIFQKAYEHEQHISESINNIVDHAIKSKDHATFNFLQWYVAEQHEEEVLFKDILDKIELIGNENHGLYLADQYVKGIAKSRKS

SEQ ID NO: 9113 - protein, 1314 aa, Artificial Sequence
  SARS-CoV-2/India/1-27/2020__EPI_ISL_413522 spike protein (1-1146)(I713C_Y1109C) Ferritin construct
MFVFLVLLPLVSSQCVNLTTRTQLPPAYTNSFTRGVYYPDKVFRSSVLHSTQDLFLPFFSNVTWFHAIHVSGTNGTKRFDNPVLPFNDGVYFASTEKSNIIRGWIFGTTLDSKTQSLLIVNNATNVVIKVCEFQFCNDPFLGVYHKNNKSWMESEFRVYSSANNCTFEYVSQPFLMDLEGKQGNFKNLREFVFKNIDGYFKIYSKHTPINLVRDLPQGFSALEPLVDLPIGINITRFQTLLALHRSYLTPGDSSSGWTAGAAAYYVGYLQPRTFLLKYNENGTITDAVDCALDPLSETKCTLKSFTVEKGIYQTSNFRVQPTESIVRFPNITNLCPFGEVFNATRFASVYAWNRKRISNCVADYSVLYNSASFSTFKCYGVSPTKLNDLCFTNVYADSFVIRGDEVIQIAPGQTGKIADYNYKLPDDFTGCVIAWNSNNLDSKVGGNYNYLYRLFRKSNLKPFERDISTEIYQAGSTPCNGVEGFNCYFPLQSYGFQPTNGVGYQPYRVVVLSFELLHAPATVCGPKKSTNLVKNKCVNFNFNGLTGTGVLTESNKKFLPFQQFGRDIADTTDAVRDPQTLEILDITPCSFGGVSVITPGTNTSNQVAVLYQDVNCTEVPVAIHADQLTPTWRVYSTGSNVFQTRAGCLIGAEHVNNSYECDIPIGAGICASYQTQTNSPRRARSVASQSIIAYTMSLGAENSVAYSNNSIACPTNFTISVTTEILPVSMTKTSVDCTMYICGDSTECSNLLLQYGSFCTQLNRALTGIAVEQDKNTQEVFAQVKQIYKTPPIKDFGGFNFSQILPDPSKPSKRSFIEDLLFNKVTLADAGFIKQYGDCLGDIAARDLICAQKFNGLTVLPPLLTDEMIAQYTSALLAGTITSGWTFGAGAALQIPFAMQMAYRFNGIGVTQNVLYENQKLIANQFNSAIGKIQDSLSSTASALGKLQDVVNQNAQALNTLVKQLSSNFGAISSVLNDILSRLDKVEAEVQIDRLITGRLQSLQTYVTQQLIRAAEIRASANLAATKMSECVLGQSKRVDFCGKGYHLMSFPQSAPHGVVFLHVTYVPAQEKNFTTAPAICHDGKAHFPREGVFVSNGTHWFVTQRNFCEPQIITTDNTFVSGNCDVVIGIVNNTVYDPLQPELDSGGGGSDIIKLLNEQVNKEMQSSNLYMSMSSWCYTHSLDGAGLFLFDHAAEEYEHAKKLIIFLNENNVPVQLTSISAPEHKFEGLTQIFQKAYEHEQHISESINNIVDHAIKSKDHATFNFLQWYVAEQHEEEVLFKDILDKIELIGNENHGLYLADQYVKGIAKSRKS

SEQ ID NO: 9114 - protein, 1309 aa, Artificial Sequence
  SARS-CoV-2/pangolin/Guangxi/P4L/2017__EPI_ISL_410538 spike protein (1-1141)(I708C_Y1104C) Ferritin construct
MFVFLFVLPLVSSQCVNLTTRTGIPPGYTNSSTRGVYYPDKVFRSSILHLTQDLFLPFFSNVTWFNTINYQGGFKKFDNPVLPFNDGVYFASTEKSNIIRGWIFGTTLDARTQSLLIVNNATNVVIKVCEFQFCTDPFLGVYYHNNNKTWVENEFRVYSSANNCTFEYISQPFLMDLEGKQGNFKNLREFVFKNVDGYFKIYSKHTPIDLVRDLPRGFAALEPLVDLPIGINITRFQTLLALHRSYLTPGNLESGWTTGAAAYYVGYLQQRTFLLSYNQNGTITDAVDCSLDPLSETKCTLKSLTVEKGIYQTSNFRVQPTISIVRFPNITNLCPFGEVFNASKFASVYAWNRKRISNCVADYSVLYNSTSFSTFKCYGVSPTKLNDLCFTNVYADSFVVKGDEVRQIAPGQTGVIADYNYKLPDDFTGCVIAWNSVKQDALTGGNYGYLYRLFRKSKLKPFERDISTEIYQAGSTPCNGQVGLNCYYPLERYGFHPTTGVNYQPFRVVVLSFELLNGPATVCGPKLSTTLVKDKCVNFNFNGLTGTGVLTTSKKQFLPFQQFGRDISDTTDAVRDPQTLEILDITPCSFGGVSVITPGTNTSNQVAVLYQDVNCTEVPMAIHAEQLTPAWRVYSAGANVFQTRAGCLVGAEHVNNSYECDIPVGAGICASYHSMSSLRSVNQRSIIAYTMSLGAENSVAYSNNSIACPTNFTISVTTEILPVSMTKTSVDCTMYICGDSIECSNLLLQYGSFCTQLNRALTGIAVEQDKNTQEVFAQVKQIYKTPPIKDFGGFNFSQILPDPSKPSKRSFIEDLLFNKVTLADAGFIKQYGDCLGDIAARDLICAQKFNGLTVLPPLLTDEMIAQYTSALLAGTITSGWTFGAGAALQIPFAMQMAYRFNGIGVTQNVLYENQKLIANQFNSAIGKIQDSLSSTASALGKLQDVVNQNAQALNTLVKQLSSNFGAISSVLNDILSRLDKVEAEVQIDRLITGRLQSLQTYVTQQLIRAAEIRASANLAATKMSECVLGQSKRVDFCGKGYHLMSFPQSAPHGVVFLHVTYVPAQEKNFTTAPAICHEGKAHFPREGVFVSNGTHWFITQRNFCEPQIITTDNTFVSGSCDVVIGIVNNTVYDPLQPELDSGGGGSDIIKLLNEQVNKEMQSSNLYMSMSSWCYTHSLDGAGLFLFDHAAEEYEHAKKLIIFLNENNVPVQLTSISAPEHKFEGLTQIFQKAYEHEQHISESINNIVDHAIKSKDHATFNFLQWYVAEQHEEEVLFKDILDKIELIGNENHGLYLADQYVKGIAKSRKS

SEQ ID NO: 9115 - protein, 1309 aa, Artificial Sequence
  SARS-CoV-2/pangolin/Guangxi/P5L/2017__EPI_ISL_410540 spike protein (1-1141)(I708C_Y1104C) Ferritin construct
MFVFLFVLPLVSSQCVNLTTRTGIPPGYTNSSTRGVYYPDKVFRSSILHLTQDLFLPFFSNVTWFNTINYQGGFKKFDNPVLPFNDGVYFASTEKSNIIRGWIFGTTLDARTQSLLIVNNATNVVIKVCEFQFCTDPFLGVYYHNNNKTWVENEFRVYSSANNCTFEYISQPFLMDLEGKQGNFKNLREFVFKNVDGYFKIYSKHTPIDLVRDLPRGFAALEPLVDLPIGINITRFQTLLALHRSYLTPGKLESGWTTGAAAYYVGYLQQRTFLLSYNQNGTITDAVDCSLDPLSETKCTLKSLTVEKGIYQTSNFRVQPTISIVRFPNITNLCPFGEVFNASKFASVYAWNRKRISNCVADYSVLYNSTSFSTFKCYGVSPTKLNDLCFTNVYADSFVVKGDEVRQIAPGQTGVIADYNYKLPDDFTGCVIAWNSVKQDALTGGNYGYLYRLFRKSKLKPFERDISTEIYQAGSTPCNGQVGLNCYYPLERYGFHPTTGVNYQPFRVVVLSFELLNGPATVCGPKLSTTLVKDKCVNFNFNGLTGTGVLTTSKKQFLPFQQFGRDISDTTDAVRDPQTLEILDITPCSFGGVSVITPGTNTSNQVAVLYQDVNCTEVPMAIHAEQLTPAWRVYSAGANVFQTRAGCLVGAEHVNNSYECDIPVGAGICASYHSMSSFRSVNQRSIIAYTMSLGAENSVAYSNNSIACPTNFTISVTTEILPVSMTKTSVDCTMYICGDSIECSNLLLQYGSFCTQLNRALTGIAVEQDKNTQEVFAQVKQIYKTPPIKDFGGFNFSQILPDPSKPSKRSFIEDLLFNKVTLADAGFIKQYGDCLGDIAARDLICAQKFNGLTVLPPLLTDEMIAQYTSALLAGTITSGWTFGAGAALQIPFAMQMAYRFNGIGVTQNVLYENQKLIANQFNSAIGKIQDSLSSTASALGKLQDVVNQNAQALNTLVKQLSSNFGAISSVLNDILSRLDKVEAEVQIDRLITGRLQSLQTYVTQQLIRAAEIRASANLAATKMSECVLGQSKRVDFCGKGYHLMSFPQSAPHGVVFLHVTYVPAQEKNFTTAPAICHEGKAHFPREGVFVSNGTHWFITQRNFCEPQIITTDNTFVSGSCDVVIGIVNNTVYDPLQPELDSGGGGSDIIKLLNEQVNKEMQSSNLYMSMSSWCYTHSLDGAGLFLFDHAAEEYEHAKKLIIFLNENNVPVQLTSISAPEHKFEGLTQIFQKAYEHEQHISESINNIVDHAIKSKDHATFNFLQWYVAEQHEEEVLFKDILDKIELIGNENHGLYLADQYVKGIAKSRKS

SEQ ID NO: 9116 - protein, 1309 aa, Artificial Sequence
  SARS-CoV-2/pangolin/Guangxi/P5E/2017__EPI_ISL_410541 spike protein (1-1141)(I708C_Y1104C) Ferritin construct
MFVFLFVLPLVSSQCVNLTTRTGIPPGYTNSSTRGVYYPDKVFRSSILHLTQDLFLPFFSNVTWFNTITYQGGSKKFDNPVLPFNDGVYFASTEKSNIIRGWIFGTTLDARTQSLLIVNNATNVVIKVCEFQFCTDPFLGVYYHNNNKTWVENEFRVYSSANNCTFEYISQPFLMDLEGKQGNFKNLREFVFKNVDGYFKIYSKHTPIDLVRDLPRGFAALEPLVDLPIGINITRFQTLLALHRSYLTPGKLESGWTTGAAAYYVGYLQQRTFLLSYNQNGTITDAVDCSLDPLSETKCTLKSLTVEKGIYQTSNFRVQPTISIVRFPNITNLCPFGEVFNASKFASVYAWNRKRISNCVADYSVLYNSTSFSTFKCYGVSPTKLNDLCFTNVYADSFVVKGDEVRQIAPGQTGVIADYNYKLPDDFTGCVIAWNSVKQDALTGDNYGYLYRLFRKSKLKPFERDISTEIYQAGSTPCNGQVGLNCYYPLERYGFHPTTGVNYQPFRVVVLSFELLNGPATVCGPKLSTTLVKDKCVNFNFNGLTGTGVLTTSKKQFLPFQQFGRDISDTTDAVRDPQTLEILDITPCSFGGVSVITPGTNTSNQVAVLYQDVNCTEVPMAIHAEQLTPAWRVYSAGANVFQTRAGCLVGAEHVNNSYECDIPVGAGICASYHSMSSFRSVNQRSIIAYTMSLGAENSVAYSNNSIACPTNFTISVTTEILPVSMTKTSVDCTMYICGDSIECSNLLLQYGSFCTQLNRALTGIAVEQDKNTQEVFAQVKQIYKTPPIKDFGGFNFSQILPDPSKPSKRSFIEDLLFNKVTLADAGFIKQYGDCLGDIAARDLICAQKFNGLTVLPPLLTDEMIAQYTSALLAGTITSGWTFGAGAALQIPFAMQMAYRFNGIGVTQNVLYENQKLIANQFNSAIGKIQDSLSSTASALGKLQDVVNQNAQALNTLVKQLSSNFGAISSVLNDILSRLDKVEAEVQIDRLITGRLQSLQTYVTQQLIRAAEIRASANLAATKMSECVLGQSKRVDFCGKGYHLMSFPQSAPHGVVFLHVTYVPAQEKNFTTAPAICHEGKAHFPREGVFVSNGTHWFITQRNFCEPQIITTDNTFVSGSCDVVIGIVNNTVYDPLQPELDSGGGGSDIIKLLNEQVNKEMQSSNLYMSMSSWCYTHSLDGAGLFLFDHAAEEYEHAKKLIIFLNENNVPVQLTSISAPEHKFEGLTQIFQKAYEHEQHISESINNIVDHAIKSKDHATFNFLQWYVAEQHEEEVLFKDILDKIELIGNENHGLYLADQYVKGIAKSRKS

SEQ ID NO: 9117 - protein, 1307 aa, Artificial Sequence
  SARS-CoV-2/pangolin/Guangxi/P1E/2017__EPI_ISL_410539 spike protein (1-1139)(I706C_Y1102C) Ferritin construct
MFVFLFVLPLVSSQCVNLTTRTGIQPGYTNSSTRGVYYPDKVFRSSILHLTQDLFLPFFSNVTWFNTINYQGGFKKFDNPVLPFNDGVYFASTEKSNIIRGWIFGTTLDARTQSLLIVNNATNVVIKVCEFQFCTDPFLGVYYHNNNKTWVENEFRVYSSANNCTFEYISQPFLMDLEGKQGNFKNLREFVFKNVDGYFKIYSKHTPIDLVRDLPRGFAALEPLVDLPIGINITRFQTLLALHRSYLTPGKLESGWTTGAAAYYVGYLQQRTFLLSYNQNGTITDAVDCSLDPLSETKCTLKSLTVEKGIYQTSNFRVQPTISIVRFPNITNLCPFGEVFNASKFASVYAWNRKRISNCVADYSVLYNSTSFSTFKCYGVSPTKLNDLCFTNVYADSFVVKGDEVRQIAPGQTGVIADYNYKLPDDFTGCVIAWNSVKQDALTGGNYLYRLFRKSKLKPFERDISTEIYQAGSTPCNGQVGLNCYYPLERYGFHPTTGVNYQPFRVVVLSFELLNGPATVCGPKLSTTLVKDKCVNFNFNGLTGTGVLTTSKKQFLPFQQFGRDISDTTDAVRDPQTLEILDITPCSFGGVSVITPGTNTSNQVAVLYQDVNCTEVPMAIHAEQLTPAWRVYSAGANVFQTRAGCLVGAEHVNNSYECDIPVGAGICASYHSMSSLRSVNQRSIIAYTMSLGAENSVAYSNNSIACPTNFTISVTTEILPVSMTKTSVDCTMYICGDSIECSNLLLQYGSFCTQLNRALTGIAVEQDKNTQEVFAQVKQIYKTPPIKDFGGFNFSQILPDPSKPSKRSFIEDLLFNKVTLADAGFIKQYGDCLGDIAARDLICAQKFNGLTVLPPLLTDEMIAQYTSALLAGTITSGWTFGAGAALQIPFAMQMAYRFNGIGVTQNVLYENQKLIANQFNSAIGKIQDSLSSTASALGKLQDVVNQNAQALNTLVKQLSSNFGAISSVLNDILSRLDKVEAEVQIDRLITGRLQSLQTYVTQQLIRAAEIRASANLAATKMSECVLGQSKRVDFCGKGYHLMSFPQSAPHGVVFLHVTYVPAQEKNFTTAPAICHEGKAHFPREGVFVSNGTHWFITQRNFCEPQIITTDNTFVSGSCDVVIGIVNNTVYDPLQPELDSGGGGSDIIKLLNEQVNKEMQSSNLYMSMSSWCYTHSLDGAGLFLFDHAAEEYEHAKKLIIFLNENNVPVQLTSISAPEHKFEGLTQIFQKAYEHEQHISESINNIVDHAIKSKDHATFNFLQWYVAEQHEEEVLFKDILDKIELIGNENHGLYLADQYVKGIAKSRKS

SEQ ID NO: 9118 - protein, 1315 aa, Artificial Sequence
  SARS-CoV-2/Wuhan/WIV05/2019__EPI_ISL_402128 spike protein (1-1147)(P715C_P1069C) Ferritin construct
MFVFLVLLPLVSSQCVNLTTRTQLPPAYTNSFTRGVYYPDKVFRSSVLHSTQDLFLPFFSNVTWFHAIHVSGTNGTKRFDNPVLPFNDGVYFASTEKSNIIRGWIFGTTLDSKTQSLLIVNNATNVVIKVCEFQFCNDPFLGVYYHKNNKSWMESEFRVYSSANNCTFEYVSQPFLMDLEGKQGNFKNLREFVFKNIDGYFKIYSKHTPINLVRDLPQGFSALEPLVDLPIGINITRFQTLLALHRSYLTPGDSSSGWTAGAAAYYVGYLQPRTFLLKYNENGTITDAVDCALDPLSETKCTLKSFTVEKGIYQTSNFRVQPTESIVRFPNITNLCPFGEVFNATRFASVYAWNRKRISNCVADYSVLYNSASFSTFKCYGVSPTKLNDLCFTNVYADSFVIRGDEVRQIAPGQTGKIADYNYKLPDDFTGCVIAWNSNNLDSKVGGNYNYLYRLFRKSNLKPFERDISTEIYQAGSTPCNGVEGFNCYFPLQSYGFQPTNGVGYQPYRVVVLSFELLHAPATVCGPKKSTNLVKNKCVNFNFNGLTGTGVLTESNKKFLPFQQFGRDIADTTDAVRDPQTLEILDITPCSFGGVSVITPGTNTSNQVAVLYQDVNCTEVPVAIHADQLTPTWRVYSTGSNVFQTRAGCLIGAEHVNNSYECDIPIGAGICASYQTQTNSPRRARSVASQSIIAYTMSLGAENSVAYSNNSIAICTNFTISVTTEILPVSMTKTSVDCTMYICGDSTECSNLLLQYGSFCTQLNRALTGIAVEQDKNTQEVFAQVKQIYKTPPIKDFGGFNFSQILPDPSKPSKRSFIEDLLFNKVTLADAGFIKQYGDCLGDIAARDLICAQKFNGLTVLPPLLTDEMIAQYTSALLAGTITSGWTFGAGAALQIPFAMQMAYRFNGIGVTQNVLYENQKLIANQFNSAIGKIQDSLSSTASALGKLQDVVNQNAQALNTLVKQLSSNFGAISSVLNDILSRLDKVEAEVQIDRLITGRLQSLQTYVTQQLIRAAEIRASANLAATKMSECVLGQSKRVDFCGKGYHLMSFPQSAPHGVVFLHVTYVCAQEKNFTTAPAICHDGKAHFPREGVFVSNGTHWFVTQRNFYEPQIITTDNTFVSGNCDVVIGIVNNTVYDPLQPELDSGGGGSDIIKLLNEQVNKEMQSSNLYMSMSSWCYTHSLDGAGLFLFDHAAEEYEHAKKLIIFLNENNVPVQLTSISAPEHKFEGLTQIFQKAYEHEQHISESINNIVDHAIKSKDHATFNFLQWYVAEQHEEEVLFKDILDKIELIGNENHGLYLADQYVKGIAKSRKS

SEQ ID NO: 9119 - protein, 1311 aa, Artificial Sequence
  SARS-CoV-2/bat/Yunnan/RaTG13/2013__EPI_ISL_402131 spike protein (1-1143)(P711C_P1065C) Ferritin construct
MFVFLVLLPLVSSQCVNLTTRTQLPPAYTNSSTRGVYYPDKVFRSSVLHLTQDLFLPFFSNVTWFHAIHVSGTNGIKRFDNPVLPFNDGVYFASTEKSNIIRGWIFGTTLDSKTQSLLIVNNATNVVIKVCEFQFCNDPFLGVYYHKNNKSWMESEFRVYSSANNCTFEYVSQPFLMDLEGKQGNFKNLREFVFKNIDGYFKIYSKHTPINLVRDLPPGFSALEPLVDLPIGINITRFQTLLALHRSYLTPGDSSSGWTAGAAAYYVGYLQPRTFLLKYNENGTITDAVDCALDPLSETKCTLKSFTVEKGIYQTSNFRVQPTDSIVRFPNITNLCPFGEVFNATTFASVYAWNRKRISNCVADYSVLYNSTSFSTFKCYGVSPTKLNDLCFTNVYADSFVITGDEVRQIAPGQTGKIADYNYKLPDDFTGCVIAWNSKHIDAKEGGNFNYLYRLFRKANLKPFERDISTEIYQAGSKPCNGQTGLNCYYPLYRYGFYPTDGVGHQPYRVVVLSFELLNAPATVCGPKKSTNLVKNKCVNFNFNGLTGTGVLTESNKKFLPFQQFGRDIADTTDAVRDPQTLEILDITPCSFGGVSVITPGTNASNQVAVLYQDVNCTEVPVAIHADQLTPTWRVYSTGSNVFQTRAGCLIGAEHVNNSYECDIPIGAGICASYQTQTNSRSVASQSIIAYTMSLGAENSVAYSNNSIAICTNFTISVTTEILPVSMTKTSVDCTMYICGDSTECSNLLLQYGSFCTQLNRALTGIAVEQDKNTQEVFAQVKQIYKTPPIKDFGGFNFSQILPDPSKPSKRSFIEDLLFNKVTLADAGFIKQYGDCLGDIAARDLICAQKFNGLTVLPPLLTDEMIAQYTSALLAGTITSGWTFGAGAALQIPFAMQMAYRFNGIGVTQNVLYENQKLIANQFNSAIGKIQDSLSSTASALGKLQDVVNQNAQALNTLVKQLSSNFGAISSVLNDILSRLDKVEAEVQIDRLITGRLQSLQTYVTQQLIRAAEIRASANLAATKMSECVLGQSKRVDFCGKGYHLMSFPQSAPHGVVFLHVTYVCAQEKNFTTAPAICHDGKAHFPREGVFVSNGTHWFVTQRNFYEPQIITTDNTFVSGSCDVVIGIVNNTVYDPLQPELDSGGGGSDIIKLLNEQVNKEMQSSNLYMSMSSWCYTHSLDGAGLFLFDHAAEEYEHAKKLIIFLNENNVPVQLTSISAPEHKFEGLTQIFQKAYEHEQHISESINNIVDHAIKSKDHATFNFLQWYVAEQHEEEVLFKDILDKIELIGNENHGLYLADQYVKGIAKSRKS

SEQ ID NO: 9120 - protein, 1315 aa, Artificial Sequence
  SARS-CoV-2/Wuhan/HBCDC-HB-01/2019__EPI_ISL_402132 spike protein (1-1147)(P715C_P1069C) Ferritin construct
MFVFLVLLPLVSSQCVNLTTRTQLPPAYTNSITRGVYYPDKVFRSSVLHSTQDLFLPFFSNVTWFHAIHVSGTNGTKRFDNPVLPFNDGVYFASTEKSNIIRGWIFGTTLDSKTQSLLIVNNATNVVIKVCEFQFCNDPFLGVYYHKNNKSWMESEFRVYSSANNCTFEYVSQPFLMDLEGKQGNFKNLREFVFKNIDGYFKIYSKHTPINLVRDLPQGFSALEPLVDLPIGINITRFQTLLALHRSYLTPGDSSSGWTAGAAAYYVGYLQPRTFLLKYNENGTITDAVDCALDPLSETKCTLKSFTVEKGIYQTSNFRVQPTESIVRFPNITNLCPFGEVFNATRFASVYAWNRKRISNCVADYSVLYNSASFSTFKCYGVSPTKLNDLCFTNVYADSFVIRGDEVRQIAPGQTGKIADYNYKLPDDFTGCVIAWNSNNLDSKVGGNYNYLYRLFRKSNLKPFERDISTEIYQAGSTPCNGVEGFNCYFPLQSYGFQPTNGVGYQPYRVVVLSFELLHAPATVCGPKKSTNLVKNKCVNFNFNGLTGTGVLTESNKKFLPFQQFGRDIADTTDAVRDPQTLEILDITPCSFGGVSVITPGTNTSNQVAVLYQDVNCTEVPVAIHADQLTPTWRVYSTGSNVFQTRAGCLIGAEHVNNSYECDIPIGAGICASYQTQTNSPRRARSVASQSIIAYTMSLGAENSVAYSNNSIAICTNFTISVTTEILPVSMTKTSVDCTMYICGDSTECSNLLLQYGSFCTQLNRALTGIAVEQDKNTQEVFAQVKQIYKTPPIKDFGGFNFSQILPDPSKPSKRSFIEDLLFNKVTLADAGFIKQYGDCLGDIAARDLICAQKFNGLTVLPPLLTDEMIAQYTSALLAGTITSGWTFGAGAALQIPFAMQMAYRFNGIGVTQNVLYENQKLIANQFNSAIGKIQDSLSSTASALGKLQDVVNQNAQALNTLVKQLSSNFGAISSVLNDILSRLDKVEAEVQIDRLITGRLQSLQTYVTQQLIRAAEIRASANLAATKMSECVLGQSKRVDFCGKGYHLMSFPQSAPHGVVFLHVTYVCAQEKNFTTAPAICHDGKAHFPREGVFVSNGTHWFVTQRNFYEPQIITTDNTFVSGNCDVVIGIVNNTVYDPLQPELDSGGGGSDIIKLLNEQVNKEMQSSNLYMSMSSWCYTHSLDGAGLFLFDHAAEEYEHAKKLIIFLNENNVPVQLTSISAPEHKFEGLTQIFQKAYEHEQHISESINNIVDHAIKSKDHATFNFLQWYVAEQHEEEVLFKDILDKIELIGNENHGLYLADQYVKGIAKSRKS

SEQ ID NO: 9121 - protein, 1315 aa, Artificial Sequence
  SARS-CoV-2/Guangdong/20SF028/2020__EPI_ISL_403936 spike protein (1-1147)(P715C_P1069C) Ferritin construct
MFVFLVLLPLVSSQCVNLTTRTQLPPAYTNSFTRGVYYPDKVFRSSVLYSTQDLFLPFFSNVTWFHAIHVSGTNGTKRFDNPVLPFNDGVYFASTEKSNIIRGWIFGTTLDSKTQSLLIVNNATNVVIKVCEFQFCNDPFLGVYYHKNNKSWMESEFRVYSSANNCTFEYVSQPFLMDLEGKQGNFKNLREFVFKNIDGYFKIYSKHTPINLVRDLPQGFSALEPLVDLPIGINITRFQTLLALHRSYLTPGDSSSGWTAGAAAYYVGYLQPRTFLLKYNENGTITDAVDCALDPLSETKCTLKSFTVEKGIYQTSNFRVQPTESIVRFPNITNLCPFGEVFNATRFASVYAWNRKRISNCVADYSVLYNSASFSTFKCYGVSPTKLNDLCFTNVYADSFVIRGDEVRQIAPGQTGKIADYNYKLPDDFTGCVIAWNSNNLDSKVGGNYNYLYRLFRKSNLKPFERDISTEIYQAGSTPCNGVEGFNCYFPLQSYGFQPTNGVGYQPYRVVVLSFELLHAPATVCGPKKSTNLVKNKCVNFNFNGLTGTGVLTESNKKFLPFQQFGRDIADTTDAVRDPQTLEILDITPCSFGGVSVITPGTNTSNQVAVLYQDVNCTEVPVAIHADQLTPTWRVYSTGSNVFQTRAGCLIGAEHVNNSYECDIPIGAGICASYQTQTNSPRRARSVASQSIIAYTMSLGAENSVAYSNNSIAICTNFTISVTTEILPVSMTKTSVDCTMYICGDSTECSNLLLQYGSFCTQLNRALTGIAVEQDKNTQEVFAQVKQIYKTPPIKDFGGFNFSQILPDPSKPSKRSFIEDLLFNKVTLADAGFIKQYGDCLGDIAARDLICAQKFNGLTVLPPLLTDEMIAQYTSALLAGTITSGWTFGAGAALQIPFAMQMAYRFNGIGVTQNVLYENQKLIANQFNSAIGKIQDSLSSTASALGKLQDVVNQNAQALNTLVKQLSSNFGAISSVLNDILSRLDKVEAEVQIDRLITGRLQSLQTYVTQQLIRAAEIRASANLAATKMSECVLGQSKRVDFCGKGYHLMSFPQSAPHGVVFLHVTYVCAQEKNFTTAPAICHDGKAHFPREGVFVSNGTHWFVTQRNFYEPQIITTDNTFVSGNCDVVIGIVNNTVYDPLQPELDSGGGGSDIIKLLNEQVNKEMQSSNLYMSMSSWCYTHSLDGAGLFLFDHAAEEYEHAKKLIIFLNENNVPVQLTSISAPEHKFEGLTQIFQKAYEHEQHISESINNIVDHAIKSKDHATFNFLQWYVAEQHEEEVLFKDILDKIELIGNENHGLYLADQYVKGIAKSRKS

SEQ ID NO: 9122 - protein, 1315 aa, Artificial Sequence
  SARS-CoV-2/Shenzhen/SZTH-001/2020__EPI_ISL_406592 spike protein (1-1147)(P715C_P1069C) Ferritin construct
MFVFLVLLPLVSSQCVNLTTRTQLPPAYTNSFTRGVYYPDKVFRSSVLHSTQDLFLPFFSNVTWFHAIHVSGTNGTKRFDNPVLPFNDGVYFASTEKSNIIRGWIFGTTLDSKTQSLLIVNNATNVVIKVCEFQFCNDPFLGVYYHKNNKSWMESEFRVYSSANNCTFEYVSQPFLMDLEGKQGNFKNLREFVFKNIDGYFKIYSKHTPINLVRDLPQGFSALEPLVDLPIGINITRFQTLLALHRSYLTPGDSSSGWTAGAAAYYVGYLQPRTFLLKYNENGTITDAVDCALDPLSETKCTLKSFTVEKGIYQTSNFRVQPTESIVRFPNITNLCPFGEVFNATRFASVYAWNRKRISNCVADYSVLYNSASFSTFKCYGVSPTKLNDLCFTNVYADSFVIRGDEVRQIAPGQTGKIADYNYKLPDDFTGCVIAWNSNNLDSKVGGNYNYLYRLFRKSNLKPFERDISTEIYQAGSTPCNGVEGFNCYFPLQSYGFQPTNGVGYQPYRVVVLSFELLHAPATVCGPKKSTNLVKNKCVNFNFNGLTGTGVLTESNKKFLPFQQFGRDIADTTDAVRDPQTLEILDITPCSFGGVSVITPGTNTSNQVAVLYQDVNCTEVPVAIHADQLTPTWRVYSTGSNVFQTRAGCLIGAEHVNNSYECDIPIGAGICASYQTQTNSPRRARSVASQSIIAYTMSLGAENSVAYSNNSIAICTNFTISVTTEILPVSMTKTSVDCTMYICGDSTECSNLLLQYGSFCTQLNRALTGIAVEQDKNTQEVFAQVKQIYKTPPIKDFGGFNFSQILPDPSKPSKRSFIEDLLFNKVTLADAGFIKQYGDCLGDIAARDLICAQKFNGLTVLPPLLTDEMIAQYTSALLAGTITSGWTFGAGAALQIPFAMQMAYRFNGIGVTQNVLYENQKLIANQFNSAIGKIQDSLSSTASALGKLQDVVNQNAQALNTLVKQLSSNFGAISSVLNDILSRLDKVEAEVQIDRLITGRLQSLQTYVTQQLIRAAEIRASANLAATKMSECVLGQSKRVDFCGKGYHLMSFPQSAPHGVVFLHVTYVCAQEKNFTTAPAICHDGKAHFPREGVFVSNGTHWFVTQRNFYEPQIITTDNTFVSGNCDVLIGIVNNTVYDPLQPELDSGGGGSDIIKLLNEQVNKEMQSSNLYMSMSSWCYTHSLDGAGLFLFDHAAEEYEHAKKLIIFLNENNVPVQLTSISAPEHKFEGLTQIFQKAYEHEQHISESINNIVDHAIKSKDHATFNFLQWYVAEQHEEEVLFKDILDKIELIGNENHGLYLADQYVKGIAKSRKS

SEQ ID NO: 9123 - protein, 1315 aa, Artificial Sequence
  SARS-CoV-2/Shenzhen/SZTH-004/2020__EPI_ISL_406595 spike protein (1-1147)(P715C_P1069C) Ferritin construct
MFVFLVLLPLVSSQCVNLTTRTQLPPAYTNSFTRGVYYPDKVFRSSVLHSTQDLFLPFFSNVTWFHAIHVSGTNGTKRFDNPVLPFNDGVYFASTEKSNIIRGWIFGTTLDSKTQSLLIVNNATNVVIKVCEFQFCNDPFLGVYYHKNNKSWMESEFRVYSSANNCTFEYVSQPFLMDLEGKQGNFKNLREFVFKNIDGYFKIYSKHTPINLVRDLPQGFSALEPLVDLPIGINITRFQTLLALHRSYLTPGDSSSGWTAGAAAYYVGYLQPRTFLLKYNENGTITDAVDCALDPLSETKCTLKSFTVEKGIYQTSNFRVQPTESIVRFPNITNLCPFGEVFNATRFASVYAWDRKRISNCVAYYSVLYNSASFSTFKCYGVSPTKLNDLCFTNVYADSFVIRGDEVRQIAPGQTGKIADYNYKLPDDFTGCVIAWNSNNLDSKVGGNYNYLYRLFRKSNLKPFERDISTEIYQAGSTPCNGVEGFNCYFPLQSYGFQPTNGVGYQPYRVVVLSFELLHAPATVCGPKKSTNLVKNKCVNFNFNGLTGTGVLTESNKKFLPFQQFGRDIADTTDAVRDPQTLEILDITPCSFGGVSVITPGTNTSNQVAVLYQDVNCTEVPVAIHADQLTPTWRVYSTGSNVFQTRAGCLIGAEHVNNSYECDIPIGAGICASYQTQTNSPRRARSVASQSIIAYTMSLGAENSVAYSNNSIAICTNFTISVTTEILPVSMTKTSVDCTMYICGDSTECSNLLLQYGSFCTQLNRALTGIAVEQDKNTQEVFAQVKQIYKTPPIKDFGGFNFSQILPDPSKPSKRSFIEDLLFNKVTLADAGFIKQYGDCLGDIAARDLICAQKFNGLTVLPPLLTDEMIAQYTSALLAGTITSGWTFGAGAALQIPFAMQMAYRFNGIGVTQNVLYENQKLIANQFNSAIGKIQDSLSSTASALGKLQDVVNQNAQALNTLVKQLSSNFGAISSVLNDILSRLDKVEAEVQIDRLITGRLQSLQTYVTQQLIRAAEIRASANLAATKMSECVLGQSKRVDFCGKGYHLMSFPQSAPHGVVFLHVTYVCAQEKNFTTAPAICHDGKAHFPREGVFVSNGTHWFVTQRNFYEPQIITTDNTFVSGNCDVVIGIVNNTVYDPLQPELDSGGGGSDIIKLLNEQVNKEMQSSNLYMSMSSWCYTHSLDGAGLFLFDHAAEEYEHAKKLIIFLNENNVPVQLTSISAPEHKFEGLTQIFQKAYEHEQHISESINNIVDHAIKSKDHATFNFLQWYVAEQHEEEVLFKDILDKIELIGNENHGLYLADQYVKGIAKSRKS

SEQ ID NO: 9124 - protein, 1315 aa, Artificial Sequence
  SARS-CoV-2/France/IDF0372/2020__EPI_ISL_406596 spike protein (1-1147)(P715C_P1069C) Ferritin construct
MFVFLVLLPLVSSQCVNLTTRTQLPPAYTNSFTRGVYYPDKVFRSSVLHSTQDLFLPFFSNVTWFHAIHVSGTNGTKRFDNPVLPFNDGVYFASTEKSNIIRGWIFGTTLDSKTQSLLIVNNATNVVIKVCEFQFCNDPFLGVYYHKNNKSWMESEFRVYSSANNCTFEYVSQPFLMDLEGKQGNFKNLREFVFKNIDGYFKIYSKHTPINLVRDLPQGFSALEPLVDLPIGINITRFQTLLALHRSYLTPGDSSSGWTAGAAAYYVGYLQPRTFLLKYNENGTITDAVDCALDPLSETKCTLKSFTVEKGIYQTSNFRVQPTESIVRFPNITNLCPFGEVFNATRFASVYAWNRKRISNCVADYSFLYNSASFSTFKCYGVSPTKLNDLCFTNVYADSFVIRGDEVRQIAPGQTGKIADYNYKLPDDFTGCVIAWNSNNLDSKVGGNYNYLYRLFRKSNLKPFERDISTEIYQAGSTPCNGVEGFNCYFPLQSYGFQPTNGVGYQPYRVVVLSFELLHAPATVCGPKKSTNLVKNKCVNFNFNGLTGTGVLTESNKKFLPFQQFGRDIADTTDAVRDPQTLEILDITPCSFGGVSVITPGTNTSNQVAVLYQDVNCTEVPVAIHADQLTPTWRVYSTGSNVFQTRAGCLIGAEHVNNSYECDIPIGAGICASYQTQTNSPRRARSVASQSIIAYTMSLGAENSVAYSNNSIAICTNFTISVTTEILPVSMTKTSVDCTMYICGDSTECSNLLLQYGSFCTQLNRALTGIAVEQDKNTQEVFAQVKQIYKTPPIKDFGGFNFSQILPDPSKPSKRSFIEDLLFNKVTLADAGFIKQYGDCLGDIAARDLICAQKFNGLTVLPPLLTDEMIAQYTSALLAGTITSGWTFGAGAALQIPFAMQMAYRFNGIGVTQNVLYENQKLIANQFNSAIGKIQDSLSSTASALGKLQDVVNQNAQALNTLVKQLSSNFGAISSVLNDILSRLDKVEAEVQIDRLITGRLQSLQTYVTQQLIRAAEIRASANLAATKMSECVLGQSKRVDFCGKGYHLMSFPQSAPHGVVFLHVTYVCAQEKNFTTAPAICHDGKAHFPREGVFVSNGTHWFVTQRNFYEPQIITTDNTFVSGNCDVVIGIVNNTVYDPLQPELDSGGGGSDIIKLLNEQVNKEMQSSNLYMSMSSWCYTHSLDGAGLFLFDHAAEEYEHAKKLIIFLNENNVPVQLTSISAPEHKFEGLTQIFQKAYEHEQHISESINNIVDHAIKSKDHATFNFLQWYVAEQHEEEVLFKDILDKIELIGNENHGLYLADQYVKGIAKSRKS

SEQ ID NO: 9125 - protein, 1315 aa, Artificial Sequence
  SARS-CoV-2/Australia/VIC01/2020__EPI_ISL_406844 spike protein (1-1147)(P715C_P1069C) Ferritin construct
MFVFLVLLPLVSSQCVNLTTRTQLPPAYTNSFTRGVYYPDKVFRSSVLHSTQDLFLPFFSNVTWFHAIHVSGTNGTKRFDNPVLPFNDGVYFASTEKSNIIRGWIFGTTLDSKTQSLLIVNNATNVVIKVCEFQFCNDPFLGVYYHKNNKSWMESEFRVYSSANNCTFEYVSQPFLMDLEGKQGNFKNLREFVFKNIDGYFKIYSKHTPINLVRDLPQGFSALEPLVDLPIGINITRFQTLLALHRRYLTPGDSSSGWTAGAAAYYVGYLQPRTFLLKYNENGTITDAVDCALDPLSETKCTLKSFTVEKGIYQTSNFRVQPTESIVRFPNITNLCPFGEVFNATRFASVYAWNRKRISNCVADYSVLYNSASFSTFKCYGVSPTKLNDLCFTNVYADSFVIRGDEVRQIAPGQTGKIADYNYKLPDDFTGCVIAWNSNNLDSKVGGNYNYLYRLFRKSNLKPFERDISTEIYQAGSTPCNGVEGFNCYFPLQSYGFQPTNGVGYQPYRVVVLSFELLHAPATVCGPKKSTNLVKNKCVNFNFNGLTGTGVLTESNKKFLPFQQFGRDIADTTDAVRDPQTLEILDITPCSFGGVSVITPGTNTSNQVAVLYQDVNCTEVPVAIHADQLTPTWRVYSTGSNVFQTRAGCLIGAEHVNNSYECDIPIGAGICASYQTQTNSPRRARSVASQSIIAYTMSLGAENSVAYSNNSIAICTNFTISVTTEILPVSMTKTSVDCTMYICGDSTECSNLLLQYGSFCTQLNRALTGIAVEQDKNTQEVFAQVKQIYKTPPIKDFGGFNFSQILPDPSKPSKRSFIEDLLFNKVTLADAGFIKQYGDCLGDIAARDLICAQKFNGLTVLPPLLTDEMIAQYTSALLAGTITSGWTFGAGAALQIPFAMQMAYRFNGIGVTQNVLYENQKLIANQFNSAIGKIQDSLSSTASALGKLQDVVNQNAQALNTLVKQLSSNFGAISSVLNDILSRLDKVEAEVQIDRLITGRLQSLQTYVTQQLIRAAEIRASANLAATKMSECVLGQSKRVDFCGKGYHLMSFPQSAPHGVVFLHVTYVCAQEKNFTTAPAICHDGKAHFPREGVFVSNGTHWFVTQRNFYEPQIITTDNTFVSGNCDVVIGIVNNTVYDPLQPELDSGGGGSDIIKLLNEQVNKEMQSSNLYMSMSSWCYTHSLDGAGLFLFDHAAEEYEHAKKLIIFLNENNVPVQLTSISAPEHKFEGLTQIFQKAYEHEQHISESINNIVDHAIKSKDHATFNFLQWYVAEQHEEEVLFKDILDKIELIGNENHGLYLADQYVKGIAKSRKS

SEQ ID NO: 9126 - protein, 1315 aa, Artificial Sequence
  SARS-CoV-2/Germany/BavPat1/2020__EPI_ISL_406862 spike protein (1-1147)(P715C_P1069C) Ferritin construct
MFVFLVLLPLVSSQCVNLTTRTQLPPAYTNSFTRGVYYPDKVFRSSVLHSTQDLFLPFFSNVTWFHAIHVSGTNGTKRFDNPVLPFNDGVYFASTEKSNIIRGWIFGTTLDSKTQSLLIVNNATNVVIKVCEFQFCNDPFLGVYYHKNNKSWMESEFRVYSSANNCTFEYVSQPFLMDLEGKQGNFKNLREFVFKNIDGYFKIYSKHTPINLVRDLPQGFSALEPLVDLPIGINITRFQTLLALHRSYLTPGDSSSGWTAGAAAYYVGYLQPRTFLLKYNENGTITDAVDCALDPLSETKCTLKSFTVEKGIYQTSNFRVQPTESIVRFPNITNLCPFGEVFNATRFASVYAWNRKRISNCVADYSVLYNSASFSTFKCYGVSPTKLNDLCFTNVYADSFVIRGDEVRQIAPGQTGKIADYNYKLPDDFTGCVIAWNSNNLDSKVGGNYNYLYRLFRKSNLKPFERDISTEIYQAGSTPCNGVEGFNCYFPLQSYGFQPTNGVGYQPYRVVVLSFELLHAPATVCGPKKSTNLVKNKCVNFNFNGLTGTGVLTESNKKFLPFQQFGRDIADTTDAVRDPQTLEILDITPCSFGGVSVITPGTNTSNQVAVLYQGVNCTEVPVAIHADQLTPTWRVYSTGSNVFQTRAGCLIGAEHVNNSYECDIPIGAGICASYQTQTNSPRRARSVASQSIIAYTMSLGAENSVAYSNNSIAICTNFTISVTTEILPVSMTKTSVDCTMYICGDSTECSNLLLQYGSFCTQLNRALTGIAVEQDKNTQEVFAQVKQIYKTPPIKDFGGFNFSQILPDPSKPSKRSFIEDLLFNKVTLADAGFIKQYGDCLGDIAARDLICAQKFNGLTVLPPLLTDEMIAQYTSALLAGTITSGWTFGAGAALQIPFAMQMAYRFNGIGVTQNVLYENQKLIANQFNSAIGKIQDSLSSTASALGKLQDVVNQNAQALNTLVKQLSSNFGAISSVLNDILSRLDKVEAEVQIDRLITGRLQSLQTYVTQQLIRAAEIRASANLAATKMSECVLGQSKRVDFCGKGYHLMSFPQSAPHGVVFLHVTYVCAQEKNFTTAPAICHDGKAHFPREGVFVSNGTHWFVTQRNFYEPQIITTDNTFVSGNCDVVIGIVNNTVYDPLQPELDSGGGGSDIIKLLNEQVNKEMQSSNLYMSMSSWCYTHSLDGAGLFLFDHAAEEYEHAKKLIIFLNENNVPVQLTSISAPEHKFEGLTQIFQKAYEHEQHISESINNIVDHAIKSKDHATFNFLQWYVAEQHEEEVLFKDILDKIELIGNENHGLYLADQYVKGIAKSRKS

SEQ ID NO: 9127 - protein, 1315 aa, Artificial Sequence
  SARS-CoV-2/Wuhan/HBCDC-HB-02/2020__EPI_ISL_412978 spike protein (1-1147)(P715C_P1069C) Ferritin construct
MFVFLVLLPLVSSQCVNLTTRTQLPPAYTNSFTRGVYYPDKVFRSSVLHSTQDLFLPFFSNVTWFHAIHVSGTNGTKRFDNPVLPFNDGVYFASTEKSNIIRGWIFGTTLDSKTQSLLIVNNATNVVIKVCEFQFCNDPFLGVYYHKNNKSWMESEFRVYSSANNCTFEYVSQPFLMDLEGKQGNFKNLREFVFKNIDGYFKIYSKHTPINLVRDLPQGFSALEPLVDLPIGINITRFQTLLALHRSYLTPGDSSSGWTAGAAAYYVGYLQPRTFLLKYNENGTITDAVDCALDPLSETKCTLKSFTVEKGIYQTSNFRVQPTESIVRFPNITNLCPFGEVFNATRFASVYAWNRKRISNCVADYSVLYNSASFSTFKCYGVSPTKLNDLCFTNVYADSFVIRGDEVRQIAPGQTGKIADYNYKLPDDFTGCVIAWNSNNLDSKVGGNYNYLYRLFRKSNLKPFERDISTEIYQAGSTPCNGVEGFNCYFPLQSYGFQPTNGVGYQPYRVVVLSFELLHAPATVCGPKKSTNLVKNKCVNFNFNGLTGTGVLTESNKKFLPFQQFGRDIADTTDAVRDPQTLEILDITPCSFGGVSVITPGTNTSNQVAVLYQDVNCTEVPVAIHADQLTPTWRVYSTGSNVFQTRAGCLIGAEHVNNSYECDIPIGAGICASYQTQTNSPRRARSVASQSIIAYTMSLGAENSVAYSNNSIAICTNFTISVTTEILPVSMTKTSVDCTMYICGDSTECSNFLLQYGSFCTQLNRALTGIAVEQDKNTQEVFAQVKQIYKTPPIKDFGGFNFSQILPDPSKPSKRSFIEDLLFNKVTLADAGFIKQYGDCLGDIAARDLICAQKFNGLTVLPPLLTDEMIAQYTSALLAGTITSGWTFGAGAALQIPFAMQMAYRFNGIGVTQNVLYENQKLIANQFNSAIGKIQDSLSSTASALGKLQDVVNQNAQALNTLVKQLSSNFGAISSVLNDILSRLDKVEAEVQIDRLITGRLQSLQTYVTQQLIRAAEIRASANLAATKMSECVLGQSKRVDFCGKGYHLMSFPQSAPHGVVFLHVTYVCAQEKNFTTAPAICHDGKAHFPREGVFVSNGTHWFVTQRNFYEPQIITTDNTFVSGNCDVVIGIVNNTVYDPLQPELDSGGGGSDIIKLLNEQVNKEMQSSNLYMSMSSWCYTHSLDGAGLFLFDHAAEEYEHAKKLIIFLNENNVPVQLTSISAPEHKFEGLTQIFQKAYEHEQHISESINNIVDHAIKSKDHATFNFLQWYVAEQHEEEVLFKDILDKIELIGNENHGLYLADQYVKGIAKSRKS

SEQ ID NO: 9128 - protein, 1315 aa, Artificial Sequence
  SARS-CoV-2/Australia/QLD02/2020__EPI_ISL_407896 spike protein (1-1147)(P715C_P1069C) Ferritin construct
MFVFLVLLPLVSSQCVNLTTRTQLPPAYTNSFTRGVYYPDKVFRSSVLHSTQDLFLPFFSNVTWFHAIHVSGTNGTKRFDNPVLPFNDGVYFASTEKSNIIRGWIFGTTLDSKTQSLLIVNNATNVVIKVCEFQFCNDPFLGVYYHKNNKSWMESEFRVYSSANNCTFEYVSQPFLMDLEGKQGNFKNLREFVFKNIDGYFKIYSKHTPINLVRDLPQGFSALEPLVDLPIGINITRFQTLLALHRSYLTPGDSSSGWTAGAAAYYVGYLQPRTFLLKYNENGTITDAVDCALDPLSETKCTLKSFTVEKGIYQTSNFRVQPTESIVRFPNITNLCPFGEVFNATRFASVYAWNRKRISNCVADYSVLYNSASFSTFKCYGVSPTKLNDLCFTNVYADSFVIRGDEVRQIAPGQTGKIADYNYKLPDDFTGCVIAWNSNNLDSKVGGNYNYLYRLFRKSNLKPFERDISTEIYQAGSTPCNGVEGFNCYFPLQSYGFQPTNGVGYQPYRVVVLSFELLHAPATVCGPKKSTNLVKNKCVNFNFNGLTGTGVLTESNKKFLPFQQFGRDIADTTDAVRDPQTLEILDITPCSFGGVSVITPGTNTSNQVAVLYQDVNCTEVPVAIHADQLTPTWRVYSTGSNVFQTRAGCLIGAEHVNNSYECDIPIGAGICASYQTQTNSPRRARSVASQSIIAYTMSLGAENSVAYSNNSIAICTNFTISVTTEILPVSMTKTSVDCTMYICGDSTECSNLLLQYGSFCTQLNRALTGIAVEQDKNTQEVFAQVKQIYKTPPIKDFGGFNFSQILPDPSKPSKRSFIEDLLFNKVTLADAGFIKQYGDCLGDIAARDLICAQKFNGLTVLPPLLTDEMIAQYTSALLAGTITSGWTFGAGAALQIPFAMQMAYRFNGIGVTQNVLYENQKLIANQFNSAIGKIQDSLSSTASALGKLQDVVNQNAQALNTLVKQLSSNFGAISSVLNDILSRLDKVEAEVQIDRLITGRLQSLQTYVTQQLIRAAEIRASANLAATKMSECVLGQSKRVDFCGKGYHLMSFPQSAPHGVVFLHVTYVCAQEKNFTTAPAICHDGKAHFPREGVFVSNGTHWFVTQRNFYEPQIITTDNTFVSGNCDVVIGIVNNTVYDPLQLELDSGGGGSDIIKLLNEQVNKEMQSSNLYMSMSSWCYTHSLDGAGLFLFDHAAEEYEHAKKLIIFLNENNVPVQLTSISAPEHKFEGLTQIFQKAYEHEQHISESINNIVDHAIKSKDHATFNFLQWYVAEQHEEEVLFKDILDKIELIGNENHGLYLADQYVKGIAKSRKS

SEQ ID NO: 9129 - protein, 1315 aa, Artificial Sequence
  SARS-CoV-2/India/1-31/2020__EPI_ISL_413523 spike protein (1-1147)(P715C_P1069C) Ferritin construct
MFVFLVLLPLVSSQCVNLTTRTQLPPAYTNSFTRGVYYPDKVFRSSVLHSTQDLFLPFFSNVTWFHAIHVSGTNGTKRFDNPVLPFNDGVYFASTEKSNIIRGWIFGTTLDSKTQSLLIVNNATNVVIKVCEFQFCNDPFLGVYYHKNNKSWMESEFRVYSSANNCTFEYVSQPFLMDLEGKQGNFKNLREFVFKNIDGYFKIYSKHTPINLVRDLPQGFSALEPLVDLPIGINITRFQTLLALHRSYLTPGDSSSGWTAGAAAYYVGYLQPRTFLLKYNENGTITDAVDCALDPLSETKCTLKSFTVEKGIYQTSNFRVQPTESIVRFPNITNLCPFGEVFNATRFASVYAWNRKRISNCVADYSVLYNSASFSTFKCYGVSPTKLNDLCFTNVYADSFVIRGDEVRQIAPGQTGKIADYNYKLPDDFTGCVIAWNSNNLDSKVGGNYNYLYRLFRKSNLKPFERDISTEIYQAGSTPCNGVEGFNCYFPLQSYGFQPTNGVGYQPYRVVVLSFELLHAPATVCGPKKSTNLVKNKCVNFNFNGLTGTGVLTESNKKFLPFQQFGRDIADTTDAVRDPQTLEILDITPCSFGGVSVITPGTNTSNQVAVLYQDVNCTEVPVAIHADQLTPTWRVYSTGSNVFQTRAGCLIGAEHVNNSYECDIPIGAGICASYQTQTNSPRRARSVASQSIIAYTMSLGAENSVAYSNNSIAICTNFTISVTTEILPVSMTKTSVDCTMYICGDSTECSNLLLQYGSFCTQLNRALTGIAVEQDKNTQEVFAQVKQIYKTPPIKDFGGFNFSQILPDPSKPSKRSFIEDLLFNKVTLADAGFIKQYGDCLGDIAARDLICAQKFNGLTVLPPLLTDEMIAQYTSALLAGTITSGWTFGAGAALQIPFAMQMAYRFNGIGVTQNVLYENQKLIANQFNSVIGKIQDSLSSTASALGKLQDVVNQNAQALNTLVKQLSSNFGAISSVLNDILSRLDKVEAEVQIDRLITGRLQSLQTYVTQQLIRAAEIRASANLAATKMSECVLGQSKRVDFCGKGYHLMSFPQSAPHGVVFLHVTYVCAQEKNFTTAPAICHDGKAHFPREGVFVSNGTHWFVTQRNFYEPQIITTDNTFVSGNCDVVIGIVNNTVYDPLQPELDSGGGGSDIIKLLNEQVNKEMQSSNLYMSMSSWCYTHSLDGAGLFLFDHAAEEYEHAKKLIIFLNENNVPVQLTSISAPEHKFEGLTQIFQKAYEHEQHISESINNIVDHAIKSKDHATFNFLQWYVAEQHEEEVLFKDILDKIELIGNENHGLYLADQYVKGIAKSRKS

SEQ ID NO: 9130 - protein, 1315 aa, Artificial Sequence
  SARS-CoV-2/Guangdong/GD2020087-P0008/2020__EPI_ISL_413863 spike protein (1-1147)(P715C_P1069C) Ferritin construct
MFVFLVLLPLVSSQCVNLTTRTQLPPAYTNSFTRGVYYPDKVFRSSVLHSTQDLFLPFFSNVTWFHAIHVSGTNGTKRFDNPVLPFNDGVYFASTEKSNIIRGWIFGTTLDSKTQSLLIVNNATNVVIKVCEFQFCNDPFLGVYYHKNNKSWMESEFRVYSSANNCTFEYVSQPFLMDLEGKQGNFKNLREFVFKNIDGYFKIYSKHTPINLVRDLPQGFSALEPLVDLPIGINITRFQTLLALHRSYLTPGDSSSGWTAGAAAYYVGYLQPRTFLLKYNENGTITDAVDCALDPLSETKCTLKSFTVEKGIYQTSNFRVQPTESIVRFPNITNLCPFGEVFNATRFASVYAWNRKRISNCVADYSVLYNSASFSTFKCYGVSPTKLNDLCFTNVYADSFVIRGDEVREIAPGQTGKIADYNYKLPDDFTGCVIAWNSNNLDSKVGGNYNYLYRLFRKSNLKPFERDISTEIYQAGSTPCNGVEGFNCYFPLQSYGFQPTNGVGYQPYRVVVLSFELLHAPATVCGPKKSTNLVKNKCVNFNFNGLTGTGVLTESNKKFLPFQQFGRDIADTTDAVRDPQTLEILDITPCSFGGVSVITPGTNTSNQVAVLYQDVNCTEVPVAIHADQLTPTWRVYSTGSNVFQTRAGCLIGAEHVNNSYECDIPIGAGICASYQTQTNSPRRARSVASQSIIAYTMSLGAENSVAYSNNSIAICTNFTISVTTEILPVSMTKTSVDCTMYICGDSTECSNLLLQYGSFCTQLNRALTGIAVEQDKNTQEVFAQVKQIYKTPPIKDFGGFNFSQILPDPSKPSKRSFIEDLLFNKVTLADAGFIKQYGDCLGDIAARDLICAQKFNGLTVLPPLLTDEMIAQYTSALLAGTITSGWTFGAGAALQIPFAMQMAYRFNGIGVTQNVLYENQKLIANQFNSAIGKIQDSLSSTASALGKLQDVVNQNAQALNTLVKQLSSNFGAISSVLNDILSRLDKVEAEVQIDRLITGRLQSLQTYVTQQLIRAAEIRASANLAATKMSECVLGQSKRVDFCGKGYHLMSFPQSAPHGVVFLHVTYVCAQEKNFTTAPAICHDGKAHFPREGVFVSNGTHWFVTQRNFYEPQIITTDNTFVSGNCDVVIGIVNNTVYDPLQPELDSGGGGSDIIKLLNEQVNKEMQSSNLYMSMSSWCYTHSLDGAGLFLFDHAAEEYEHAKKLIIFLNENNVPVQLTSISAPEHKFEGLTQIFQKAYEHEQHISESINNIVDHAIKSKDHATFNFLQWYVAEQHEEEVLFKDILDKIELIGNENHGLYLADQYVKGIAKSRKS

SEQ ID NO: 9131 - protein, 1315 aa, Artificial Sequence
  SARS-CoV-2/Sweden/01/2020__EPI_ISL_411951 spike protein (1-1147)(P715C_P1069C) Ferritin construct
MFVFLVLLPLVSSQCVNLTTRTQLPPAYTNSFTRGVYYPDKVFRSSVLHSTQDLFLPFFSNVTWFHAIHVSGTNGTKRFDNPVLPFNDGVYFASTEKSNIIRGWIFGTTLDSKTQSLLIVNNATNVVIKVCEFQFCNDPFLGVYYHKNNKSWMESEFRVYSSANNCTFEYVSQPFLMDLEGKQGNFKNLREFVFKNIDGYFKIYSKHTPINLVRDLPQGFSALEPLVDLPIGINITRFQTLLALHRSYLTPGDSSSGWTAGAAAYYVGYLQPRTFLLKYNENGTITDAVDCALDPLSETKCTLKSFTVEKGIYQTSNFRVQPTESIVRFPNITNLCPFGEVFNATRFASVYAWNRKRISNCVADYSVLYNSASFSTFKCYGVSPTKLNDLCFTNVYADSFVIRGDEVRQIAPGQTGKIADYNYKLPDDFTGCVIAWNSNNLDSKVGGNYNYLYRLFRKSNLKPFERDISTEIYQAGSTPCNGVEGFNCYFPLQSYGFQPTNGVGYQPYRVVVLSFELLHAPATVCGPKKSTNLVKNKCVNFNFNGLTGTGVLTESNKKFLPFQQFGRDIADTTDAVRDPQTLEILDITPCSFGGVSVITPGTNTSNQVAVLYQDVNCTEVPVAIHADQLTPTWRVYSTGSNVFQTRAGCLIGAEHVNNSYECDIPIGAGICASYQTQTNSPRRARSVASQSIIAYTMSLGAENSVAYSNNSIAICTNFTISVTTEILPVSMTKTSVDCTMYICGDSTECSNLLLQYGSFCTQLNRALTGIAVEQDKNTQEVFAQVKQIYKTPPIKDCGGFNFSQILPDPSKPSKRSFIEDLLFNKVTLADAGFIKQYGDCLGDIAARDLICAQKFNGLTVLPPLLTDEMIAQYTSALLAGTITSGWTFGAGAALQIPFAMQMAYRFNGIGVTQNVLYENQKLIANQFNSAIGKIQDSLSSTASALGKLQDVVNQNAQALNTLVKQLSSNFGAISSVLNDILSRLDKVEAEVQIDRLITGRLQSLQTYVTQQLIRAAEIRASANLAATKMSECVLGQSKRVDFCGKGYHLMSFPQSAPHGVVFLHVTYVCAQEKNFTTAPAICHDGKAHFPREGVFVSNGTHWFVTQRNFYEPQIITTDNTFVSGNCDVVIGIVNNTVYDPLQPELDSGGGGSDIIKLLNEQVNKEMQSSNLYMSMSSWCYTHSLDGAGLFLFDHAAEEYEHAKKLIIFLNENNVPVQLTSISAPEHKFEGLTQIFQKAYEHEQHISESINNIVDHAIKSKDHATFNFLQWYVAEQHEEEVLFKDILDKIELIGNENHGLYLADQYVKGIAKSRKS

SEQ ID NO: 9132 - protein, 1315 aa, Artificial Sequence
  SARS-CoV-2/Tianmen/HBCDC-HB-07/2020__EPI_ISL_412983 spike protein (1-1147)(P715C_P1069C) Ferritin construct
MFVFLVLLPLVSSQCVNLTTRTQLPPAYTNSFTRGVYYPDKVFRSSVLHSTQDLFLPFFSNVTWFHAIHVSGTNGTKRFDNPVLPFNDGVYFASTEKSNIIRGWIFGTTLDSKTQSLLIVNNATNVVIKVCEFQFCNDPFLGVYYHKNNKSWMESEFRVYSSANNCTFEYVSQPFLMDLEGKQGNFKNLREFVFKNIDGYFKIYSKHTPINLVRDLPQGFSALEPLVDLPIGINITRFQTLLALHRSYLTPGDSSSGWTAGAAAYYVGYLQPRTFLLKYNENGTITDAVDCALDPLSETKCTLKSFTVEKGIYQTSNFRVQPTESIVRFPNITNLCPFGEVFNATRFASVYAWNRKRISNCVADYSVLYNSASFSTFKCYGVSPTKLNDLCFTNVYADSFVIRGDEVRQIAPGQTGKIADYNYKLPDDFTGCVIAWNSNNLDSKVGGNYNYLYRLFRKSNLKPFERDISTEIYQAGSTPCNGVEGFNCYFPLQSYGFQPTNGVGYQPYRVVVLSFELLHAPATVCGPKKSTNLVKNKCVNFNFNGLTGTGVLTESNKKFLPFQQFGRDIADTTDAVRDPQTLEILDITPCSFGGVSVITPGTNTSNQVAVLYQDLNCTEVPVAIHADQLTPTWRVYSTGSNVFQTRAGCLIGAEHVNNSYECDIPIGAGICASYQTQTNSPRRARSVASQSIIAYTMSLGAENSVAYSNNSIAICTNFTISVTTEILPVSMTKTSVDCTMYICGDSTECSNLLLQYGSFCTQLNRALTGIAVEQDKNTQEVFAQVKQIYKTPPIKDFGGFNFSQILPDPSKPSKRSFIEDLLFNKVTLADAGFIKQYGDCLGDIAARDLICAQKFNGLTVLPPLLTDEMIAQYTSALLAGTITSGWTFGAGAALQIPFAMQMAYRFNGIGVTQNVLYENQKLIANQFNSAIGKIQDSLSSTASALGKLQDVVNQNAQALNTLVKQLSSNFGAISSVLNDILSRLDKVEAEVQIDRLITGRLQSLQTYVTQQLIRAAEIRASANLAATKMSECVLGQSKRVDFCGKGYHLMSFPQSAPHGVVFLHVTYVCAQEKNFTTAPAICHDGKAHFPREGVFVSNGTHWFVTQRNFYEPQIITTDNTFVSGNCDVVIGIVNNTVYDPLQPELDSGGGGSDIIKLLNEQVNKEMQSSNLYMSMSSWCYTHSLDGAGLFLFDHAAEEYEHAKKLIIFLNENNVPVQLTSISAPEHKFEGLTQIFQKAYEHEQHISESINNIVDHAIKSKDHATFNFLQWYVAEQHEEEVLFKDILDKIELIGNENHGLYLADQYVKGIAKSRKS

SEQ ID NO: 9133 - protein, 1315 aa, Artificial Sequence
  SARS-CoV-2/Hong Kong/case42_VM20002493/2020__EPI_ISL_414527 spike protein (1-1147)(P715C_P1069C) Ferritin construct
MFVFLVLLPLVSSQCVNLTTRTQLPPAYTNSFTRGVYYPDKVFRSSVLHSTQDLFLPFFSNVTWFHAIHVSGTNGTKRFDNPVLPFNDGVYFASTEKSNIIRGWIFGTTLDSKTQSLLIVNNATNVVIKVCEFQFCNDPFLGVYYHKNNKSWMESEFRVYSSANNCTFEYVSQPFLMDLEGKQGNFKNLREFVFKNIDGYFKIYSKHTPINLVRDLPQGFSALEPLVDLPIGINITRFQTLLALHRSYLTPGDSSSGWTAGAAAYYVGYLQPRTFLLKYNENGTITDAVDCALDPLSETKCTLKSFTVEKGIYQTSNFRVQPTESIVRFPNITNLCPFGEVFNATRFASVYAWNRKRISNCVADYSVLYNSASFSTFKCYGVSPTKLNDLCFTNVYADSFVIRGDEVRQIAPGQTGKIADYNYKLPDDFTGCVIAWNSNNLDSKVGGNYNYLYRLFRKSNLKPFERDISTEIYQAGSTPCNGVEGFNCYFPLQSYGFQPTNGVGYQPYRVVVLSFELLHAPATVCGPKKSTNLVKNKCVNFNFNGLTGTGVLTESNKKFLPFQQFGRDIADTTDAVRDPQTLEILDITPCSFGGVSVITPGTNTSNQVAVLYQDVNCTEVPVAIHADQLTPTWRVYSTGSNVFQTRAGCLIGAEHVNNSYECDIPIGAGICASYQTQTNSPRRARSVASQSIIAYTMSLGAENSVAYSNNSIAICTNFAISVTTEILPVSMTKTSVDCTMYICGDSTECSNLLLQYGSFCTQLNRALTGIAVEQDKNTQEVFAQVKQIYKTPPIKDFGGFNFSQILPDPSKPSKRSFIEDLLFNKVTLADAGFIKQYGDCLGDIAARDLICAQKFNGLTVLPPLLTDEMIAQYTSALLAGTITSGWTFGAGAALQIPFAMQMAYRFNGIGVTQNVLYENQKLIANQFNSAIGKIQDSLSSTASALGKLQDVVNQNAQALNTLVKQLSSNFGAISSVLNDILSRLDKVEAEVQIDRLITGRLQSLQTYVTQQLIRAAEIRASANLAATKMSECVLGQSKRVDFCGKGYHLMSFPQSAPHGVVFLHVTYVCAQEKNFTTAPAICHDGKAHFPREGVFVSNGTHWFVTQRNFYEPQIITTDNTFVSGNCDVVIGIVNNTVYDPLQPELDSGGGGSDIIKLLNEQVNKEMQSSNLYMSMSSWCYTHSLDGAGLFLFDHAAEEYEHAKKLIIFLNENNVPVQLTSISAPEHKFEGLTQIFQKAYEHEQHISESINNIVDHAIKSKDHATFNFLQWYVAEQHEEEVLFKDILDKIELIGNENHGLYLADQYVKGIAKSRKS

SEQ ID NO: 9134 - protein, 1315 aa, Artificial Sequence
  SARS-CoV-2/USA/CruiseA-23/2020__EPI_ISL_414482 spike protein (1-1147)(P715C_P1069C) Ferritin construct
MFVFLVLLPLVSSQCVNLTTRTQLPPAYTNSFTRGVYYPDKVFRSSVLHSTQDLFLPFFSNVTWFHAIHVSGTNGTKRFDNPVLPFNDGVYFASTEKSNIIRGWIFGTTLDSKTQSLLIVNNATNVVIKVCEFQFCNDPFLGVYYHKNNKSWMESEFRVYSSANNCTFEYVSQPFLMDLEVKQGNFKNLREFVFKNIDGYFKIYSKHTPINLVRDLPQGFSALEPLVDLPIGINITRFQTLLALHRSYLTPGDSSSGWTAGAAAYYVGYLQPRTFLLKYNENGTITDAVDCALDPLSETKCTLKSFTVEKGIYQTSNFRVQPTESIVRFPNITNLCPFGEVFNATRFASVYAWNRKRISNCVADYSVLYNSASFSTFKCYGVSPTKLNDLCFTNVYADSFVIRGDEVRQIAPGQTGKIADYNYKLPDDFTGCVIAWNSNNLDSKVGGNYNYLYRLFRKSNLKPFERDISTEIYQAGSTPCNGVEGFNCYFPLQSYGFQPTNGVGYQPYRVVVLSFELLHAPATVCGPKKSTNLVKNKCVNFNFNGLTGTGVLTESNKKFLPFQQFGRDIADTTDAVRDPQTLEILDITPCSFGGVSVITPGTNTSNQVAVLYQDVNCTEVPVAIHADQLTPTWRVYSTGSNVFQTRAGCLIGAEHVNNSYECDIPIGAGICASYQTQTNSPRRARSVASQSIIAYTMSLGAENSVAYSNNSIAICTNFTISVTTEILPVSMTKTSVDCTMYICGDSTECSNLLLQYGSFCTQLNRALTGIAVEQDKNTQEVFAQVKQIYKTPPIKDFGGFNFSQILPDPSKPSKRSFIEDLLFNKVTLADAGFIKQYGDCLGDIAARDLICAQKFNGLTVLPPLLTDEMIAQYTSALLAGTITSGWTFGAGAALQIPFAMQMAYRFNGIGVTQNVLYENQKLIANQFNSAIGKIQDSLSSTASALGKLQDVVNQNAQALNTLVKQLSSNFGAISSVLNDILSRLDKVEAEVQIDRLITGRLQSLQTYVTQQLIRAAEIRASANLAATKMSECVLGQSKRVDFCGKGYHLMSFPQSAPHGVVFLHVTYVCAQEKNFTTAPAICHDGKAHFPREGVFVSNGTHWFVTQRNFYEPQIITTDNTFVSGNCDVVIGIVNNTVYDPLQPELDSGGGGSDIIKLLNEQVNKEMQSSNLYMSMSSWCYTHSLDGAGLFLFDHAAEEYEHAKKLIIFLNENNVPVQLTSISAPEHKFEGLTQIFQKAYEHEQHISESINNIVDHAIKSKDHATFNFLQWYVAEQHEEEVLFKDILDKIELIGNENHGLYLADQYVKGIAKSRKS

SEQ ID NO: 9135 - protein, 1315 aa, Artificial Sequence
  SARS-CoV-2/Hong Kong/case85_VM20002868/2020__EPI_ISL_414519 spike protein (1-1147)(P715C_P1069C) Ferritin construct
MFVFLVLVPLVSSQCVNLTTRTQLPPAYTNSFTRGVYYPDKVFRSSVLHSTQDLFLPFFSNVTWFHAIHVSGTNGTKRFDNPVLPFNDGVYFASTEKSNIIRGWIFGTTLDSKTQSLLIVNNATNVVIKVCEFQFCNDPFLGVYYHKNNKSWMESEFRVYSSANNCTFEYVSQPFLMDLEGKQGNFKNLREFVFKNIDGYFKIYSKHTPINLVRDLPQGFSALEPLVDLPIGINITRFQTLLALHRSYLTPGDSSSGWTAGAAAYYVGYLQPRTFLLKYNENGTITDAVDCALDPLSETKCTLKSFTVEKGIYQTSNFRVQPTESIVRFPNITNLCPFGEVFNATRFASVYAWNRKRISNCVADYSVLYNSASFSTFKCYGVSPTKLNDLCFTNVYADSFVIRGDEVRQIAPGQTGKIADYNYKLPDDFTGCVIAWNSNNLDSKVGGNYNYLYRLFRKSNLKPFERDISTEIYQAGSTPCNGVEGFNCYFPLQSYGFQPTNGVGYQPYRVVVLSFELLHAPATVCGPKKSTNLVKNKCVNFNFNGLTGTGVLTESNKKFLPFQQFGRDIADTTDAVRDPQTLEILDITPCSFGGVSVITPGTNTSNQVAVLYQDVNCTEVPVAIHADQLTPTWRVYSTGSNVFQTRAGCLIGAEHVNNSYECDIPIGAGICASYQTQTNSPRRARSVASQSIIAYTMSLGAENSVAYSNNSIAICTNFTISVTTEILPVSMTKTSVDCTMYICGDSTECSNLLLQYGSFCTQLNRALTGIAVEQDKNTQEVFAQVKQIYKTPPIKDFGGFNFSQILPDPSKPSKRSFIEDLLFNKVTLADAGFIKQYGDCLGDIAARDLICAQKFNGLTVLPPLLTDEMIAQYTSALLAGTITSGWTFGAGAALQIPFAMQMAYRFNGIGVTQNVLYENQKLIANQFNSAIGKIQDSLSSTASALGKLQDVVNQNAQALNTLVKQLSSNFGAISSVLNDILSRLDKVEAEVQIDRLITGRLQSLQTYVTQQLIRAAEIRASANLAATKMSECVLGQSKRVDFCGKGYHLMSFPQSAPHGVVFLHVTYVCAQEKNFTTAPAICHDGKAHFPREGVFVSNGTHWFVTQRNFYEPQIITTDNTFVSGNCDVVIGIVNNTVYDPLQPELDSGGGGSDIIKLLNEQVNKEMQSSNLYMSMSSWCYTHSLDGAGLFLFDHAAEEYEHAKKLIIFLNENNVPVQLTSISAPEHKFEGLTQIFQKAYEHEQHISESINNIVDHAIKSKDHATFNFLQWYVAEQHEEEVLFKDILDKIELIGNENHGLYLADQYVKGIAKSRKS

SEQ ID NO: 9136 - protein, 1315 aa, Artificial Sequence; identical to SEQ ID NO: 9126
  SARS-CoV-2/England/200990660/2020__EPI_ISL_414523 spike protein (1-1147)(P715C_P1069C) Ferritin construct

SEQ ID NO: 9137 - protein, 1315 aa, Artificial Sequence
  SARS-CoV-2/Australia/NSW09/2020__EPI_ISL_413595 spike protein (1-1147)(P715C_P1069C) Ferritin construct
MFVFLVLLPLVSSQCVNLTTRTQLPPAYTNSFTRGVYYPDKVFRSSVLHSTQDLFLPFFSNVTWFHAIHVSGTNGTKRFDNPVLPFNDGVYFASTEKSNIIRGWIFGTTLDSKTQSLLIVNNATNVVIKVCEFQFCNDPFLGVYYHKNNKSWMESEFRVYSSANNCTFEYVSQPFLMDLEGKQGNFKNLREFVFKNIDGYFKIYSKHTPINLVRDLPQGFSALEPLVDLPIGINITRFQTLLALHRSYLTPGDSSSGWTAGAAAYYVGYLQPRTFLLKYNENGTITDAVDCALDPLSETKCTLKSFTVEKGIYQTSNFRVQPTESIVRFPNITNLCPFGEVFNATRFASVYAWNRKRISNCVADYSVLYNSASFSTFKCYGVSPTKLNDLCFTNVYADSFVIRGDEVRQIAPGQTGKIADYNYKLPDDFTGCVIAWNSNNLDSKVGGNYNYLYRLFRKSNLKPFERDISTEIYQAGSTPCNGVEGFNCYFPLQSYGFQPTNGVGYQPYRVVVLSFELLHAPATVCGPKKSTNLVKNKCVNFNFNGLTGTGVLTESNKKFLPFQQFGRDIADTTDAVRDPQTLEILDITPCSFGGVSVITPGTNTSNQVAVLYQDVNCTEVPVAIHADQLTPTWRVYSTGSNVFQTRAGCLIGAEHVNNSYECDIPIGAGICASYQTQTNSPRRARSVASQSIIAYTMSLGAENSVAYSNNSIAICTNFTISVTTEILPVSMTKTSVDCTMYICGDSTECSNLLLQYGSFCTQLNRALTGIAVEQDKNTQEVFAQVKQIYKTPPIKDFGGFNFSQILPDPSKPSKRSFIEDLLFNKVTLADAGFIKQYGDCLGDIAARDLICAQKFNGLTVLPPLLTDEMIAQYTSALLAGTITSGWTFGAGAALQIPFAMQMAYRFNGIGVTQNVLYENQKLIANQFNSAIGKIQDSLSFTASALGKLQDVVNQNAQALNTLVKQLSSNFGAISSVLNDILSRLDKVEAEVQIDRLITGRLQSLQTYVTQQLIRAAEIRASANLAATKMSECVLGQSKRVDFCGKGYHLMSFPQSAPHGVVFLHVTYVCAQEKNFTTAPAICHDGKAHFPREGVFVSNGTHWFVTQRNFYEPQIITTDNTFVSGNCDVVIGIVNNTVYDPLQPELDSGGGGSDIIKLLNEQVNKEMQSSNLYMSMSSWCYTHSLDGAGLFLFDHAAEEYEHAKKLIIFLNENNVPVQLTSISAPEHKFEGLTQIFQKAYEHEQHISESINNIVDHAIKSKDHATFNFLQWYVAEQHEEEVLFKDILDKIELIGNENHGLYLADQYVKGIAKSRKS

SEQ ID NO: 9138 - protein, 1315 aa, Artificial Sequence; identical to SEQ ID NO: 9118
  SARS-CoV-2/Australia/NSW10/2020__EPI_ISL_413596 spike protein (1-1147)(P715C_P1069C) Ferritin construct

SEQ ID NO: 9139 - protein, 1315 aa, Artificial Sequence
  SARS-CoV-2/Switzerland/1000477797/2020__EPI_ISL_413023 spike protein (1-1147)(P715C_P1069C) Ferritin construct
MFVFLVLLPLVSSQCVNLTTRTQLPPAYTNSFTRGVYYPDKVFRSSVLHSTQDLFLPFFSNVTWFHAIHVSGTNGTKRFDNPVLPFNDGVYFASTEKSNIIRGWIFGTTLDSKTQSLLIVNNATNVVIKVCEFQFCNDPFLGVYYHKNNKSWMESEFRVYSSANNCTFEYVSQPFLMDLEGKQGNFKNLREFVFKNIDGYFNIYSKHTPINLVRDLPQGFSALEPLVDLPIGINITRFQTLLALHRSYLTPGDSSSGWTAGAAAYYVGYLQPRTFLLKYNENGTITDAVDCALDPLSETKCTLKSFTVEKGIYQTSNFRVQPTESIVRFPNITNLCPFGEVFNATRFASVYAWNRKRISNCVADYSVLYNSASFSTFKCYGVSPTKLNDLCFTNVYADSFVIRGDEVRQIAPGQTGKIADYNYKLPDDFTGCVIAWNSNNLDSKVGGNYNYLYRLFRKSNLKPFERDISTEIYQAGSTPCNGVEGFNCYFPLQSYGFQPTNGVGYQPYRVVVLSFELLHAPATVCGPKKSTNLVKNKCVNFNFNGLTGTGVLTESNKKFLPFQQFGRDIADTTDAVRDPQTLEILDITPCSFGGVSVITPGTNTSNQVAVLYQGVNCTEVPVAIHADQLTPTWRVYSTGSNVFQTRAGCLIGAEHVNNSYECDIPIGAGICASYQTQTNSPRRARSVASQSIIAYTMSLGAENSVAYSNNSIAICTNFTISVTTEILPVSMTKTSVDCTMYICGDSTECSNLLLQYGSFCTQLNRALTGIAVEQDKNTQEVFAQVKQIYKTPPIKDFGGFNFSQILPDPSKPSKRSFIEDLLFNKVTLADAGFIKQYGDCLGDIAARDLICAQKFNGLTVLPPLLTDEMIAQYTSALLAGTITSGWTFGAGAALQIPFAMQMAYRFNGIGVTQNVLYENQKLIANQFNSAIGKIQDSLSSTASALGKLQDVVNQNAQALNTLVKQLSSNFGAISSVLNDILSRLDKVEAEVQIDRLITGRLQSLQTYVTQQLIRAAEIRASANLAATKMSECVLGQSKRVDFCGKGYHLMSFPQSAPHGVVFLHVTYVCAQEKNFTTAPAICHDGKAHFPREGVFVSNGTHWFVTQRNFYEPQIITTDNTFVSGNCDVVIGIVNNTVYDPLQPELDSGGGGSDIIKLLNEQVNKEMQSSNLYMSMSSWCYTHSLDGAGLFLFDHAAEEYEHAKKLIIFLNENNVPVQLTSISAPEHKFEGLTQIFQKAYEHEQHISESINNIVDHAIKSKDHATFNFLQWYVAEQHEEEVLFKDILDKIELIGNENHGLYLADQYVKGIAKSRKS

SEQ ID NO: 9140 - protein, 1315 aa, Artificial Sequence
  SARS-CoV-2/Belgium/BA-02291/2020__EPI_ISL_415159 spike protein (1-1147)(P715C_P1069C) Ferritin construct
MFVFLVLLPLVSSQCVNLTTRTQLPPAYTNSFTRGVYYPDKVFRSSVLHSTQDLFLPFFSNVTWFHAIHVSGTNGTKRFDNPVLPFNDGVYFASTEKSNIIRGWIFGTTLDSKTQSLLIVNNATNVVIKVCEFQFCNDPFLGVYYHKNNKSWMESEFRVYSSANNCTFEYVSQPFLMDLEGKQGNFKNLREFVFKNIDGYFKIYSKHTPINLVRDLPQGFSALEPLVDLPIGINITRFQTLLALHRSYLTPGDSSSGWTAGAAAYYVGYLQPRTFLLKYNENGTITDAVDCALDPLSETKCTLKSFTVEKGIYQTSNFRVQPTESIVRFPNITNLCPFGEVFNATRFASVYAWNRKRISNCVADYSVLYNSASFSTFKCYGVSPTKLNDLCFTNVYADSFVIRGDEVRQIAPGQTGKIADYNYKLPDDFTGCVIAWNSNNLDSKVGGNYNYLYRLFRRSNLKPFERDISTEIYQAGSTPCNGVEGFNCYFPLQSYGFQPTNGVGYQPYRVVVLSFELLPAPATVCGPKKSTNLVKNKCVNFNFNGLTGTGVLTESNKKFLPFQQFGRDIADTTDAVRDPQTLEILDITPCSFGGVSVITPGTNTSNQVAVLYQGVNCTEVPVAIHADQLTPTWRVYSTGSNVFQTRAGCLIGAEHVNNSYECDIPIGAGICASYQTQTNSPRRARSVASQSIIAYTMSLGAENSVAYSNNSIAICTNFTISVTTEILPVSMTKTSVDCTMYICGDSTECSNLLLQYGSFCTQLNRALTGIAVEQDKNTQEVFAQVKQIYKTPPIKDFGGFNFSQILPDPSKPSKRSFIEDLLFNKVTLADAGFIKQYGDCLGDIAARDLICAQKFNGLTVLPPLLTDEMIAQYTSALLAGTITSGWTFGAGAALQIPFAMQMAYRFNGIGVTQNVLYENQKLIANQFNSAIGKIQDSLSSAAPALGKLQDVVNQNAQALNTLVKQLSSNFGAISSVLNDILSRLDKVEAEVQIDRLITGRLQSLQTYVTQQLIRAAEIRASANLAATKMSECVLGQSKRVDFCGKGYHLMSFPQSAPHGVVFLHVTYVCAQEKNFTTAPAICHDGKAHFPREGVFVSNGTHWFVTQRNFYEPQIITTDNTFVSGNCDVVIGIVNNTVYDPLQPELDSGGGGSDIIKLLNEQVNKEMQSSNLYMSMSSWCYTHSLDGAGLFLFDHAAEEYEHAKKLIIFLNENNVPVQLTSISAPEHKFEGLTQIFQKAYEHEQHISESINNIVDHAIKSKDHATFNFLQWYVAEQHEEEVLFKDILDKIELIGNENHGLYLADQYVKGIAKSRKS

SEQ ID NO: 9141 - protein, 1315 aa, Artificial Sequence
  SARS-CoV-2/USA/WA8-UW5/2020__EPI_ISL_413486 spike protein (1-1147)(P715C_P1069C) Ferritin construct
MFVFLVLLPLVSSQCVNLTTRTQLPPAYTNSFTRGVYYPDKVFRSSVLHSTQDLFLPFFSNVTWFHAIHVSGTNGTKRFDNPVLPFNDGVYFASTEKSNIIRGWIFGTTLDSKTQSLLIVNNATNVVIKVCEFQFCNDPFLGVYYHKNNKSWMESEFRVYSSANNCTFEYVSQPFLMDLEGKQGNFKNLREFVFKNIDGYFKIYSKHTPINLVRDLPQGFSALEPLVDLPIGINITRFQTLLALHRSYLTPGDSSSGWTAGAAAYYVGYLQPRTFLLKYNENGTITDAVDCALDPLSETKCTLKSFTVEKGIYQTSNFRVQPTESIVRFPNITNLCPFGEVFNATRFASVYAWNRKRISNCVADYSVLYNSASFSTFKCYGVSPTKLNDLCFTNVYADSFVIRGDEVRQIAPGQTGKIADYNYKLPDDFTGCVIAWNSNNLDSKVGGNYNYLYRLFRKSNLKPFERDISTEIYQAGSTPCNGVEGFNCYFPLQSYGFQPTNGVGYQPYRVVVLSFELLHAPATVCGPKKSTNLVKNKCVNFNFNGLTGTGVLTESNKKFLPFQQFGRDIADTTDAVRDPQTLEILDITPCSFGGVSVITPGTNTSNQVAVLYQDVNCTEVPVAIHADQLTPTWRVYSTGSNVFQTRAGCLIGAEYVNNSYECDIPIGAGICASYQTQTNSPRRARSVASQSIIAYTMSLGAENSVAYSNNSIAICTNFTISVTTEILPVSMTKTSVDCTMYICGDSTECSNLLLQYGSFCTQLNRALTGIAVEQDKNTQEVFAQVKQIYKTPPIKDFGGFNFSQILPDPSKPSKRSFIEDLLFNKVTLADAGFIKQYGDCLGDIAARDLICAQKFNGLTVLPPLLTDEMIAQYTSALLAGTITSGWTFGAGAALQIPFAMQMAYRFNGIGVTQNVLYENQKLIANQFNSAIGKIQDSLSSTASALGKLQDVVNQNAQALNTLVKQLSSNFGAISSVLNDILSRLDKVEAEVQIDRLITGRLQSLQTYVTQQLIRAAEIRASANLAATKMSECVLGQSKRVDFCGKGYHLMSFPQSAPHGVVFLHVTYVCAQEKNFTTAPAICHDGKAHFPREGVFVSNGTHWFVTQRNFYEPQIITTDNTFVSGNCDVVIGIVNNTVYDPLQPELDSGGGGSDIIKLLNEQVNKEMQSSNLYMSMSSWCYTHSLDGAGLFLFDHAAEEYEHAKKLIIFLNENNVPVQLTSISAPEHKFEGLTQIFQKAYEHEQHISESINNIVDHAIKSKDHATFNFLQWYVAEQHEEEVLFKDILDKIELIGNENHGLYLADQYVKGIAKSRKS

SEQ ID NO: 9142 - protein, 1315 aa, Artificial Sequence
  SARS-CoV-2/England/20102000506/2020__EPI_ISL_415147 spike protein (1-1147)(P715C_P1069C) Ferritin construct
MFVFLVLLPLVSSQCVNLTTRTQLPPAYTNSFTRGVYYPDKVFRSSVLHSTQDLFLPFFSNVTWFHAIHVSGTNGTKRFDNPVLPFNDGVYFASTEKSNIIRGWIFGTTLDSKTQSLLIVNNATNVVIKVCEFQFCNDPFLGVYYHKNNKSWMESEFRVYSSANNCTFEYVSQPFLMDLEGKQGNFKNLREFVFKNIDGYFKIYSKHTPINLVRDLPQGFSALEPLVDLPIGINITRFQTLLALHRSYLTPGDSSSGWTAGAAAYYVGYLQPRTFLLKYNENGTITDAVDCALDPLSETKCTLKSFTVEKGIYQTSNFRVQPTESIVRFPNITNLCPFGEVFNATRFASVYAWNRKRISNCVADYSVLYNSASFSTFKCYGVSPTKLNDLCFTNVYADSFVIRGDEVRQIAPGQTGKIADYNYKLPDDFTGCVIAWNSNNLDSKVGGNYNYLYRLFRKSNLKPFERDISTEIYQAGSTPCNGVEGFNCYFPLQSYGFQPTNGVGYQPYRVVVLSFELLHAPATVCGPKKSTNLVKNKCVNFNFNGLTGTGVLTESNKKFLPFQQFGRDIADTTDAVRDPQTLEILDITPCSFGGVSVITPGTNTSNQVAVLYQGVNCTEVPVAIHADQLTPTWRVYSTGSNVFQTRAGCLIGAEHVNNSYECDIPIGAGICASYQTQTNSPRRARSVASQSIIAYTMSLGAENSVAYSNNSIAICTNFTISVTTEILPVSMTKTSVDCTMYICGDSTECSNLLLQYGSFCTQLNRALTGIAVEQDKNTQEVFAQVKQIYKTPPIKDFGGFNFSQILPDPSKPSKRSFIEDLLFNKVTLADAGFIKQYGYCLGDIAARDLICAQKFNGLTVLPPLLTDEMIAQYTSALLAGTITSGWTFGAGAALQIPFAMQMAYRFNGIGVTQNVLYENQKLIANQFNSAIGKIQDSLSSTASALGKLQDVVNQNAQALNTLVKQLSSNFGAISSVLNDILSRLDKVEAEVQIDRLITGRLQSLQTYVTQQLIRAAEIRASANLAATKMSECVLGQSKRVDFCGKGYHLMSFPQSAPHGVVFLHVTYVCAQEKNFTTAPAICHDGKAHFPREGVFVSNGTHWFVTQRNFYEPQIITTDNTFVSGNCDVVIGIVNNTVYDPLQPELDSGGGGSDIIKLLNEQVNKEMQSSNLYMSMSSWCYTHSLDGAGLFLFDHAAEEYEHAKKLIIFLNENNVPVQLTSISAPEHKFEGLTQIFQKAYEHEQHISESINNIVDHAIKSKDHATFNFLQWYVAEQHEEEVLFKDILDKIELIGNENHGLYLADQYVKGIAKSRKS

SEQ ID NO: 9143 - protein, 1315 aa, Artificial Sequence
  SARS-CoV-2/Belgium/VAG-03013/2020__EPI_ISL_415155 spike protein (1-1147)(P715C_P1069C) Ferritin construct
MFVFLVLLPLVSSQCVNLTTRTQLPPAYTNSFTRGVYYPDKVFRSSVLHSTQDLFLPFFSNVTWFHAIHVSGTNGTKRFDNPVLPFNDGVYFASTEKSNIIRGWIFGTTLDSKTQSLLIVNNATNVVIKVCEFQFCNDPFLGVYYHKNNKSWMESEFRVYSSANNCTFEYVSQPFLMDLEGKQGNFKNLREFVFKNIDGYFKIYSKHTPINLVRDLPQGFSALEPLVDLPIGINITRFQTLLALHRSYLTPGDSSSGWTAGAAAYYVGYLQPRTFLLKYNENGTITDAVDCALDPLSETKCTLKSFTVEKGIYQTSNFRVQPTESIVRFPNITNLCPFGEVFNATRFASVYAWNRKRISNCVADYSVLYNSASFSTFKCYGVSPTKLNDLCFTNVYADSFVIRGDEVRQIAPGQTGKIADYNYKLPDDFTGCVIAWNSNNLDSKVGGNYNYLYRLFRKSNLKPFERDISTEIYQAGSTPCNGVEGFNCYFPLQSYGFQPTNGVGYQPYRVVVLSFELLHAPATVCGPKKSTNLVKNKCVNFNFNGLTGTGVLTESNKKFLPFQQFGRDIADTTDAVRDPQTLEILDITPCSFGGVSVITPGTNTSNQVAVLYQGVNCTEVPVAIHADQLTPTWRVYSTGSNVFQTRAGCLIGAEHVNNSYECDIPIGAGICASYQTQTNSPRRARSVASQSIIAYTMSLGAENSVAYSNNSIAICTNFTISVTTEILPVSMTKTSVDCTMYICGDSTECSNLLLQYGSFCTQLNRALTGIAVEQDKNTQEVFAQVKQIYKTPPIKDFGGFNFSQILPDPSKPSKRSFIEDLLFNKVTLADAGFIKQYGDCLGDIAARDLICAQKFNGLTVLPPLLTDEMIAQYTSALLAGTITSGWTFGAGAALQIPFAMQMAYRFNGIGVTQNVLYENQKLIANQFNSAIGKIQDSLSSTATALGKLQDVVNQNAQALNTLVKQLSSNFGAISSVLNDILSRLDKVEAEVQIDRLITGRLQSLQTYVTQQLIRAAEIRASANLAATKMSECVLGQSKRVDFCGKGYHLMSFPQSAPHGVVFLHVTYVCAQEKNFTTAPAICHDGKAHFPREGVFVSNGTHWFVTQRNFYEPQIITTDNTFVSGNCDVVIGIVNNTVYDPLQPELDSGGGGSDIIKLLNEQVNKEMQSSNLYMSMSSWCYTHSLDGAGLFLFDHAAEEYEHAKKLIIFLNENNVPVQLTSISAPEHKFEGLTQIFQKAYEHEQHISESINNIVDHAIKSKDHATFNFLQWYVAEQHEEEVLFKDILDKIELIGNENHGLYLADQYVKGIAKSRKS

SEQ ID NO: 9144 - protein, 1315 aa, Artificial Sequence
  SARS-CoV-2/Belgium/BC-03016/2020__EPI_ISL_415157 spike protein (1-1147)(P715C_P1069C) Ferritin construct
MFVFLVLLPLVSSQCVNLTTRTQLPPAYTNSFTRGVYYPDKVFRSSVLHSTQDLFLPFFSNVTWFHAIHVSGTNGTKRFDNPVLPFNDGVYFASTEKSNIIRGWIFGTTLDSKTQSLLIVNNATNVVIKVCEFQFCNDPFLGVYYHKNNKSWMESEFRVYSSANNCTFEYVSQPFLMDLEGKQGNFKNLREFVFKNIDGYFKIYSKHTPINLVRDLPQGFSALEPLVDLPIGINITRFQTLLALHRSYLTPGDSSSGWTAGAAAYYVGYLQPRTFLLKYNENGTITDAVDCALDPLSETKCTLKSFTVEKGIYQTSNFRVQPTESIVRFPNITNLCPFGEVFNATRFASVYAWNRKRISNCVADYSVLYNSASFSTFKCYGVSPTKLNDLCFTNVYADSFVIRGDEVRQIAPGQTGKIADYNYKLPDDFTGCVIAWNSNNLDSKVGGNYNYLYRLFRKSNLKPFERDISTEIYQAGSTPCNGVEGFNCYFPLQSYGFQPTNGVGYQPYRVVVLSFELLHAPATVCGPKKSTNLVKNKCVNFNFNGLTGTGVLTESNKKFLPFQQFGRDIADTTDAVRDPQTLEILDITPCSFGGVSVITPGTNTSNQVAVLYQGVNCTEVPVAIHADQLTPTWRVYSTGSNVFQTRAGCLIGAEHVNNSYECDIPIGAGICASYQTQTNSPRRARSVASQSIIAYTMSLGAENSVAYSNNSIAICTNFTISVTTEILPVSMTKTSVDCTMYICGDSTECSNLLLQYGSFCTQLNRALTGIAVEQDKNTQEVFAQVKQIYKTPPIKDFGGFNFSQILPDPSKPSKRSFIEDLLFNKVTLADAGFIKQYGDCLGDIAARDLICAQKFNGLTVLPPLLTDEMIAQYTSALLAGTITSGWTFGAGAALQIPFAMQMAYRFNGIGVTQNVLYENQKLIANQFNSAIGKIQDSLSSTAPALGKLQDVVNQNAQALNTLVKQLSSNFGAISSVLNDILSRLDKVEAEVQIDRLITGRLQSLQTYVTQQLIRAAEIRASANLAATKMSECVLGQSKRVDFCGKGYHLMSFPQSAPHGVVFLHVTYVCAQEKNFTTAPAICHDGKAHFPREGVFVSNGTHWFVTQRNFYEPQIITTDNTFVSGNCDVVIGIVNNTVYDPLQPELDSGGGGSDIIKLLNEQVNKEMQSSNLYMSMSSWCYTHSLDGAGLFLFDHAAEEYEHAKKLIIFLNENNVPVQLTSISAPEHKFEGLTQIFQKAYEHEQHISESINNIVDHAIKSKDHATFNFLQWYVAEQHEEEVLFKDILDKIELIGNENHGLYLADQYVKGIAKSRKS

SEQ ID NO: 9145 - protein, 1315 aa, Artificial Sequence
  SARS-CoV-2/Germany/BavPat3/2020__EPI_ISL_414521 spike protein (1-1147)(P715C_P1069C) Ferritin construct
MFVFLVLLPLVSSQCVNLTTRTQLPPAYTNSFTRGVYYPDKVFRSSVLHSTQDLFLPFFSNVTWFHAIHVSGTNGTKRFDNPVLPFNDGVYFASTEKSNIIRGWIFGTTLDSKTQSLLIVNNATNVVIKVCEFQFCNDPFLGVYYHKNNKSWMESEFRVYSSANNCTFEYVSQPFLMDLEGKQGNFKNLREFVFKNIDGYFKIYSKHTPINLVRDLPQGFSALEPLVDLPIGINITRFQTLLALHRSYLTPGDSSSGWTAGAAAYYVGYLQPRTFLLKYNENGTITDAVDCALDPLSETKCTLKSFTVEKGIYQTSNFRVQPTESIVRFPNITNLCPFGEVFNATRFASVYAWNRKRISNCVADYSVLYNSASFSTFKCYGVSPTKLNDLCFTNVYADSFVIRGDEVRQIAPGQTGKIADYNYKLPDDFTGCVIAWNSNNLDSKVGGNYNYLYRLFRKSNLKPFERDISTEIYQAGSTPCNGVEGFNCYFPLQSYGFQPTNGVGYQPYRVVVLSFELLHAPATVCGPKKSTNLVKNKCVNFNFNGLTGTGVLTESNKKFLPFQQFGRDIADTTDAVRDPQTLEILDITPCSFGGVSVITPGTNTSNQVAVLYQDVNCTEVPVAIHADQLTPTWRVYSTGSNVFQTRAGCLIGAEHVNNSYECDIPIGAGICASYQTQTNSPRRARSVASQSIIAYTMSLGAENSVAYSNNSIAICTNFTISVTTEILPVSMTKTSVDCTMYICGDSTECSNLLLQYGSFCTQLNRALTGIAVEQDKNTQQVFAQVKQIYKTPPIKDFGGFNFSQILPDPSKPSKRSFIEDLLFNKVTLADAGFIKQYGDCLGDIAARDLICAQKFNGLTVLPPLLTDEMIAQYTSALLAGTITSGWTFGAGAALQIPFAMQMAYRFNGIGVTQNVLYENQKLIANQFNSAIGKIQDSLSSTASALGKLQDVVNQNAQALNTLVKQLSSNFGAISSVLNDILSRLDKVEAEVQIDRLITGRLQSLQTYVTQQLIRAAEIRASANLAATKMSECVLGQSKRVDFCGKGYHLMSFPQSAPHGVVFLHVTYVCAQEKNFTTAPAICHDGKAHFPREGVFVSNGTHWFVTQRNFYEPQIITTDNTFVSGNCDVVIGIVNNTVYDPLQPELDSGGGGSDIIKLLNEQVNKEMQSSNLYMSMSSWCYTHSLDGAGLFLFDHAAEEYEHAKKLIIFLNENNVPVQLTSISAPEHKFEGLTQIFQKAYEHEQHISESINNIVDHAIKSKDHATFNFLQWYVAEQHEEEVLFKDILDKIELIGNENHGLYLADQYVKGIAKSRKS

SEQ ID NO: 9146 - protein, 1315 aa, Artificial Sequence
  SARS-CoV-2/France/HF1805/2020__EPI_ISL_414628 spike protein (1-1147)(P715C_P1069C) Ferritin construct
MFVFLVLLPLVSSQCVNLTTRTQLPPAYTNSFTRGVYYPDKVFRSSVLHSTQDLFLPFFSNVTWFHAIHVSGTNGTKRFDNPVLPFNDGVYFASTEKSNIIRGWIFGTTLDSKTQSLLIVNNATNVVIKVCEFQFCNDPFLGVYYHKNNKSWMESEFRVYSSANNCTFEYVSQPFLMDLEGKQGNFKNLREFVFKNIDGYFKIYSKHTPINLVRDLPQGFSALEPLVDLPIGINITRFQTLLALHRSYLTPGDSSSGWTAGAAAYYVGYLQPRTFLLKYNENGTITDAVDCALDPLSETKCTLKSFTVEKGIYQTSNFRVQPTESIVRFPNITNLCPFGEVFNATRFASVYAWNRKRISNCVADYSVLYNSASFSTFKCYGVSPTKLNDLCFTNVYADSFVIRGDEVRQIAPGQTGKIADYNYKLPDDFTGCVIAWNSNNLDSKVGGNYNYLYRLFRKSNLKPFERDISTEIYQAGSTPCNGVEGFNCYFPLQSYGFQPTNGVGYQPYRVVVLSFELLHAPATVCGPKKSTNLVKNKCVNFNFNGLTGTGVLTESNKKFLPFQQFGRDIADTTDAVRDPQTLEILDITPCSFGGVSVITPGTNTSNQVAVLYQGVNCTEVPVAIHADQLTPTWRVYSTGSNVFQTRAGCLIGAEHVNNSYECDIPIGAGICASYQTQTNSPRRARSVASQSIIAYTMSLGAENSVAYSNNSIAICTNFTISVTTEILPVSMTKTSVDCTMYICGDSTECSNLLLQYGSFCTQLNRALTGIAVEQDKNTQEVFAQVKQIYKTPPIKDFGGFNFSQILPDPSKPSKRSFIEDLLFNKVTLADAGFIKQYGDCLGDIAARDLICAQKFNGLTVLPPLLTDEMIAQYTSALLAGTITSGWTFGAGAALQIPFAMQMAYRFNGIGVTQNVLYENQKLIANQFNSAIGKIQDSLSSTASALGKLQDVVNQNAQALNTLVKQLSSNFGAISSVLNDILSRLDKVEAEVQIDRLITGRLQSLQTYVTQQLIRAAEIRASANLAATKMSECVLGQSKRVDFCGKGYHLMSFPQSAPHGVVFLHVTYVCAQEKNFTTAPAICHDGKAHFPREGVFVSNGTHWFVTQRNFYEPQIITTDNTFVSGNCDVVIGVVNNTVYDPLQPELDSGGGGSDIIKLLNEQVNKEMQSSNLYMSMSSWCYTHSLDGAGLFLFDHAAEEYEHAKKLIIFLNENNVPVQLTSISAPEHKFEGLTQIFQKAYEHEQHISESINNIVDHAIKSKDHATFNFLQWYVAEQHEEEVLFKDILDKIELIGNENHGLYLADQYVKGIAKSRKS

SEQ ID NO: 9147 - protein, 1315 aa, Artificial Sequence
  SARS-CoV-2/Netherlands/ZuidHolland_9/2020__EPI_ISL_414445 spike protein (1-1147)(P715C_P1069C) Ferritin construct
MFVFLVLLPLVSSQCVNLTTRTQLPPAYTNSFTRGVYYPDKVFRSSVLHSTQDLFLPFFSNVTWFHAIHVSGTNGTKRFDNPVLPFNDGVYFASTEKSNIIRGWIFGTTLDSKTQSLLIVNNATNVVIKVCEFQFCNDPFLGVYYHKNNKSWMESEFRVYSSANNCTFEYVSQPFLMDLEGKQGNFKNLREFVFKNIDGYFKIYSKHTPINLVRDLPQGFSALEPLVDLPIGINITRFQTLLALHRSYLTPGDSSSGWTAGAAAYYVGYLQPRTFLLKYNENGTITDAVDCALDPLSETKCTLKSFTVEKGIYQTSNFRVQPTESIVRFPNITNLCPFGEVFNATRFASVYAWNRKRISNCVADYSVLYNSASFSTFKCYGVSPTKLNDLCFTNVYADSFVIRGDEVRQIAPGQTGKIADYNYKLPDDFTGCVIAWNSNNLDSKVGGNYNYLYRLFRKSNLKPFERDISTEIYQAGSTPCNGVEGFNCYFPLQSYGFQPTNGVGYQPYRVVVLSFELLHAPATVCGPKKSTNLVKNKCVNFNFNGLTGTGVLTESNKKFLPFQQFGRDIADTTDAVRDPQTLEILDITPCSFGGVSVITPGTNTSNQVAVLYQGVNCTEVPVAIHADQLTPTWRVYSTGSNVFQTRAGCLIGAEHVNNSYECDIPIGAGICASYQTQTNSPRRARSVASQSIIAYTMSLGAENSVAYSNNSIAICTNFTISVTTEILPVSMTKTSVDCTMYICGDSTECSNLLLQYGSFCTQLNRALTGIAVEQDKNTQEVFAQVKQIYKTPPIKDFGGFNFSQILPDPSKPSKRSFIEDLLFNKVTLADAGFIKQYGDCLGDIAARDLICVQKFNGLTVLPPLLTDEMIAQYTSALLAGTITSGWTFGAGAALQIPFAMQMAYRFNGIGVTQNVLYENQKLIANQFNSAIGKIQDSLSSTASALGKLQDVVNQNAQALNTLVKQLSSNFGAISSVLNDILSRLDKVEAEVQIDRLITGRLQSLQTYVTQQLIRAAEIRASANLAATKMSECVLGQSKRVDFCGKGYHLMSFPQSAPHGVVFLHVTYVCAQEKNFTTAPAICHDGKAHFPREGVFVSNGTHWFVTQRNFYEPQIITTDNTFVSGNCDVVIGIVNNTVYDPLQPELDSGGGGSDIIKLLNEQVNKEMQSSNLYMSMSSWCYTHSLDGAGLFLFDHAAEEYEHAKKLIIFLNENNVPVQLTSISAPEHKFEGLTQIFQKAYEHEQHISESINNIVDHAIKSKDHATFNFLQWYVAEQHEEEVLFKDILDKIELIGNENHGLYLADQYVKGIAKSRKS

SEQ ID NO: 9148 - protein, 1315 aa, Artificial Sequence
  SARS-CoV-2/Finland/FIN03032020A/2020__EPI_ISL_413602 spike protein (1-1147)(P715C_P1069C) Ferritin construct
MFVFLVLLPLVSSQCVNLTTRTQLPPAYTNSFTRGVYYPDKVFRSSVLHSTQDLFLPFFSNVTWFHAIHVSGTNGTKRFDNPVLPFNDGVYFASTEKSNIIRGWIFGTTLDSKTQSLLIVNNATNVVIKVCEFQFCNDPFLGVYYHKNNKSWMESEFRVYSSANNCTFEYVSQPFLMDLEGKQGNFKNLREFVFKNIDGYFKIYSKHTPINLVRDLPQGFSALEPLVDLPIGINITRFQTLLALHRSYLTPGDSSSGWTAGAAAYYVGYLQPRTFLLKYNENGTITDAVDCALDPLSETKCTLKSFTVEKGIYQTSNFRVQPTESIVRFPNITNLCPFGEVFNATRFASVYAWNRKRISNCVADYSVLYNSASFSTFKCYGVSPTKLNDLCFTNVYADSFVIRGDEVRQIAPGQTGKIADYNYKLPDDFTGCVISWNSNNLDSKVGGNYNYLYRLFRKSNLKPFERDISTEIYQAGSTPCNGVEGFNCYFPLQSYGFQPTNGVGYQPYRVVVLSFELLHAPATVCGPKKSTNLVKNKCVNFNFNGLTGTGVLTESNKKFLPFQQFGRDIADTTDAVRDPQTLEILDITPCSFGGVSVITPGTNTSNQVAVLYQGVNCTEVPVAIHADQLTPTWRVYSTGSNVFQTRAGCLIGAEHVNNSYECDIPIGAGICASYQTQTNSPRRARSVASQSIIAYTMSLGAENSVAYSNNSIAICTNFTISVTTEILPVSMTKTSVDCTMYICGDSTECSNLLLQYGSFCTQLNRALTGIAVEQDKNTQEVFAQVKQIYKTPPIKDFGGFNFSQILPDPSKPSKRSFIEDLLFNKVTLADAGFIKQYGDCLGDIAARDLICAQKFNGLTVLPPLLTDEMIAQYTSALLAGTITSGWTFGAGAALQIPFAMQMAYRFNGIGVTQNVLYENQKLIANQFNSAIGKIQDSLSSTASALGKLQDVVNQNAQALNTLVKQLSSNFGAISSVLNDILSRLDKVEAEVQIDRLITGRLQSLQTYVTQQLIRAAEIRASANLAATKMSECVLGQSKRVDFCGKGYHLMSFPQSAPHGVVFLHVTYVCAQEKNFTTAPAICHDGKAHFPREGVFVSNGTHWFVTQRNFYEPQIITTDNTFVSGNCDVVIGIVNNTVYDPLQPELDSGGGGSDIIKLLNEQVNKEMQSSNLYMSMSSWCYTHSLDGAGLFLFDHAAEEYEHAKKLIIFLNENNVPVQLTSISAPEHKFEGLTQIFQKAYEHEQHISESINNIVDHAIKSKDHATFNFLQWYVAEQHEEEVLFKDILDKIELIGNENHGLYLADQYVKGIAKSRKS

SEQ ID NO: 9149 - protein, 1315 aa, Artificial Sequence
  SARS-CoV-2/France/GE1977/2020__EPI_ISL_414632 spike protein (1-1147)(P715C_P1069C) Ferritin construct
MFVFLVLLPLVSSQCVNLTTRTQLPPAYTNSFTRGVYYPDKVFRSSVLHSTQDLFLPFFSNVTWFHAIHVSGTNGTKRFDNPVLPFNDGVYFASTEKSNIIRGWIFGTTLDSKTQSLLIVNNATNVVIKVCEFQFCNDPFLGVYYHKNNKSWMESEFRVYSSANNCTFEYVSQPFLMDLEGKQGNFKNLREFVFKNIDGYFKIYSKHTPINLVRDLPQGFSALEPLVDLPIGINITRFQTLLALHRSYLTPGDSSSGWTAGAAAYYVGYLQPRTFLLKYNENGTITDAVDCALDPLSETKCTLKSFTVEKGIYQTSNFRVQPTESIVRFPNITNLCPFGEVFNATRFASVYAWNRKRISNCVADYSVLYNSASFSTFKCYGVSPTKLNDLCFTNVYADSFVIRGDEVRQIAPGQTGKIADYNYKLPDDFTGCVIAWNSNNLDSKVGGNYNYLYRLFRKSNLKPFERDISTEIYQAGSTPCNGVEGFNCYFPLQSYGFQPTNGVGYQPYRVVVLSFELLHAPATVCGPKKSTNLVKNKCVNFNFNGLTGTGVLTESNKKFLPFQQFGRDIADTTDAVRDPQTLEILDITPCSFGGVSVITPGTNTSNQVAVLYQGVNCTEVPVAIHADQLTPTWRVYSTGSNVFQTRAGCLIGAEHVNNSYECDIPIGAGICASYQTQTNSPRRARSVASQSIIAYTMSLGAENSVAYSNNSIAICTNFTISVTTEILPVSMTKTSVDCTMYICGDSTECSNLLLQYGSFCTQLNRALTGIAVEQDKNTQEVFAQVKQIYKTPPIKDFGGFNFSQILPDPSKPSKRSFIEDLLFNKVTLADAGFIKQYGDCLGDIAARDLICAQKFNGLTVLPPLLTDEMIAQYTSALLAGTITSGWTFGAGAALQIPFAMQMAYRFNGIGVTQNVLYENQKLIANQFNSAIGKIQDSLFSTASALGKLQDVVNQNAQALNTLVKQLSSNFGAISSVLNDILSRLDKVEAEVQIDRLITGRLQSLQTYVTQQLIRAAEIRASANLAATKMSECVLGQSKRVDFCGKGYHLMSFPQSAPHGVVFLHVTYVCAQEKNFTTAPAICHDGKAHFPREGVFVSNGTHWFVTQRNFYEPQIITTDNTFVSGNCDVVIGIVNNTVYDPLQPELDSGGGGSDIIKLLNEQVNKEMQSSNLYMSMSSWCYTHSLDGAGLFLFDHAAEEYEHAKKLIIFLNENNVPVQLTSISAPEHKFEGLTQIFQKAYEHEQHISESINNIVDHAIKSKDHATFNFLQWYVAEQHEEEVLFKDILDKIELIGNENHGLYLADQYVKGIAKSRKS

SEQ ID NO: 9150 - protein, 1315 aa, Artificial Sequence
  SARS-CoV-2/Finland/FIN-313/2020__EPI_ISL_414641 spike protein (1-1147)(P715C_P1069C) Ferritin construct
MFVFLVLLPLVSSQCVNLTTRTQLPPAYTNSFTRGVYYPDKVFRSSVLHSTQDLFLPFFSNVTWFHAIHVSGTNGTKRFDNPVLPFNDGVYFASTEKSNIIRGWIFGTTLDSKTQSLLIVNNATNVVIKVCEFQFCNDPFLGVYYHKNNKSWMESEFRVYSSANNCTFEYVSQPFLMDLEGKQGNFKNLREFVFKNIDGYFKIYSKHTPINLVRDLPQGFSALEPLVDLPIGINITRFKTLLALHRSYLTPGDSSSGWTAGAAAYYVGYLQPRTFLLKYNENGTITDAVDCALDPLSETKCTLKSFTVEKGIYQTSNFRVQPTESIVRFPNITNLCPFGEVFNATRFASVYAWNRKRISNCVADYSVLYNSASFSTFKCYGVSPTKLNDLCFTNVYADSFVIRGDEVRQIAPGQTGKIADYNYKLPDDFTGCVIAWNSNNLDSKVGGNYNYLYRLFRKSNLKPFERDISTEIYQAGSTPCNGVEGFNCYFPLQSYGFQPTNGVGYQPYRVVVLSFELLHAPATVCGPKKSTNLVKNKCVNFNFNGLTGTGVLTESNKKFLPFQQFGRDIADTTDAVRDPQTLEILDITPCSFGGVSVITPGTNTSNQVAVLYQGVNCTEVPVAIHADQLTPTWRVYSTGSNVFQTRAGCLIGAEHVNNSYECDIPIGAGICASYQTQTNSPRRARSVASQSIIAYTMSLGAENSVAYSNNSIAICTNFTISVTTEILPVSMTKTSVDCTMYICGDSTECSNLLLQYGSFCTQLNRALTGIAVEQDKNTQEVFAQVKQIYKTPPIKDFGGFNFSQILPDPSKPSKRSFIEDLLFNKVTLADAGFIKQYGDCLGDIAARDLICAQKFNGLTVLPPLLTDEMIAQYTSALLAGTITSGWTFGAGAALQIPFAMQMAYRFNGIGVTQNVLYENQKLIANQFNSAIGKIQDSLSSTASALGKLQDVVNQNAQALNTLVKQLSSNFGAISSVLNDILSRLDKVEAEVQIDRLITGRLQSLQTYVTQQLIRAAEIRASANLAATKMSECVLGQSKRVDFCGKGYHLMSFPQSAPHGVVFLHVTYVCAQEKNFTTAPAICHDGKAHFPREGVFVSNGTHWFVTQRNFYEPQIITTDNTFVSGNCDVVIGIVNNTVYDPLQPELDSGGGGSDIIKLLNEQVNKEMQSSNLYMSMSSWCYTHSLDGAGLFLFDHAAEEYEHAKKLIIFLNENNVPVQLTSISAPEHKFEGLTQIFQKAYEHEQHISESINNIVDHAIKSKDHATFNFLQWYVAEQHEEEVLFKDILDKIELIGNENHGLYLADQYVKGIAKSRKS

SEQ ID NO: 9151 - protein, 1315 aa, Artificial Sequence
  SARS-CoV-2/Netherlands/ZuidHolland_2/2020__EPI_ISL_414556 spike protein (1-1147)(P715C_P1069C) Ferritin construct
MFVFLVLLPLVSSQCVNLTTRTQLPPAYTNSFTRGVYYPDKVFRSSVLHSTQDLFLPFFSNVTWFHAIHVSGTNGTKRFDNPVLPFNDGVYFASTEKSNIIRGWIFGTTLDSKTQSLLIVNNATNVVIKVCEFQFCNDPFLGVYYHKNNKSWMESEFRVYSSANNCTFEYVSQPFLMDLEGKQGNFKNLREFVFKNIDGYFKIYSKHTPINLVRDLPQGFSALEPLVDLPIGINITRFQTLLALHRSYLTPGDSSSGWTAGAAAYYVGYLQPRTFLLKYNENGTITDAVDCALDPLSETKCTLKSFTVEKGIYQTSNFRVQPTESIVRFPNITNLCPFGEVFNATRFASVYAWNRKRISNCVADYSVLYNSASFSTFKCYGVSPTKLNDLCFTNVYADSFVIRGDEVRQIAPGQTGKIADYNYKLPDDFTGCVIAWNSNNLDSKVGGNYNYLYRLFRKSNLKPFERDISTEIYQAGSTPCNGVEGFNCYFPLQSYGFQPTNGVGYQPYRVVVLSFELLHAPATVCGPKKSTNLVKNKCVNFNFNGLTGTGVLTESNKKFLPFQQFGRDIADTTDAVRDPQTLEILDITPCSFGGVSVITPGTNTSNQVAVLYQGVNCTEVPVAIHADQLTPTWRVYSTGSNVFQTRAGCLIGAEHVNNSYECDIPIGAGICASYQTQTNSPRRARSVASQSIIAYTMSLGAENSVAYSNNSIAICTNFTISVTTEILPVSMTKTSVDCTMYICGDSTECSNLLLQYGSFCTQLNRALTGIALEQDKNTQEVFAQVKQIYKTPPIKDFGGFNFSQILPDPSKPSKRSFIEDLLFNKVTLADAGFIKQYGDCLGDIAARDLICAQKFNGLTVLPPLLTDEMIAQYTSALLAGTITSGWTFGAGAALQIPFAMQMAYRFNGIGVTQNVLYENQKLIANQFNSAIGKIQDSLSSTASALGKLQDVVNQNAQALNTLVKQLSSNFGAISSVLNDILSRLDKVEAEVQIDRLITGRLQSLQTYVTQQLIRAAEIRASANLAATKMSECVLGQSKRVDFCGKGYHLMSFPQSAPHGVVFLHVTYVCAQEKNFTTAPAICHDGKAHFPREGVFVSNGTHWFVTQRNFYEPQIITTDNTFVSGNCDVVIGIVNNTVYDPLQPELDSGGGGSDIIKLLNEQVNKEMQSSNLYMSMSSWCYTHSLDGAGLFLFDHAAEEYEHAKKLIIFLNENNVPVQLTSISAPEHKFEGLTQIFQKAYEHEQHISESINNIVDHAIKSKDHATFNFLQWYVAEQHEEEVLFKDILDKIELIGNENHGLYLADQYVKGIAKSRKS

SEQ ID NO: 9152 - protein, 1315 aa, Artificial Sequence
  SARS-CoV-2/USA/WA-UW31/2020__EPI_ISL_414618 spike protein (1-1147)(P715C_P1069C) Ferritin construct
MFVFLVLLPLVSSQCVNLTTRTQLPPAYTNSFTRGVYYPDKVFRSSVLHSTQDLFLPFFSNVTWFHAIHVSGTNGTKRFDNPVLPFNDGVYFASTEKSNIIRGWIFGTTLDSKTQSLLIVNNATNVVIKVCEFQFCNDPFLGVYYHKNNKSWMESEFRVYSSANNCTFEYVSQPFLMDLEGKQGNFKNLREFVFKNIDGYFKIYSKHTPINLVRDLPQGFSALEPLVDLPIGINITRFQTLLALHRSYLTPGDSSSGWTAGAAAYYVGYLQPRTFLLKYNENGTITDAVDCALDPLSETKCTLKSFTVEKGIYQTSNFRVQPTESIVRFPNITNLCPFGEVFNATRFASVYAWNRKRISNCVADYSVLYNSASFSTFKCYGVSPTKLNDLCFTNVYADSFVIRGDEVRQIAPGQTGKIADYNYKLPDDFTGCVIAWNSNNLDSKVGGNYNYLYRLFRKSNLKPFERDISTEIYQAGSTPCNGAEGFNCYFPLQSYGFQPTNGVGYQPYRVVVLSFELLHAPATVCGPKKSTNLVKNKCVNFNFNGLTGTGVLTESNKKFLPFQQFGRDIADTTDAVRDPQTLEILDITPCSFGGVSVITPGTNTSNQVAVLYQDVNCTEVPVAIHADQLTPTWRVYSTGSNVFQTRAGCLIGAEHVNNSYECDIPIGAGICASYQTQTNSPRRARSVASQSIIAYTMSLGAENSVAYSNNSIAICTNFTISVTTEILPVSMTKTSVDCTMYICGDSTECSNLLLQYGSFCTQLNRALTGIAVEQDKNTQEVFAQVKQIYKTPPIKDFGGFNFSQILPDPSKPSKRSFIEDLLFNKVTLADAGFIKQYGDCLGDIAARDLICAQKFNGLTVLPPLLTDEMIAQYTSALLAGTITSGWTFGAGAALQIPFAMQMAYRFNGIGVTQNVLYENQKLIANQFNSAIGKIQDSLSSTASALGKLQDVVNQNAQALNTLVKQLSSNFGAISSVLNDILSRLDKVEAEVQIDRLITGRLQSLQTYVTQQLIRAAEIRASANLAATKMSECVLGQSKRVDFCGKGYHLMSFPQSAPHGVVFLHVTYVCAQEKNFTTAPAICHDGKAHFPREGVFVSNGTHWFVTQRNFYEPQIITTDNTFVSGNCDVVIGIVNNTVYDPLQPELDSGGGGSDIIKLLNEQVNKEMQSSNLYMSMSSWCYTHSLDGAGLFLFDHAAEEYEHAKKLIIFLNENNVPVQLTSISAPEHKFEGLTQIFQKAYEHEQHISESINNIVDHAIKSKDHATFNFLQWYVAEQHEEEVLFKDILDKIELIGNENHGLYLADQYVKGIAKSRKS

SEQ ID NO: 9153 - protein, 1315 aa, Artificial Sequence
  SARS-CoV-2/South Korea/SNU01/2020__EPI_ISL_411929 spike protein (1-1147)(P715C_P1069C) Ferritin construct
MFVFLVLLPLVSSQCVNLTTRTQLPPAYTNSFTRGVYYPDKVFRSSVLHSTQDLFLPFFSNVTWFHAIHVSGTNGTKRFDNPVLPFNDGVYFASTEKSNIIRGWIFGTTLDSKTQSLLIVNNATNVVIKVCEFQFCNDPFLGVYYHKNNKSWMESEFRVYSSANNCTFEYVSQPFLMDLEGKQGNFKNLREFVFKNIDGYFKIYSKHTPINLVRDLPQGFWALEPLVDLPIGINITRFQTLLALHRSYLTPGDSSSGWTAGAAAYYVGYLQPRTFLLKYNENGTITDAVDCALDPLSETKCTLKSFTVEKGIYQTSNFRVQPTESIVRFPNITNLCPFGEVFNATRFASVYAWNRKRISNCVADYSVLYNSASFSTFKCYGVSPTKLNDLCFTNVYADSFVIRGDEVRQIAPGQTGKIADYNYKLPDDFTGCVIAWNSNNLDSKVGGNYNYLYRLFRKSNLKPFERDISTEIYQAGSTPCNGVEGFNCYFPLQSYGFQPTNGVGYQPYRVVVLSFELLHAPATVCGPKKSTNLVKNKCVNFNFNGLTGTGVLTESNKKFLPFQQFGRDIADTTDAVRDPQTLEILDITPCSFGGVSVITPGTNTSNQVAVLYQDVNCTEVPVAIHADQLTPTWRVYSTGSNVFQTRAGCLIGAEHVNNSYECDIPIGAGICASYQTQTNSPRRARSVASQSIIAYTMSLGAENSVAYSNNSIAICTNFTISVTTEILPVSMTKTSVDCTMYICGDSTECSNLLLQYGSFCTQLNRALTGIAVEQDKNTQEVFAQVKQIYKTPPIKDFGGFNFSQILPDPSKPSKRSFIEDLLFNKVTLADAGFIKQYGDCLGDIAARDLICAQKFNGLTVLPPLLTDEMIAQYTSALLAGTITSGWTFGAGAALQIPFAMQMAYRFNGIGVTQNVLYENQKLIANQFNSAIGKIQDSLSSTASALGKLQDVVNQNAQALNTLVKQLSSNFGAISSVLNDILSRLDKVEAEVQIDRLITGRLQSLQTYVTQQLIRAAEIRASANLAATKMSECVLGQSKRVDFCGKGYHLMSFPQSAPHGVVFLHVTYVCAQEKNFTTAPAICHDGKAHFPREGVFVSNGTHWFVTQRNFYEPQIITTDNTFVSGNCDVVIGIVNNTVYDPLQPELDSGGGGSDIIKLLNEQVNKEMQSSNLYMSMSSWCYTHSLDGAGLFLFDHAAEEYEHAKKLIIFLNENNVPVQLTSISAPEHKFEGLTQIFQKAYEHEQHISESINNIVDHAIKSKDHATFNFLQWYVAEQHEEEVLFKDILDKIELIGNENHGLYLADQYVKGIAKSRKS

SEQ ID NO: 9154 - protein, 1315 aa, Artificial Sequence
  SARS-CoV-2/China/WF0004/2020__EPI_ISL_413694 spike protein (1-1147)(P715C_P1069C) Ferritin construct
MFVFLVLLPLVSSQCVNLTTRTQLPPAYTNSFTRGVYYPDKVFRSSVLHSTQDLFLPFFSNVTWFHAIHVSGTNGTKRFDNPVLPFNDGVYFASTEKSNIIRGWIFGTTLDSKTQSLLIVNNATNVVIKVCEFQFCNDPFLGVYYHKNNKSWTESEFRVYSSANNCTFEYVSQPFLMDLEGKQGNFKNLREFVFKNIDGYFKIYSKHTPINLVRDLPQGFSALEPLVDLPIGINITRFQTLLALHRSYLTPGDSSSGWTAGAAAYYVGYLQPRTFLLKYNENGTITDAVDCALDPLSETKCTLKSFTVEKGIYQTSNFRVQPTESIVRFPNITNLCPFGEVFNATRFASVYAWNRKRISNCVADYSVLYNSASFSTFKCYGVSPTKLNDLCFTNVYADSFVIRGDEVRQIAPGQTGKIADYNYKLPDDFTGCVIAWNSNNLDSKVGGNYNYLYRLFRKSNLKPFERDISTEIYQAGSTPCNGVEGFNCYFPLQSYGFQPTNGVGYQPYRVVVLSFELLHAPATVCGPKKSTNLVKNKCVNFNFNGLTGTGVLTESNKKFLPFQQFGRDIADTTDAVRDPQTLEILDITPCSFGGVSVITPGTNTSNQVAVLYQDVNCTEVPVAIHADQLTPTWRVYSTGSNVFQTRAGCLIGAEHVNNSYECDIPIGAGICASYQTQTNSPRRARSVASQSIIAYTMSLGAENSVAYSNNSIAICTNFTISVTTEILPVSMTKTSVDCTMYICGDSTECSNLLLQYGSFCTQLNRALTGIAVEQDKNTQEVFAQVKQIYKTPPIKDFGGFNFSQILPDPSKPSKRSFIEDLLFNKVTLADAGFIKQYGDCLGDIAARDLICAQKFNGLTVLPPLLTDEMIAQYTSALLAGTITSGWTFGAGAALQIPFAMQMAYRFNGIGVTQNVLYENQKLIANQFNSAIGKIQDSLSSTASALGKLQDVVNQNAQALNTLVKQLSSNFGAISSVLNDILSRLDKVEAEVQIDRLITGRLQSLQTYVTQQLIRAAEIRASANLAATKMSECVLGQSKRFDFCGKGYHLMSFPQSAPHGVVFLHVTYVCAQEKNFTTAPAICHDGKAHFPREGVFVSNGTHWFVTQRNFYEPQIITTDNTFVSGNCDVVIGIVNNTVYDPLQPELDSGGGGSDIIKLLNEQVNKEMQSSNLYMSMSSWCYTHSLDGAGLFLFDHAAEEYEHAKKLIIFLNENNVPVQLTSISAPEHKFEGLTQIFQKAYEHEQHISESINNIVDHAIKSKDHATFNFLQWYVAEQHEEEVLFKDILDKIELIGNENHGLYLADQYVKGIAKSRKS

SEQ ID NO: 9155 - protein, 1315 aa, Artificial Sequence
  SARS-CoV-2/China/WF0028/2020__EPI_ISL_413791 spike protein (1-1147)(P715C_P1069C) Ferritin construct
MFVFLVLLPLVSSQCVNLTTRTQLPPAYTNSFTRGVYYPDKVFRSSVLHSTQDLFLPFFSNVTWFHAIHVSGTNGTKRFDNPVLPFNDGVYFASTEKSNIIRGWIFGTTLDSKTQSLLIVNNATNVVIKVCEFQFCNDPFLGVYYHKNNKSWMESEFRVYSSANNCTFEYVSQPFLMDLEGKQGNFKNLREFVFKNIDGYFKIYSKHTPINLVRDLPQGFSALEPLVDLPIGINITRFQTLLALHRSYLTPGDSSSGWTAGAAAYYVGYLQPRTFLLKYNENGTITDAVDCALDPLSETKCTLKSFTVEKGIYQTSNFRVQPTESIVRFPNITNLCPFGEVFNATRFASVYAWNRKRISNCVADYSVLYNSASFSTFKCYGVSPTKLNDLCFTNVYADSFVIRGDEVRQIAPGQTGKIADYNYKLPDDFTGCVIAWNSNNLDSKVGGNYNYLYRLFRKSNLKPFERDISTEIYQAGSTPCNGVEGFNCYFPLQSYGFQPTNGVGYQPYRVVVLSFELLHAPATVCGPKKSTNLVKNKCVNFNFNGLTGTGVLTESNKKFLPFQQFGRDIADTTDAVRDPQTLEILDITPCSFGGVSVITPGTNTSNQVAVLYQDVNCTEVPVAIHADQLTPTWRVYSTGSNVFQTRAGCLIGAEHVNNSYECDIPIGAGICASYQTQTNSPRRARSVASQSIIAYTMSLGAENSVAYSNNSIAICTNFTISVTTEILPVSMTKTSVDCTMYICGDSTECSNLLLQYGSFCTQLNRALTGIAVEQDKNTQEVFAQVKQIYKTPPIKDFGGFNFSQILPDPSKPSKRSFIEDLLFNKVTLADAGFIKQYGDCLGDIAARDLICAQKFNGLTVLPPLLTDEMIAQYTSALLAGTITSGWTFGAGAALQIPFAMQMAYRFNGIGVTQNVLYENQKLIANQFNSAIGKIQDSLSSTASALGKLQDVVNQNAQALNTLVKQLSSNFGAISSVLNDILSRLDKVEAEVQIDRLITGRLQSLQTYVTQQLIRAAEIRASANLAATKMSECVLGQSKRVDFCGKGYHLMSFPQSAPHGVVFLHVTYVCAQEKNFTTAPAICHDGKAHFPREGVFVSNGTHWFVTQRNFYEPQIITTDNTFVSGNCDVVIGIVNNTVYDPLQPELESGGGGSDIIKLLNEQVNKEMQSSNLYMSMSSWCYTHSLDGAGLFLFDHAAEEYEHAKKLIIFLNENNVPVQLTSISAPEHKFEGLTQIFQKAYEHEQHISESINNIVDHAIKSKDHATFNFLQWYVAEQHEEEVLFKDILDKIELIGNENHGLYLADQYVKGIAKSRKS

SEQ ID NO: 9156 - protein, 1315 aa, Artificial Sequence
  SARS-CoV-2/2019-nCoV/USA-CruiseA-18/2020__MT159716.1 spike protein (1-1147)(P715C_P1069C) Ferritin construct
MFVFLVLLPLVSSQCVNLTTRTQLPPAYTNSFTRGVYYPDKVFRSSVLHSTQDLFLPFFSNVTWFHAIHVSGTNGTKRFDNPVLPFNDGVYFASTEKSNIIRGWIFGTTLDSKTQSLLIVNNATNVVIKVCEFQFCNDPFLGVYYHKNNKSWMESELRVYSSANNCTFEYVSQPFLMDLEGKQGNFKNLREFVFKNIDGYFKIYSKHTPINLVRDLPQGFSALEPLVDLPIGINITRFQTLLALHRSYLTPGDSSSGWTAGAAAYYVGYLQPRTFLLKYNENGTITDAVDCALDPLSETKCTLKSFTVEKGIYQTSNFRVQPTESIVRFPNITNLCPFGEVFNATRFASVYAWNRKRISNCVADYSVLYNSASFSTFKCYGVSPTKLNDLCFTNVYADSFVIRGDEVRQIAPGQTGKIADYNYKLPDDFTGCVIAWNSNNLDSKVGGNYNYLYRLFRKSNLKPFERDISTEIYQAGSTPCNGVEGFNCYFPLQSYGFQPTNGVGYQPYRVVVLSFELLHAPATVCGPKKSTNLVKNKCVNFNFNGLTGTGVLTESNKKFLPFQQFGRDIADTTDAVRDPQTLEILDITPCSFGGVSVITPGTNTSNQVAVLYQDVNCTEVPVAIHADQLTPTWRVYSTGSNVFQTRAGCLIGAEHVNNSYECDIPIGAGICASYQTQTNSPRRARSVASQSIIAYTMSLGAENSVAYSNNSIAICTNFTISVTTEILPVSMTKTSVDCTMYICGDSTECSNLLLQYGSFCTQLNRALTGIAVEQDKNTQEVFAQVKQIYKTPPIKDFGGFNFSQILPDPSKPSKRSFIEDLLFNKVTLADAGFIKQYGDCLGDIAARDLICAQKFNGLTVLPPLLTDEMIAQYTSALLAGTITSGWTFGAGAALQIPFAMQMAYRFNGIGVTQNVLYENQKLIANQFNSAIGKIQDSLSSTASALGKLQDVVNQNAQALNTLVKQLSSNFGAISSVLNDILSRLDKVEAEVQIDRLITGRLQSLQTYVTQQLIRAAEIRASANLAATKMSECVLGQSKRVDFCGKGYHLMSFPQSAPHGVVFLHVTYVCAQEKNFTTAPAICHDGKAHFPREGVFVSNGTHWFVTQRNFYEPQIITTDNTFVSGNCDVVIGIVNNTVYDPLQPELDSGGGGSDIIKLLNEQVNKEMQSSNLYMSMSSWCYTHSLDGAGLFLFDHAAEEYEHAKKLIIFLNENNVPVQLTSISAPEHKFEGLTQIFQKAYEHEQHISESINNIVDHAIKSKDHATFNFLQWYVAEQHEEEVLFKDILDKIELIGNENHGLYLADQYVKGIAKSRKS

SEQ ID NO: 9157 - protein, 1315 aa, Artificial Sequence
  SARS-CoV-2/SARS-CoV-2/Yunnan-01/human/2020/CHN__MT049951.1 spike protein (1-1147)(P715C_P1069C) Ferritin construct
MFVFLVLLPLVSSQCVNLTTRTQLPPANTNSFTRGVYYPDKVFRSSVLHSTQDLFLPFFSNVTWFHAIHVSGTNGTKRFDNPVLPFNDGVYFASTEKSNIIRGWIFGTTLDSKTQSLLIVNNATNVVIKVCEFQFCNDPFLGVYYHKNNKSWMESEFRVYSSANNCTFEYVSQPFLMDLEGKQGNFKNLREFVFKNIDGYFKIYSKHTPINLVRDLPQGFSALEPLVDLPIGINITRFQTLLALHRSYLTPGDSSSGWTAGAAAYYVGYLQPRTFLLKYNENGTITDAVDCALDPLSETKCTLKSFTVEKGIYQTSNFRVQPTESIVRFPNITNLCPFGEVFNATRFASVYAWNRKRISNCVADYSVLYNSASFSTFKCYGVSPTKLNDLCFTNVYADSFVIRGDEVRQIAPGQTGKIADYNYKLPDDFTGCVIAWNSNNLDSKVGGNYNYLYRLFRKSNLKPFERDISTEIYQAGSTPCNGVEGFNCYFPLQSYGFQPTNGVGYQPYRVVVLSFELLHAPATVCGPKKSTNLVKNKCVNFNFNGLTGTGVLTESNKKFLPFQQFGRDIADTTDAVRDPQTLEILDITPCSFGGVSVITPGTNTSNQVAVLYQDVNCTEVPVAIHADQLTPTWRVYSTGSNVFQTRAGCLIGAEHVNNSYECDIPIGAGICASYQTQTNSPRRARSVASQSIIAYTMSLGAENSVAYSNNSIAICTNFTISVTTEILPVSMTKTSVDCTMYICGDSTECSNLLLQYGSFCTQLNRALTGIAVEQDKNTQEVFAQVKQIYKTPPIKDFGGFNFSQILPDPSKPSKRSFIEDLLFNKVTLADAGFIKQYGDCLGDIAARDLICAQKFNGLTVLPPLLTDEMIAQYTSALLAGTITSGWTFGAGAALQIPFAMQMAYRFNGIGVTQNVLYENQKLIANQFNSAIGKIQDSLSSTASALGKLQDVVNQNAQALNTLVKQLSSNFGAISSVLNDILSRLDKVEAEVQIDRLITGRLQSLQTYVTQQLIRAAEIRASANLAATKMSECVLGQSKRVDFCGKGYHLMSFPQSAPHGVVFLHVTYVCAQEKNFTTAPAICHDGKAHFPREGVFVSNGTHWFVTQRNFYEPQIITTDNTFVSGNCDVVIGIVNNTVYDPLQPELDSGGGGSDIIKLLNEQVNKEMQSSNLYMSMSSWCYTHSLDGAGLFLFDHAAEEYEHAKKLIIFLNENNVPVQLTSISAPEHKFEGLTQIFQKAYEHEQHISESINNIVDHAIKSKDHATFNFLQWYVAEQHEEEVLFKDILDKIELIGNENHGLYLADQYVKGIAKSRKS

SEQ ID NO: 9158 - protein, 1315 aa, Artificial Sequence
  SARS-CoV-2/USA/WA-UW292/2020__EPI_ISL_418077 spike protein (1-1147)(P715C_P1069C) Ferritin construct
MFVFLVLLPLVSSQCVNLTTRTQLPPAYTNSFTRGVYYPDKVFRSSVLHSTQDLFLPFFSNVTWFHAIHVSGTNGTKRFDNPVLPFNDGVYFASTEKSNIIRGWIFGTTLDSKTQSLLIVNNATNVVIKVCEFQFCNDPFLGVYYHKNNKSWMESEFRVYSSANNCTFEYVSQPFLMDLEGKQGNFKNLREFVFKNIDGYFKIYSKHTPINLVRDLPQGFSALEPLVDLPIGINITRFQTLLALHRSYLTPGDSSSGWTAGAAAYYVGYLQPRTFLLKYNENGTITDAVDCALDPLSETKCTLKSFTVEKGIYQTSNFRVQPTESIVRFPNITNLCPFGEVFNATRFASVYAWNRKRISNCVADYSVLYNSASFSTFKCYGVSPTKLNDLCFTNVYADSFVIRGDEVRQIAPGQTGKIADYNYKLPDDFTGCVIAWNSNNLDSKVGGNYNYLYRLFRKSNLKPFERDISTEIYQASSTPCNGVEGFNCYFPLQSYGFQPTNGVGYQPYRVVVLSFELLHAPATVCGPKKSTNLVKNKCVNFNFNGLTGTGVLTESNKKFLPFQQFGRDIADTTDAVRDPQTLEILDITPCSFGGVSVITPGTNTSNQVAVLYQDVNCTEVPVAIHADQLTPTWRVYSTGSNVFQTRAGCLIGAEHVNNSYECDIPIGAGICASYQTQTNSPRRARSVASQSIIAYTMSLGAENSVAYSNNSIAICTNFTISVTTEILPVSMTKTSVDCTMYICGDSTECSNLLLQYGSFCTQLNRALTGIAVEQDKNTQEVFAQVKQIYKTPPIKDFGGFNFSQILPDPSKPSKRSFIEDLLFNKVTLADAGFIKQYGDCLGDIAARDLICAQKFNGLTVLPPLLTDEMIAQYTSALLAGTITSGWTFGAGAALQIPFAMQMAYRFNGIGVTQNVLYENQKLIANQFNSAIGKIQDSLSSTASALGKLQDVVNQNAQALNTLVKQLSSNFGAISSVLNDILSRLDKVEAEVQIDRLITGRLQSLQTYVTQQLIRAAEIRASANLAATKMSECVLGQSKRVDFCGKGYHLMSFPQSAPHGVVFLHVTYVCAQEKNFTTAPAICHDGKAHFPREGVFVSNGTHWFVTQRNFYEPQIITTDNTFVSGNCDVVIGIVNNTVYDPLQPELDSGGGGSDIIKLLNEQVNKEMQSSNLYMSMSSWCYTHSLDGAGLFLFDHAAEEYEHAKKLIIFLNENNVPVQLTSISAPEHKFEGLTQIFQKAYEHEQHISESINNIVDHAIKSKDHATFNFLQWYVAEQHEEEVLFKDILDKIELIGNENHGLYLADQYVKGIAKSRKS

SEQ ID NO: 9159 - protein, 1315 aa, Artificial Sequence
  SARS-CoV-2/Iceland/192/2020__EPI_ISL_417819 spike protein (1-1147)(P715C_P1069C) Ferritin construct
MFVFFVLLPLVSSQCVNLTTRTQLPPAYTNSFTRGVYYPDKVFRSSVLHSTQDLFLPFFSNVTWFHAIHVSGTNGTKRFDNPVLPFNDGVYFASTEKSNIIRGWIFGTTLDSKTQSLLIVNNATNVVIKVCEFQFCNDPFLGVYYHKNNKSWMESEFRVYSSANNCTFEYVSQPFLMDLEGKQGNFKNLREFVFKNIDGYFKIYSKHTPINLVRDLPQGFSALEPLVDLPIGINITRFQTLLALHRSYLTPGDSSSGWTAGAAAYYVGYLQPRTFLLKYNENGTITDAVDCALDPLSETKCTLKSFTVEKGIYQTSNFRVQPTESIVRFPNITNLCPFGEVFNATRFASVYAWNRKRISNCVADYSVLYNSASFSTFKCYGVSPTKLNDLCFTNVYADSFVIRGDEVRQIAPGQTGKIADYNYKLPDDFTGCVIAWNSNNLDSKVGGNYNYLYRLFRKSNLKPFERDISTEIYQAGSTPCNGVEGFNCYFPLQSYGFQPTNGVGYQPYRVVVLSFELLHAPATVCGPKKSTNLVKNKCVNFNFNGLTGTGVLTESNKKFLPFQQFGRDIADTTDAVRDPQTLEILDITPCSFGGVSVITPGTNTSNQVAVLYQGVNCTEVPVAIHADQLTPTWRVYSTGSNVFQTRAGCLIGAEHVNNSYECDIPIGAGICASYQTQTNSPRRARSVASQSIIAYTMSLGAENSVAYSNNSIAICTNFTISVTTEILPVSMTKTSVDCTMYICGDSTECSNLLLQYGSFCTQLNRALTGIAVEQDKNTQEVFAQVKQIYKTPPIKDFGGFNFSQILPDPSKPSKRSFIEDLLFNKVTLADAGFIKQYGDCLGDIAARDLICAQKFNGLTVLPPLLTDEMIAQYTSALLAGTITSGWTFGAGAALQIPFAMQMAYRFNGIGVTQNVLYENQKLIANQFNSAIGKIQDSLSSTASALGKLQDVVNQNAQALNTLVKQLSSNFGAISSVLNDILSRLDKVEAEVQIDRLITGRLQSLQTYVTQQLIRAAEIRASANLAATKMSECVLGQSKRVDFCGKGYHLMSFPQSAPHGVVFLHVTYVCAQEKNFTTAPAICHDGKAHFPREGVFVSNGTHWFVTQRNFYEPQIITTDNTFVSGNCDVVIGIVNNTVYDPLQPELDSGGGGSDIIKLLNEQVNKEMQSSNLYMSMSSWCYTHSLDGAGLFLFDHAAEEYEHAKKLIIFLNENNVPVQLTSISAPEHKFEGLTQIFQKAYEHEQHISESINNIVDHAIKSKDHATFNFLQWYVAEQHEEEVLFKDILDKIELIGNENHGLYLADQYVKGIAKSRKS

SEQ ID NO: 9160 - protein, 1315 aa, Artificial Sequence
  SARS-CoV-2/Belgium/ULG-6939/2020__EPI_ISL_417020 spike protein (1-1147)(P715C_P1069C) Ferritin construct
MFVFLVLLPLVSSQCVNLTTRTQLPPAYTNSFTRGVYYPDKVFRSSVLHSTQDLFLPFFSNVTWFHAIHVSGTNGTKRFDNPVLPFNDGVYFASTEKSNIIRGWIFGTTLDSKTQSLLIVNNATNVVIKVCEFQFCNDPFLGVYYHKNNKSWMESEFRVYSSANNCTFEYVSQPFLMDLEGKQGNFKNLREFVFKNIDGYFKIYSKHTPINLVRDLPQGFSALEPLVDLPIGINITRFQTLLALHRSYLTPGDSSSGWTAGAAAYYVGYLQPRTFLLKYNENGTITDAVDCALDPLSETKCTLKSFTVEKGIYQTSNFRVQPTESIVRFPNITNLCPFGEVFNATRFASVYAWNRKRISNCVADYSVLYNSASFSTFKCYGVSPTKLNDLCFTNVYADSFVIRGDEVRQIAPGQTGKIADYNYKLPDDFTGCVIAWNSNNLDSKVGGNYNYLYRLFRKSNLKPFERDISTEIYQAGSTPCNGVEGFNCYFPLQSYGFQPTNGVGYQPYRVVVLSFELLHAPATVCGPKKSTNLVKNKCVNFNFNGLTGTGVLTESNKKFLPFQQFGRDIADTTDAVRDPQTLEILDITPCSFGGVSVITPGTNTSNQVAVLYQGVNCTEVPVAIHADQLTPTWRVYSTGSNVFQTRAGCLIGAEHVNNSYECDIPIGAGICASYQTQTNSPRRARSVASQSIIAYTMSLGAENSVVYSNNSIAICTNFTISVTTEILPVSMTKTSVDCTMYICGDSTECSNLLLQYGSFCTQLNRALTGIAVEQDKNTQEVFAQVKQIYKTPPIKDFGGFNFSQILPDPSKPSKRSFIEDLLFNKVTLADAGFIKQYGDCLGDIAARDLICAQKFNGLTVLPPLLTDEMIAQYTSALLAGTITSGWTFGAGAALQIPFAMQMAYRFNGIGVTQNVLYENQKLIANQFNSAIGKIQDSLSSTASALGKLQDVVNQNAQALNTLVKQLSSNFGAISSVLNDILSRLDKVEAEVQIDRLITGRLQSLQTYVTQQLIRAAEIRASANLAATKMSECVLGQSKRVDFCGKGYHLMSFPQSAPHGVVFLHVTYVCAQEKNFTTAPAICHDGKAHFPREGVFVSNGTHWFVTQRNFYEPQIITTDNTFVSGNCDVVIGIVNNTVYDPLQPELDSGGGGSDIIKLLNEQVNKEMQSSNLYMSMSSWCYTHSLDGAGLFLFDHAAEEYEHAKKLIIFLNENNVPVQLTSISAPEHKFEGLTQIFQKAYEHEQHISESINNIVDHAIKSKDHATFNFLQWYVAEQHEEEVLFKDILDKIELIGNENHGLYLADQYVKGIAKSRKS

SEQ ID NO: 9161 - protein, 1315 aa, Artificial Sequence
  SARS-CoV-2/France/HF2496/2020__EPI_ISL_418231 spike protein (1-1147)(P715C_P1069C) Ferritin construct
MFVFLVLLPLVSSQCVNLTTRTQLPPAYTNSFTRGVYYPDKVFRSSVLHSTQDLFLPFFSNVTWFHAIHVSGTNGTKRFDNPVLPFNDGVYFASTEKSNIIRGWIFGTTLDSKTQSLLIVNNATNVVIKVCEFQFCNDPFLGVYYHKNNKSWMESEFRVYSSANNCTFEYVSQPFLMDLEGKQGNFKNLREFVFKNIDGYFKIYSKHTPINLVRDLPQGFSALEPLVDLPIGINITRFQTLLALHRSYLTPGDSSSGWTAGAAAYYVGYLQPRTFLLKYNENGTITDAVDCALDPLSETKCTLKSFTVEKGIYQTSNFRVQPTESIVRFPNITNLCPFGEVFNATRFASVYAWNRKRISNCVADYSVLYNSASFSTFKCYGVSPTKLNDLCFTNVYADSFVIRGDEVRQIAPGQTGKIADYNYKLPDDFTGCVIAWNSNNLDSKVGGNYNYLYRLFRKSNLKPFERDISTEIYQAGSTPCNGVEGFNCYFPLQSYGFQPTNGVGYQPYRVVVLSFELLHAPATVCGPKKSTNLVKNKCVNFNFNGLTGTGVLTESNKKFLPFQQFGRDIADTTDAVRDPQTLEILDITPCSFGGVSVITPGTNTSNQVAVLYQGVNCTEVPVAIHADQLTPTWRVYSTGSNVFQTRAGCLIGAEHVNNSYECDIPIGAGICASYQTQTNSPRRARSVASQSIIAYTMSLGAENSVAYSNNSIAICTNFTISVTTEILPVSMTKTSVDCTMYICGDSTECSNLLLQYGSFCTQLNRALTGIAVEQDKNTQEVFAQVKQIYKTPPIKDFGGFNFSQILPDPSKPSKRSFIEDLLFNKVTLADAGFIKQYGDCLGDIVARDLICAQKFNGLTVLPPLLTDEMIAQYTSALLAGTITSGWTFGAGAALQIPFAMQMAYRFNGIGVTQNVLYENQKLIANQFNSAIGKIQDSLSSTASALGKLQDVVNQNAQALNTLVKQLSSNFGAISSVLNDILSRLDKVEAEVQIDRLITGRLQSLQTYVTQQLIRAAEIRASANLAATKMSECVLGQSKRVDFCGKGYHLMSFPQSAPHGVVFLHVTYVCAQEKNFTTAPAICHDGKAHFPREGVFVSNGTHWFVTQRNFYEPQIITTDNTFVSGNCDVVIGIVNNTVYDPLQPELDSGGGGSDIIKLLNEQVNKEMQSSNLYMSMSSWCYTHSLDGAGLFLFDHAAEEYEHAKKLIIFLNENNVPVQLTSISAPEHKFEGLTQIFQKAYEHEQHISESINNIVDHAIKSKDHATFNFLQWYVAEQHEEEVLFKDILDKIELIGNENHGLYLADQYVKGIAKSRKS

SEQ ID NO: 9162 - protein, 1315 aa, Artificial Sequence
  SARS-CoV-2/USA/WA-UW291/2020__EPI_ISL_418076 spike protein (1-1147)(P715C_P1069C) Ferritin construct
MFVFLVLLPLVSSQCVNLTTRTQLPPAYTNSFTRGVYYPDKVFRSSVLHSTQDLFLPFFSNVTWFHAIHVSGTNGTKRFDNPVLPFNDGVYFASTEKSNIIRGWIFGTTLDSKTQSLLIVNNATNVVIKVCEFQFCNDPFLGVYYHKNNKSWMESEFRVYSSANNCTFEYVSQPFLMDLEGKQGNFKNLREFVFKNIDGYFKIYSKHTPINLVRDLPQGFSALEPLVDLPIGINITRFQTLLALHRSYLTPGDSSSGWTAGAAAYYVGYLQPRTFLLKYNENGTITDAVDCALDPLSETKCTLKSFTVEKGIYQTSNFRVQPTESIVRFPNITNLCPFGEVFNATRFASVYAWNRKRISNCVADYSVLYNSASFSTFKCYGVSPTKLNDLCFTNVYADSFVIRGDEVRQIAPGQTGKIADYNYKLPDDFTGCVIAWNSNNLDSKVGGNYNYLYRLFRKSNLKPFERDISTEIYQAGSTPCNGVEGFNCYFPLQSYGFQPTNGVGYQPYRVVVLSFELLHAPATVCGPKKSTNLVKNKCVNFNFNGLTGTGVLTESNKKFLPFQQFGRDIADTTDAVRDPQTLEILDITPCSFGGVSVITPGTNTSNQVAVLYQGVNCTEVPVAIHADQLTPTWRVYSTGSNVFQTRAGCLIGAEHVNNSYECDIPIGAGICASYQTQTNSPRRARSVASQSIIAYTMSLGAENSVAYSNNSIAICTNFTISVTTEILPVSMTKTSVDCTMYICGDSTECSNLLLQYGSFCTQLNRALTGIAVEQDKNTQEVFAQVKQIYKTPPIKDFGGFNFSQILPDPSKPSKRSFIEDLLFNKVTLADAGFIKQYGDCLGDIAARDLICAQKFNGLTVLPPLLTDEMIAQYTSALLAGTITSGWTFGAGAALQIPFAMQMAYRFNGIGVTQNVLYENQKLIANQFNSAIGKIQYSLSSTASALGKLQDVVNQNAQALNTLVKQLSSNFGAISSVLNDILSRLDKVEAEVQIDRLITGRLQSLQTYVTQQLIRAAEIRASANLAATKMSECVLGQSKRVDFCGKGYHLMSFPQSAPHGVVFLHVTYVCAQEKNFTTAPAICHDGKAHFPREGVFVSNGTHWFVTQRNFYEPQIITTDNTFVSGNCDVVIGIVNNTVYDPLQPELDSGGGGSDIIKLLNEQVNKEMQSSNLYMSMSSWCYTHSLDGAGLFLFDHAAEEYEHAKKLIIFLNENNVPVQLTSISAPEHKFEGLTQIFQKAYEHEQHISESINNIVDHAIKSKDHATFNFLQWYVAEQHEEEVLFKDILDKIELIGNENHGLYLADQYVKGIAKSRKS

SEQ ID NO: 9163 - protein, 1315 aa, Artificial Sequence; identical to SEQ ID NO: 9126
  SARS-CoV-2/Portugal/PT0034/2020__EPI_ISL_418019 spike protein (1-1147)(P715C_P1069C) Ferritin construct

SEQ ID NO: 9164 - protein, 1315 aa, Artificial Sequence; identical to SEQ ID NO: 9118
  SARS-CoV-2/Iceland/202/2020__EPI_ISL_417750 spike protein (1-1147)(P715C_P1069C) Ferritin construct

SEQ ID NO: 9165 - protein, 1315 aa, Artificial Sequence
  SARS-CoV-2/USA/WA-UW261/2020__EPI_ISL_418046 spike protein (1-1147)(P715C_P1069C) Ferritin construct
MFVFLVLLPLVSSQCVNLTTRTQLPPAYTNSFTRGVYYPDKVFRSSVLHSTQDLFLPFFSNVTWFHAIHVSGTNGTKRFDNPVLPFNDGVYFASTEKSNIIRGWIFGTTLDSKTQSLLIVNNATNVVIKVCEFQFCNDPFLGVYYHKNNKSWMESEFRVYSSANNCTFEYVSQPFLMDLEGKQGNFKNLREFVFKNIDGYFKIYSKHTPINLVRDLPQGFSALEPLVDLPIGINITRFQTLLALHRSYLTPGDSSSGWTAGAAAYYVGYLQPRTFLLKYNENGTITDAVDCALDPLSETKCTLKSFTVEKGIYQTSNFRVQPTESIVRFPNITNLCPFGEVFNATRFTSVYAWNRKRISNCVADYSVLYNSASFSTFKCYGVSPTKLNDLCFTNVYADSFVIRGDEVRQIAPGQTGKIADYNYKLPDDFTGCVIAWNSNNLDSKVGGNYNYLYRLFRKSNLKPFERDISTEIYQAGSTPCNGVEGFNCYFPLQSYGFQPTNGVGYQPYRVVVLSFELLHAPATVCGPKKSTNLVKNKCVNFNFNGLTGTGVLTESNKKFLPFQQFGRDIADTTDAVRDPQTLEILDITPCSFGGVSVITPGTNTSNQVAVLYQDVNCTEVPVAIHADQLTPTWRVYSTGSNVFQTRAGCLIGAEHVNNSYECDIPIGAGICASYQTQTNSPRRARSVASQSIIAYTMSLGAENSVAYSNNSIAICTNFTISVTTEILPVSMTKTSVDCTMYICGDSTECSNLLLQYGSFCTQLNRALTGIAVEQDKNTQEVFAQVKQIYKTPPIKDFGGFNFSQILPDPSKPSKRSFIEDLLFNKVTLADAGFIKQYGDCLGDIAARDLICAQKFNGLTVLPPLLTDEMIAQYTSALLAGTITSGWTFGAGAALQIPFAMQMAYRFNGIGVTQNVLYENQKLIANQFNSAIGKIQDSLSSTASALGKLQDVVNQNAQALNTLVKQLSSNFGAISSVLNDILSRLDKVEAEVQIDRLITGRLQSLQTYVTQQLIRAAEIRASANLAATKMSECVLGQSKRVDFCGKGYHLMSFPQSAPHGVVFLHVTYVCAQEKNFTTAPAICHDGKAHFPREGVFVSNGTHWFVTQRNFYEPQIITTDNTFVSGNCDVVIGIVNNTVYDPLQPELDSGGGGSDIIKLLNEQVNKEMQSSNLYMSMSSWCYTHSLDGAGLFLFDHAAEEYEHAKKLIIFLNENNVPVQLTSISAPEHKFEGLTQIFQKAYEHEQHISESINNIVDHAIKSKDHATFNFLQWYVAEQHEEEVLFKDILDKIELIGNENHGLYLADQYVKGIAKSRKS

SEQ ID NO: 9166 - protein, 1315 aa, Artificial Sequence
  SARS-CoV-2/Portugal/PT0035/2020__EPI_ISL_418020 spike protein (1-1147)(P715C_P1069C) Ferritin construct
MFVFLVLLPLVSSQCVNLTTRTQLPPAYTNSFTRGVYYPDKVFRSSVLHSTQDLFLPFFSNVTWFHAIHVSGTNGTKRFDNPVLPFNDGVYFASTEKSNIIRGWIFGTTLDSKTQSLLIVNNATNVVIKVCEFQFCNDPFLGVYYHKNNKSWMESEFRVYSSANNCTFEYVSQPFLMDLEGKQGNFKNLREFVFKNIDGYFKIYSKHTPINLVRDLPQGFSALEPLVDLPIGINITRFQTLLALHRSYLTPGDSSSGWTAGAAAYYVGYLQPRTFLLKYNENGTITDAVDCALDPLSETKCTLKSFTVEKGIYQTSNFRVQPTESIVRFPNITNLCPFGEVFNATRFASVYAWNRKRISNCVADYSVLYNSASFSTFKCYGVSPTKLNDLCFTNVYADSFVIRGDEVRQIAPGQTGKIADYNYKLPDDFTGCVIAWNSNNLDSKVGGNYNYLYRLFRKSNLKPFERDISTEIYQAGSTPCNGVEGFNCYFPLQSYGFQPTNGVGYQPYRVVVLSFELLHAPATVCGPKKSTNLVKNKCVNFNFNGLTGTGVLTESNKKFLPFQQFGRDIADTTDAVRDPQTLEILDITPCSFGGVSVITPGTNTSNQVAVLYQDVNCTEVPVAIHADQLTPTWRVYSTGSNVFQTRAGCLIGAEHVNNSYECDIPIGAGICASYQTQTNSPRRARSVASQSIIAYTMSLGAENSVAYSNNSIAICTNFTISVTTEILPVSMTKTSVDCTMYICGDSTECSNLLLQYGSFCTQLNRALTGIAVEQDKNTQEVFAQVKQIYKTPPIKDFGGFNFSQILPDPSKPSKRSFIEDLLFNKVTLADAGFIKQYGDCLGDISARDLICAQKFNGLTVLPPLLTDEMIAQYTSALLAGTITSGWTFGAGAALQIPFAMQMAYRFNGIGVTQNVLYENQKLIANQFNSAIGKIQDSLSSTASALGKLQDVVNQNAQALNTLVKQLSSNFGAISSVLNDILSRLDKVEAEVQIDRLITGRLQSLQTYVTQQLIRAAEIRASANLAATKMSECVLGQSKRVDFCGKGYHLMSFPQSAPHGVVFLHVTYVCAQEKNFTTAPAICHDGKAHFPREGVFVSNGTHWFVTQRNFYEPQIITTDNTFVSGNCDVVIGIVNNTVYDPLQPELDSGGGGSDIIKLLNEQVNKEMQSSNLYMSMSSWCYTHSLDGAGLFLFDHAAEEYEHAKKLIIFLNENNVPVQLTSISAPEHKFEGLTQIFQKAYEHEQHISESINNIVDHAIKSKDHATFNFLQWYVAEQHEEEVLFKDILDKIELIGNENHGLYLADQYVKGIAKSRKS

SEQ ID NO: 9167 - protein, 1315 aa, Artificial Sequence
  SARS-CoV-2/USA/NY-NYUMC7/2020__EPI_ISL_418192 spike protein (1-1147)(P715C_P1069C) Ferritin construct
MFVFLVLLPLVSSQCVNLTTRTQLPPAYTNSFTRGVYYPDKVFRSSVLHSTQDLFLPFFSNVTWFHAIHVSGTNGTKRFDNPVLPFNDGVYFASTEKSNIIRGWIFGTTLDSKTQSLLIVNNATNVVIKVCEFQFCNDPFLGVYHHKNNKSWMESEFRVYSSANNCTFEYVSQPFLMDLEGKQGNFKNLREFVFKNIDGYFKIYSKHTPINLVRDLPQGFSALEPLVDLPIGINITRFQTLLALHRSYLTPGDSSSGWTAGAAAYYVGYLQPRTFLLKYNENGTITDAVDCALDPLSETKCTLKSFTVEKGIYQTSNFRVQPTESIVRFPNITNLCPFGEVFNATRFASVYAWNRKRISNCVADYSVLYNSASFSTFKCYGVSPTKLNDLCFTNVYADSFVIRGDEVRQIAPGQTGKIADYNYKLPDDFTGCVIAWNSNNLDSKVGGNYNYLYRLFRKSNLKPFERDISTEIYQAGSTPCNGVEGFNCYFPLQSYGFQPTNGVGYQPYRVVVLSFELLHAPATVCGPKKSTNLVKNKCVNFNFNGLTGTGVLTESNKKFLPFQQFGRDIADTTDAVRDPQTLEILDITPCSFGGVSVITPGTNTSNQVAVLYQGVNCTEVPVAIHADQLTPTWRVYSTGSNVFQTRAGCLIGAEHVNNSYECDIPIGAGICASYQTQTNSPRRARSVASQSIIAYTMSLGAENSVAYSNNSIAICTNFTISVTTEILPVSMTKTSVDCTMYICGDSTECSNLLLQYGSFCTQLNRALTGIAVEQDKNTQEVFAQVKQIYKTPPIKDFGGFNFSQILPDPSKPSKRSFIEDLLFNKVTLADAGFIKQYGDCLGDIAARDLICAQKFNGLTVLPPLLTDEMIAQYTSALLAGTITSGWTFGAGAALQIPFAMQMAYRFNGIGVTQNVLYENQKLIANQFNSAIGKIQDSLSSTASALGKLQDVVNQNAQALNTLVKQLSSNFGAISSVLNDILSRLDKVEAEVQIDRLITGRLQSLQTYVTQQLIRAAEIRASANLAATKMSECVLGQSKRVDFCGKGYHLMSFPQSAPHGVVFLHVTYVCAQEKNFTTAPAICHDGKAHFPREGVFVSNGTHWFVTQRNFYEPQIITTDNTFVSGNCDVVIGIVNNTVYDPLQPELDSGGGGSDIIKLLNEQVNKEMQSSNLYMSMSSWCYTHSLDGAGLFLFDHAAEEYEHAKKLIIFLNENNVPVQLTSISAPEHKFEGLTQIFQKAYEHEQHISESINNIVDHAIKSKDHATFNFLQWYVAEQHEEEVLFKDILDKIELIGNENHGLYLADQYVKGIAKSRKS

SEQ ID NO: 9168 - protein, 1315 aa, Artificial Sequence
  SARS-CoV-2/Iceland/189/2020__EPI_ISL_417709 spike protein (1-1147)(P715C_P1069C) Ferritin construct
MFVFLVLLPLVSSQCVNLTTRTQLPPAYTNSFTRGVYYPDKVFRSSVLHSTQDLFLPFFSNVTWFHAIHVSGTNGTKRFDNPVLPFNDGVYFASTEKSNIIRGWIFGTTLDSKTQSLLIVNNATNVVIKVCEFQFCNDPFLGVYYHKNNKSWMESEFRVYSSANNCTFEYVSQPFLMDLEGKQGNFKNLREFVFKNIDGYFKIYSKHTPINLVRDLPQGFSALEPLVDLPIGINITRFQTLLALHRSYLTPGDSSSGWTAGAAAYYVGYLQPRTFLLKYNENGTITDAVDCALDPLSETKCTLKSFTVEKGIYQTSNFRVQPTESIVRFPNITNLCPFGEVFNATRFASVYAWNRKRISNCVADYSVLYNSASFSTFKCYGVSPTKLNDLCFTNVYADSFVIRGDEVRQIAPGQTGKIADYNYKLPDDFTGCVIAWNSNNLDSKVGGNYNYLYRLFRKSNLKPFERDISTEIYQAGSTPCNGVEGFNCYFPLQSYGFQPTNGVGYQPYRVVVLSFELLHAPATVCGPKKSTNLVKNKCVNFNFNGLTGTGVLTESNKKFLPFQQFGRDIADTTDAVRDPQTLEILDITPCSFGGVSVITPGTNTSNQVAVLYQGVNCTEVPVAIHADQLTPTWRVYSTGSNVFQTRAGCLIGAEHVNNSYECDIPIGAGICASYQTQTNSPRRARSVASQSIIAYTMSLGAENSVAYSNNSIAICTNFTISVTTEILPVSMTKTSVDCTMYICGDSTECSNLLLQYGSFCTQLNRALTGIAVEQDKNTQEVFAQVKQIYKTPPIKDFGGFNFSQILPDPSKPSKRSFIEDLLFNKVTLADAGFTKQYGDCLGDIAARDLICAQKFNGLTVLPPLLTDEMIAQYTSALLAGTITSGWTFGAGAALQIPFAMQMAYRFNGIGVTQNVLYENQKLIANQFNSAIGKIQDSLSSTASALGKLQDVVNQNAQALNTLVKQLSSNFGAISSVLNDILSRLDKVEAEVQIDRLITGRLQSLQTYVTQQLIRAAEIRASANLAATKMSECVLGQSKRVDFCGKGYHLMSFPQSAPHGVVFLHVTYVCAQEKNFTTAPAICHDGKAHFPREGVFVSNGTHWFVTQRNFYEPQIITTDNTFVSGNCDVVIGIVNNTVYDPLQPELDSGGGGSDIIKLLNEQVNKEMQSSNLYMSMSSWCYTHSLDGAGLFLFDHAAEEYEHAKKLIIFLNENNVPVQLTSISAPEHKFEGLTQIFQKAYEHEQHISESINNIVDHAIKSKDHATFNFLQWYVAEQHEEEVLFKDILDKIELIGNENHGLYLADQYVKGIAKSRKS

SEQ ID NO: 9169 - protein, 1315 aa, Artificial Sequence
  SARS-CoV-2/Australia/NSW56/2020__EPI_ISL_417408 spike protein (1-1147)(P715C_P1069C) Ferritin construct
MFVFLVLLPLVSSQCVNLTTRTQLPPAYTNSFTRGVYYPDKVFRSSVLHSTQDLFLPFFSNVTWFHAIHVSGTNGTKRFDNPVLPFNDGVYFASTEKSNIIRGWIFGTTLDSKTQSLLIVNNATNVVIKVCEFQFCNDPFLGVYYHKNNKSWMESEFRVYSSANNCTFEYVSQPFLMDLEGKQGNFKNLREFVFKNIDGYFKIYSKHTPINLVRDLPQGFSALEPLVDLPIGINITRFQTLLALHRSYLTPGDSSSGWTAGAAAYYVGYLQPRTFLLKYNENGTITDAVDCALDPLSETKCTLKSFTVEKGIYQTSNFRVQPTESIVRFPNITNLCPFGEVFNATRFASVYAWNRKRISNCVADYSVLYNSASFSTFKCYGVSPTKLNDLCFTNVYADSFVIRGDEVRQIAPGQTGKIADYNYKLPDDFTGCVIAWNSNNLDSKVGGNYNYLYRLFRKSNLKPFERDISTEIYQAGSTPCNGVEGFNCYFPLQSYGFQPTNGVGYQPYRVVVLSFELLHAPATVCGPKKSTNLVKNKCVNFNFNGLTGTGVLTESNKKFLPFQQFGRDIADTTDAVRDPQTLEILDITPCSFGGVSVITPGTNTSNQVAVLYQDVNCTEVPVAIHADQLTPTWRVYSTGSNVFQTRAGCLIGAEHVNNSYECDIPIGAGICASYQTQTNSPRRARSVASQSIIAYTMSLGAENSVAYSNNSIAICTNFTISVTTEILPVSMTKTSVDCTMYICGDSTECSNLLLQYGSFCTQLNRALTGIAVEQDKNTQEVFAQVKQIYKTPPIKDFGGFNFSQILPDSSKPSKRSFIEDLLFNKVTLADAGFIKQYGDCLGDIAARDLICAQKFNGLTVLPPLLTDEMIAQYTSALLAGTITSGWTFGAGAALQIPFAMQMAYRFNGIGVTQNVLYENQKLIANQFNSAIGKIQDSLSSTASALGKLQDVVNQNAQALNTLVKQLSSNFGAISSVLNDILSRLDKVEAEVQIDRLITGRLQSLQTYVTQQLIRAAEIRASANLAATKMSECVLGQSKRVDFCGKGYHLMSFPQSAPHGVVFLHVTYVCAQEKNFTTAPAICHDGKAHFPREGVFVSNGTHWFVTQRNFYEPQIITTDNTFVSGNCDVVIGIVNNTVYDPLQPELDSGGGGSDIIKLLNEQVNKEMQSSNLYMSMSSWCYTHSLDGAGLFLFDHAAEEYEHAKKLIIFLNENNVPVQLTSISAPEHKFEGLTQIFQKAYEHEQHISESINNIVDHAIKSKDHATFNFLQWYVAEQHEEEVLFKDILDKIELIGNENHGLYLADQYVKGIAKSRKS

SEQ ID NO: 9170 - protein, 1315 aa, Artificial Sequence
  SARS-CoV-2/Iceland/280/2020__EPI_ISL_417608 spike protein (1-1147)(P715C_P1069C) Ferritin construct
MFVFLVLLPLVSSQCVNLTTRTQLPPAYTNSFTRGVYYPDKVFRSSVLHSTQDLFLPFFSNVTWFHAIHVSGTNGTKRFDNPVLPFNDGVYFASTEKSNIIRGWIFGTTLDSKTQSLLIVNNATNVVIKVCEFQFCNDPFLGVYYHKNNKSWMESEFRVYSSANNCTFEYVSQPFLMDLEGKQGNFKNLREFVFKNIDGYFKIYSKHTPINLVRDLPQGFSALEPLVDLPIGINITRFQTLLALHRSYLTPGDSSSGWTAGAAAYYVGYLQPRTFLLKYNENGTITDAVDCALDPLSETKCTLKSFTVEKGIYQTSNFRVQPTESIVRFPNITNLCPFGEVFNATRFASVYAWNRKRISNCVADYSVLYNSASFSTFKCYGVSPTKLNDLCFTNVYADSFVIRGDEVRQIAPGQTGKIADYNYKLPDDFTGCVIAWNSNNLDSKVGGNYNYLYRLFRKSNLKPFERDISTEIYQAGSTPCNGVEGFNCYFPLQSYGFQPTNGVGYQPYRVVVLSFELLHAPATVCGPKKSTNLVKNKCVNFNFNGLTGTGVLTESNKKFLPFQQFGRDIADTTDAVRDPQTLEILDITPCSFGGVSVITPGTNTSNQVAVLYQGVNCTEVPVAIHADQLTPTWRVYSTGSNVFQTRAGCLIGAEHVNNSYECDIPIGAGICASYHTQTNSPRRARSVASQSIIAYTMSLGAENSVAYSNNSIAICTNFTISVTTEILPVSMTKTSVDCTMYICGDSTECSNLLLQYGSFCTQLNRALTGIAVEQDKNTQEVFAQVKQIYKTPPIKDFGGFNFSQILPDPSKPSKRSFIEDLLFNKVTLADAGFIKQYGDCLGDIAARDLICAQKFNGLTVLPPLLTDEMIAQYTSALLAGTITSGWTFGAGAALQIPFAMQMAYRFNGIGVTQNVLYENQKLIANQFNSAIGKIQDSLSSTASALGKLQDVVNQNAQALNTLVKQLSSNFGAISSVLNDILSRLDKVEAEVQIDRLITGRLQSLQTYVTQQLIRAAEIRASANLAATKMSECVLGQSKRVDFCGKGYHLMSFPQSAPHGVVFLHVTYVCAQEKNFTTAPAICHDGKAHFPREGVFVSNGTHWFVTQRNFYEPQIITTDNTFVSGNCDVVIGIVNNTVYDPLQPELDSGGGGSDIIKLLNEQVNKEMQSSNLYMSMSSWCYTHSLDGAGLFLFDHAAEEYEHAKKLIIFLNENNVPVQLTSISAPEHKFEGLTQIFQKAYEHEQHISESINNIVDHAIKSKDHATFNFLQWYVAEQHEEEVLFKDILDKIELIGNENHGLYLADQYVKGIAKSRKS

SEQ ID NO: 9171 - protein, 1315 aa, Artificial Sequence; identical to SEQ ID NO: 9126
  SARS-CoV-2/Iceland/247/2020__EPI_ISL_417575 spike protein (1-1147)(P715C_P1069C) Ferritin construct

SEQ ID NO: 9172 - protein, 1315 aa, Artificial Sequence
  SARS-CoV-2/Iceland/238/2020__EPI_ISL_417566 spike protein (1-1147)(P715C_P1069C) Ferritin construct
MFVFLVLLPLVSSQCVNLTTRTQLPPAYTNSFTRGVYYPDKVFRSSVLHSTQDLFLPFFSNVTWFHAIHVSGTNGTKRFDNPVLPFNDGVYFASTEKSNIIRGWIFGTTLDSKTQSLLIVNNATNVVIKVCEFQFCNDPFLGVYYHKNNKSWMESEFRVYSSANNCTFEYVSQPFLMDLEGKQGNFKNLREFVFKNIDGYFKIYSKHTPINLVRDLPQGFSALEPLVDLPIGINITRFQTLLALHRSYLTPGDSSSGWTAGAAAYYVGYLQPRTFLLKYNENGTITDAVDCALDPLSETKCTLKSFTVEKGIYQTSNFRVQPTESIVRFPNITNLCPFGEVFNATRFASVYAWNRKRISNCVADYSVLYNSASFSTFKCYGVSPTKLNDLCFTNVYADSFVIRGDEVRQIAPGQTGKIADYNYKLPDDFTGCVIAWNSNNLDSKVGGNYNYLYRLFRKSNLKPFERDISTEIYQAGSTPCNGVEGFNCYFPLQSYGFQPTNGVGYQPYRVVVLSFELLHAPATVCGPKKSTNLVKNKCVNFNFNGLTGTGVLTESNKKFLPFQQFGRDIADTTDAVRDPQTLEILDITPCSFGGVSVITPGTNTSNQVAVLYQGVNCTEVPVAIHADQLTPTWRVYSTGSNVFQTRAGCLIGAEHVNNSYECDIPIGAGICASYQTQTNSPRRARSVASQSIIAYTMSLGAENSVAYSNNSIAICTNFTISVTTEILPVSMTKTSVDCTMYICGDSTECSNLLLQYGSFCTQLNRALTGIAVEQDKNTQEVFAQVKQIYKTPPIKDFGGFNFSQILPDPSKPSKRSFIEDLLFNKVTLADVGFIKQYGDCLGDIAARDLICAQKFNGLTVLPPLLTDEMIAQYTSALLAGTITSGWTFGAGAALQIPFAMQMAYRFNGIGVTQNVLYENQKLIANQFNSAIGKIQDSLSSTASALGKLQDVVNQNAQALNTLVKQLSSNFGAISSVLNDILSRLDKVEAEVQIDRLITGRLQSLQTYVTQQLIRAAEIRASANLAATKMSECVLGQSKRVDFCGKGYHLMSFPQSAPHGVVFLHVTYVCAQEKNFTTAPAICHDGKAHFPREGVFVSNGTHWFVTQRNFYEPQIITTDNTFVSGNCDVVIGIVNNTVYDPLQPELDSGGGGSDIIKLLNEQVNKEMQSSNLYMSMSSWCYTHSLDGAGLFLFDHAAEEYEHAKKLIIFLNENNVPVQLTSISAPEHKFEGLTQIFQKAYEHEQHISESINNIVDHAIKSKDHATFNFLQWYVAEQHEEEVLFKDILDKIELIGNENHGLYLADQYVKGIAKSRKS

SEQ ID NO: 9173 - protein, 1315 aa, Artificial Sequence
  SARS-CoV-2/Greece/16/2020__EPI_ISL_418265 spike protein (1-1147)(P715C_P1069C) Ferritin construct
MFVFLVLLPLVSSQCVNLTTRTQLPPAYTNSFTRGVYYPDKVFRSSVLHSTQDLFLPFFSNVTWFHAIHVSGTNGTKRFDNPVLPFNDGVYFASTEKSNIIRGWIFGTTLDSKTQSLLIVNNATNVVIKVCEFQFCNDPFLGVYYHKNNKSWMESEFRVYSSANNCTFEYVSQPFLMDLEGKQGNFKNLREFVFKNVDGYFKIYSKHTPINLVRDLPQGFSALEPLVDLPIGINITRFQTLLALHRSYLTPGDSSSGWTAGAAAYYVGYLQPRTFLLKYNENGTITDAVDCALDPLSETKCTLKSFTVEKGIYQTSNFRVQPTESIVRFPNITNLCPFGEVFNATRFASVYAWNRKRISNCVADYSVLYNSASFSTFKCYGVSPTKLNDLCFTNVYADSFVIRGDEVRQIAPGQTGKIADYNYKLPDDFTGCVIAWNSNNLDSKVGGNYNYLYRLFRKSNLKPFERDISTEIYQAGSTPCNGVEGFNCYFPLQSYGFQPTNGVGYQPYRVVVLSFELLHAPATVCGPKKSTNLVKNKCVNFNFNGLTGTGVLTESNKKFLPFQQFGRDIADTTDAVRDPQTLEILDITPCSFGGVSVITPGTNTSNQVAVLYQDVNCTEVPVAIHADQLTPTWRVYSTGSNVFQTRAGCLIGAEHVNNSYECDIPIGAGICASYQTQTNSPRRARSVASQSIIAYTMSLGAENSVAYSNNSIAICTNFTISVTTEILPVSMTKTSVDCTMYICGDSTECSNLLLQYGSFCTQLNRALTGIAVEQDKNTQEVFAQVKQIYKTPPIKDFGGFNFSQILPDPSKPSKRSFIEDLLFNKVTLADAGFIKQYGDCLGDIAARDLICAQKFNGLTVLPPLLTDEMIAQYTSALLAGTITSGWTFGAGAALQIPFAMQMAYRFNGIGVTQNVLYENQKLIANQFNSAIGKIQDSLSSTASALGKLQDVVNQNAQALNTLVKQLSSNFGAISSVLNDILSRLDKVEAEVQIDRLITGRLQSLQTYVTQQLIRAAEIRASANLAATKMSECVLGQSKRVDFCGKGYHLMSFPQSAPHGVVFLHVTYVCAQEKNFTTAPAICHDGKAHFPREGVFVSNGTHWFVTQRNFYEPQIITTDNTFVSGNCDVVIGIVNNTVYDPLQPELDSGGGGSDIIKLLNEQVNKEMQSSNLYMSMSSWCYTHSLDGAGLFLFDHAAEEYEHAKKLIIFLNENNVPVQLTSISAPEHKFEGLTQIFQKAYEHEQHISESINNIVDHAIKSKDHATFNFLQWYVAEQHEEEVLFKDILDKIELIGNENHGLYLADQYVKGIAKSRKS

SEQ ID NO: 9174 - protein, 1315 aa, Artificial Sequence
  SARS-CoV-2/Iceland/319/2020__EPI_ISL_417648 spike protein (1-1147)(P715C_P1069C) Ferritin construct
MFVFLVLLPLVSSQCVNLTTRTQLPPAYTNSFTRGVYYPDKVFRSSVLHSTQDLFLPFFSNVTWFHAIHVSGTNGTKRFDNPVLPFNDGVYFASTEKSNIIRGWIFGTTLDSKTQSLLIVNNATNVVIKVCEFQFCNDPFLGVYYHKNNKSWMESEFRVYSSANNCTFEYVSQPFLIDLEGKQGNFKNLREFVFKNIDGYFKIYSKHTPINLVRDLPQGFSALEPLVDLPIGINITRFQTLLALHRSYLTPGDSSSGWTAGAAAYYVGYLQPRTFLLKYNENGTITDAVDCALDPLSETKCTLKSFTVEKGIYQTSNFRVQPTESIVRFPNITNLCPFGEVFNATRFASVYAWNRKRISNCVADYSVLYNSASFSTFKCYGVSPTKLNDLCFTNVYADSFVIRGDEVRQIAPGQTGKIADYNYKLPDDFTGCVIAWNSNNLDSKVGGNYNYLYRLFRKSNLKPFERDISTEIYQAGSTPCNGVEGFNCYFPLQSYGFQPTNGVGYQPYRVVVLSFELLHAPATVCGPKKSTNLVKNKCVNFNFNGLTGTGVLTESNKKFLPFQQFGRDIADTTDAVRDPQTLEILDITPCSFGGVSVITPGTNTSNQVAVLYQGVNCTEVPVAIHADQLTPTWRVYSTGSNVFQTRAGCLIGAEHVNNSYECDIPIGAGICASYQTQTNSPRRARSVASQSIIAYTMSLGAENSVAYSNNSIAICTNFTISVTTEILPVSMTKTSVDCTMYICGDSTECSNLLLQYGSFCTQLNRALTGIAVEQDKNTQEVFAQVKQIYKTPPIKDFGGFNFSQILPDPSKPSKRSFIEDLLFNKVTLADAGFIKQYGDCLGDIAARDLICAQKFNGLTVLPPLLTDEMIAQYTSALLAGTITSGWTFGAGAALQIPFAMQMAYRFNGIGVTQNVLYENQKLIANQFNSAIGKIQDSLSSTASALGKLQDVVNQNAQALNTLVKQLSSNFGAISSVLNDILSRLDKVEAEVQIDRLITGRLQSLQTYVTQQLIRAAEIRASANLAATKMSECVLGQSKRVDFCGKGYHLMSFPQSAPHGVVFLHVTYVCAQEKNFTTAPAICHDGKAHFPREGVFVSNGTHWFVTQRNFYEPQIITTDNTFVSGNCDVVIGIVNNTVYDPLQPELDSGGGGSDIIKLLNEQVNKEMQSSNLYMSMSSWCYTHSLDGAGLFLFDHAAEEYEHAKKLIIFLNENNVPVQLTSISAPEHKFEGLTQIFQKAYEHEQHISESINNIVDHAIKSKDHATFNFLQWYVAEQHEEEVLFKDILDKIELIGNENHGLYLADQYVKGIAKSRKS

SEQ ID NO: 9175 - protein, 1315 aa, Artificial Sequence
  SARS-CoV-2/Congo/94/2020__EPI_ISL_417947 spike protein (1-1147)(P715C_P1069C) Ferritin construct
MFVFLVLLPLVSSQCVNLTTRTQLPPAYTNSFTRGVYYPDKVFRSSVLHSTQDLFLPFFSNVTWFHAIHVSGTNGTKRFDNPVLPFNDGVYFASTEKSNIIRGWIFGTTLDSKTQSLLIVNNATNVVIKVCEFQFCNDPFLGVYYHKNNKSWMESEFRVYSSANNCTFEYVSQPFLMDLEGKQGNFKNLREFVFKNIDGYFKIYSKHTPINLVRDLPQGFSALEPLVDLPIGINITRFQTLLALHRSYLTPGDSSSGWTAGAAAYYVGYLQPRTFLLKYNENGTITDAVDCALDPLSETKCTLKSFTVEKGIYQTSNFRVQPTESIVRFPNITNLCPFGEVFNATRFASVYAWNRKRISNCVADYSVLYNSASFSTFKCYGVSPTKLNDLCFTNVYADSFVIRGDEVRQIAPGQTGKIADYNYKLPDDFTGCVIAWNSNNLDSKVGGNYNYLYRLFRKSNLKPFERDISTEIYQAGSTPCNGVEGFNCYFPLQSYGFQPTNGVGYQPYRVVVLSFELLHAPATVCGPKKSTNLVKNKCVNFNFNGLTGTGVLTESNKKFLPFQQFGRDIADTTDAVRDPQTLEILDITPCSFGGVSVITPGTNTSNQVAVLYQGVNCTEVPVAIHADQLTPTWRVYSTGSNVFQTRAGCLIGAEHVNNSYECDIPIGAGICASYQTQTNSPRRARSVASQSIIAYTMSLGAENSVAYSNNSIAICTNFTISVTTEILPVSMTKTSVDCTMYICGDSTECSNLLLQYGSFCTQLNRALTGIAVEQDKNTQEVFAQVKQIYKTPPIKDFGGFNFSQILPDPSKPSKRSFIEDILFNKVTLADAGFIKQYGDCLGDIAARDLICAQKFNGLTVLPPLLTDEMIAQYTSALLAGTITSGWTFGAGAALQIPFAMQMAYRFNGIGVTQNVLYENQKLIANQFNSAIGKIQDSLSSTASALGKLQDVVNQNAQALNTLVKQLSSNFGAISSVLNDILSRLDKVEAEVQIDRLITGRLQSLQTYVTQQLIRAAEIRASANLAATKMSECVLGQSKRVDFCGKGYHLMSFPQSAPHGVVFLHVTYVCAQEKNFTTAPAICHDGKAHFPREGVFVSNGTHWFVTQRNFYEPQIITTDNTFVSGNCDVVIGIVNNTVYDPLQPELDSGGGGSDIIKLLNEQVNKEMQSSNLYMSMSSWCYTHSLDGAGLFLFDHAAEEYEHAKKLIIFLNENNVPVQLTSISAPEHKFEGLTQIFQKAYEHEQHISESINNIVDHAIKSKDHATFNFLQWYVAEQHEEEVLFKDILDKIELIGNENHGLYLADQYVKGIAKSRKS

SEQ ID NO: 9176 - protein, 1315 aa, Artificial Sequence
  SARS-CoV-2/Congo/158/2020__EPI_ISL_417950 spike protein (1-1147)(P715C_P1069C) Ferritin construct
MFVFLVLLPLVSSQCVNLTTRTQLPPAYTNSFTRGVYYPDKVFRSSVLHSTQDLFLPFFSNVTWFHAIHVSGTNGTKRFDNPVLPFNDGVYFASTEKSNIIRGWIFGTTLDSKTQSLLIVNNATNVVIKVCEFQFCNDPFLGVYYHKNNKSWMESEFRVYSSANNCTFEYVSQPFLMDLEGKQGNFKNLREFVFKNIDGYFKIYSKHTPINLVRDLPQGFSALEPLVDLPIGINITRFQTLLALHRSYLTPGDSSSGWTAGAAAYYVGYLQPRTFLLKYNENGTITDAVDCALDPLSETKCTLKSFTVEKGIYQTSNFRVQPTESIVRFPNITNLCPFGEVFNATRFASVYAWNRKRISNCVADYSVLYNSASFSTFKCYGVSPTKLNDLCFTNVYADSFVIRGDEVRQIAPGQTGKIADYNYKLPDDFTGCVIAWNSNNLDSKVGGNYNYLYRLFRKSNLKPFERDISTEIYQAGSTPCNGVEGFNCYFPLQSYGFQPTNGVGYQPYRVVVLSFELLHAPATVCGPKKSTNLVKNKCVNFNFNGLTGTGVLTESNKKFLPFQQFGRDIADTTDAVRDPQTLEILDITPCSFGGVSVITPGTNTSNQVAVLYQDVNCTEVPVAIHADQLTPTWRVYSTGSNVFQTRAGCLIGAEHVNNSYECDIPIGAGICASYQTQTNSPRRARSVASQSIIAYTMSLGAENSVAYSNNSIAICTNFTISVTTEILPVSMTKTSVDCTMYICGDSTECSNLLLQYGSFCTQLNRALTGIAVEQDKNTQEVFAQVKQIYKTPPIKDFGGFNFSQILPDPSKPSKRSFIEDLLFNKVTLADAGFIKQYGDCLGDIAARDLICAQKFNGLTVLPPLLTDEMIAQYTSALLAGTITSGWTFGAGAALQIPFAMQMAYRFNGIGVTQNVLYENQKLIANQFNSAIGKIQDSLSSTASALGKLQDVVNQNAQALNTLVKQLSSNFGAISSVLNDILSRLDKVEAEVQIDRLITGRLQSLQTYVTQQLIRAAEIRASANLAATKMSECVLGQSKRVDFCGKGYHLMSFPQSAPHGVVFLHVTYVCAQEKNFTTAPAICHDGKAHFPREGVFVSNGTHWFVTQRNFYEPQIITTDNTFLSGNCDVVIGIVNNTVYDPLQPELDSGGGGSDIIKLLNEQVNKEMQSSNLYMSMSSWCYTHSLDGAGLFLFDHAAEEYEHAKKLIIFLNENNVPVQLTSISAPEHKFEGLTQIFQKAYEHEQHISESINNIVDHAIKSKDHATFNFLQWYVAEQHEEEVLFKDILDKIELIGNENHGLYLADQYVKGIAKSRKS

SEQ ID NO: 9177 - protein, 1315 aa, Artificial Sequence
  SARS-CoV-2/USA/UT-00034/2020__EPI_ISL_417977 spike protein (1-1147)(P715C_P1069C) Ferritin construct
MFVFLVLLPLVSSQCVNLTTRTQLPPAYTNSFTRGVYYPDKVFRSSVLHSTQDLFLPFFSNVTWFHAIHVSGTNGTKRFDNPVLPFNDGVYFASTEKSNIIRGWIFGTTLDSKTQSLLIVNNATNVVIKVCEFQFCNDPFLGVYYYKNNKSWMESEFRVYSSANNCTFEYVSQPFLMDLEGKQGNFKNLREFVFKNIDGYFKIYSKHTPINLVRDLPQGFSALEPLVDLPIGINITRFQTLLALHRSYLTPGDSSSGWTAGAAAYYVGYLQPRTFLLKYNENGTITDAVDCALDPLSETKCTLKSFTVEKGIYQTSNFRVQPTESIVRFPNITNLCPFGEVFNATRFASVYAWNRKRISNCVADYSVLYNSASFSTFKCYGVSPTKLNDLCFTNVYADSFVIRGDEVRQIAPGQTGKIADYNYKLPDDFTGCVIAWNSNNLDSKVGGNYNYLYRLFRKSNLKPFERDISTEIYQAGSTPCNGVEGFNCYFPLQSYGFQPTNGVGYQPYRVVVLSFELLHAPATVCGPKKSTNLVKNKCVNFNFNGLTGTGVLTESNKKFLPFQQFGRDIADTTDAVRDPQTLEILDITPCSFGGVSVITPGTNTSNQVAVLYQGVNCTEVPVAIHADQLTPTWRVYSTGSNVFQTRAGCLIGAEHVNNSYECDIPIGAGICASYQTQTNSPRRARSVASQSIIAYTMSLGAENSVAYSNNSIAICTNFTISVTTEILPVSMTKTSVDCTMYICGDSTECSNLLLQYGSFCTQLNRALTGIAVEQDKNTQEVFAQVKQIYKTPPIKDFGGFNFSQILPDPSKPSKRSFIEDLLFNKVTLADAGFIKQYGDCLGDIAARDLICAQKFNGLTVLPPLLTDEMIAQYTSALLAGTITSGWTFGAGAALQIPFAMQMAYRFNGIGVTQNVLYENQKLIANQFNSAIGKIQDSLSSTASALGKLQDVVNQNAQALNTLVKQLSSNFGAISSVLNDILSRLDKVEAEVQIDRLITGRLQSLQTYVTQQLIRAAEIRASANLAATKMSECVLGQSKRVDFCGKGYHLMSFPQSAPHGVVFLHVTYVCAQEKNFTTAPAICHDGKAHFPREGVFVSNGTHWFVTQRNFYEPQIITTDNTFVSGNCDVVIGIVNNTVYDPLQPELDSGGGGSDIIKLLNEQVNKEMQSSNLYMSMSSWCYTHSLDGAGLFLFDHAAEEYEHAKKLIIFLNENNVPVQLTSISAPEHKFEGLTQIFQKAYEHEQHISESINNIVDHAIKSKDHATFNFLQWYVAEQHEEEVLFKDILDKIELIGNENHGLYLADQYVKGIAKSRKS

SEQ ID NO: 9178 - protein, 1315 aa, Artificial Sequence
  SARS-CoV-2/USA/UT-00033/2020__EPI_ISL_417976 spike protein (1-1147)(P715C_P1069C) Ferritin construct
MFVFLVLLPLVSSQCVNLTTRTQLPPAYTNSFTRGVYYPDKVFRSSVLHSTQDLFLPFFSNVTWFHAIHVSGTNGTKRFDNPVLPFNDGVYFASTEKSNIIRGWIFGTTLDSKTQSLLIVNNATNVVIKVCEFQFCNDPFLGVYYHKNNKSWMESEFRVYSSANNCTFEYVSQPFLMDLEGKQGNFKNLREFVFKNIDGYFKIYSKHTPINLVRDLPQGFSALEPLVDLPIGINITRFQTLLALHRSYLTPGDSSSGLTAGAAAYYVGYLQPRTFLLKYNENGTITDAVDCALDPLSETKCTLKSFTVEKGIYQTSNFRVQPTESIVRFPNITNLCPFGEVFNATRFASVYAWNRKRISNCVADYSVLYNSASFSTFKCYGVSPTKLNDLCFTNVYADSFVIRGDEVRQIAPGQTGKIADYNYKLPDDFTGCVIAWNSNNLDSKVGGNYNYLYRLFRKSNLKPFERDISTEIYQAGSTPCNGVEGFNCYFPLQSYGFQPTNGVGYQPYRVVVLSFELLHAPATVCGPKKSTNLVKNKCVNFNFNGLTGTGVLTESNKKFLPFQQFGRDIADTTDAVRDPQTLEILDITPCSFGGVSVITPGTNTSNQVAVLYQGVNCTEVPVAIHADQLTPTWRVYSTGSNVFQTRAGCLIGAEHVNNSYECDIPIGAGICASYQTQTNSPRRARSVASQSIIAYTMSLGAENSVAYSNNSIAICTNFTISVTTEILPVSMTKTSVDCTMYICGDSTECSNLLLQYGSFCTQLNRALTGIAVEQDKNTQEVFAQVKQIYKTPPIKDFGGFNFSQILPDPSKPSKRSFIEDLLFNKVTLADAGFIKQYGDCLGDIAARDLICAQKFNGLTVLPPLLTDEMIAQYTSALLAGTITSGWTFGAGAALQIPFAMQMAYRFNGIGVTQNVLYENQKLIANQFNSAIGKIQDSLSSTASALGKLQDVVNQNAQALNTLVKQLSSNFGAISSVLNDILSRLDKVEAEVQIDRLITGRLQSLQTYVTQQLIRAAEIRASANLAATKMSECVLGQSKRVDFCGKGYHLMSFPQSAPHGVVFLHVTYVCAQEKNFTTAPAICHDGKAHFPREGVFVSNGTHWFVTQRNFYEPQIITTDNTFVSGNCDVVIGIVNNTVYDPLQPELDSGGGGSDIIKLLNEQVNKEMQSSNLYMSMSSWCYTHSLDGAGLFLFDHAAEEYEHAKKLIIFLNENNVPVQLTSISAPEHKFEGLTQIFQKAYEHEQHISESINNIVDHAIKSKDHATFNFLQWYVAEQHEEEVLFKDILDKIELIGNENHGLYLADQYVKGIAKSRKS

SEQ ID NO: 9179 - protein, 1315 aa, Artificial Sequence
  SARS-CoV-2/USA/WI-13/2020__EPI_ISL_417516 spike protein (1-1147)(P715C_P1069C) Ferritin construct
MFVFLVLLPLVSSQCVNLTTRTQLPPAYTNSFTRGVYYPDKVFRSSVLHSTQDLFLPFFSNVTWFHAIHVSGTNGTKRFDNPVLPFNDGVYFASTEKSNIIRGWIFGTTLDSKTQSLLIVNNATNVVIKVCEFQFCNDPFLGVYYHKNNKSWMESEFRVYSSANNCTFEYVSQPFLMDLEGKQGNFKNLREFVFKNIDGYFKIYSKHTPINLVRDLPQGFSALEPLVDLPIGINITRFQTLLALHRSYLTPGDSSSGWTAGAAAYYVGYLQPRTFLLKYNENGTITDAVDCALDPLSETKCTLKSFTVEKGIYQTSNFRVLPTESIVRFPNITNLCPFGEVFNATRFASVYAWNRKRISNCVADYSVLYNSASFSTFKCYGVSPTKLNDLCFTNVYADSFVIRGDEVRQIAPGQTGKIADYNYKLPDDFTGCVIAWNSNNLDSKVGGNYNYLYRLFRKSNLKPFERDISTEIYQAGSTPCNGVEGFNCYFPLQSYGFQPTNGVGYQPYRVVVLSFELLHAPATVCGPKKSTNLVKNKCVNFNFNGLTGTGVLTESNKKFLPFQQFGRDIADTTDAVRDPQTLEILDITPCSFGGVSVITPGTNTSNQVAVLYQGVNCTEVPVAIHADQLTPTWRVYSTGSNVFQTRAGCLIGAEHVNNSYECDIPIGAGICASYQTQTNSPRRARSVASQSIIAYTMSLGAENSVAYSNNSIAICTNFTISVTTEILPVSMTKTSVDCTMYICGDSTECSNLLLQYGSFCTQLNRALTGIAVEQDKNTQEVFAQVKQIYKTPPIKDFGGFNFSQILPDPSKPSKRSFIEDLLFNKVTLADAGFIKQYGDCLGDIAARDLICAQKFNGLTVLPPLLTDEMIAQYTSALLAGTITSGWTFGAGAALQIPFAMQMAYRFNGIGVTQNVLYENQKLIANQFNSAIGKIQDSLSSTASALGKLQDVVNQNAQALNTLVKQLSSNFGAISSVLNDILSRLDKVEAEVQIDRLITGRLQSLQTYVTQQLIRAAEIRASANLAATKMSECVLGQSKRVDFCGKGYHLMSFPQSAPHGVVFLHVTYVCAQEKNFTTAPAICHDGKAHFPREGVFVSNGTHWFVTQRNFYEPQIITTDNTFVSGNCDVVIGIVNNTVYDPLQPELDSGGGGSDIIKLLNEQVNKEMQSSNLYMSMSSWCYTHSLDGAGLFLFDHAAEEYEHAKKLIIFLNENNVPVQLTSISAPEHKFEGLTQIFQKAYEHEQHISESINNIVDHAIKSKDHATFNFLQWYVAEQHEEEVLFKDILDKIELIGNENHGLYLADQYVKGIAKSRKS

SEQ ID NO: 9180 - protein, 1314 aa, Artificial Sequence
  SARS-CoV-2/India/1-27/2020__EPI_ISL_413522 spike protein (1-1146)(P714C_P1068C) Ferritin construct
MFVFLVLLPLVSSQCVNLTTRTQLPPAYTNSFTRGVYYPDKVFRSSVLHSTQDLFLPFFSNVTWFHAIHVSGTNGTKRFDNPVLPFNDGVYFASTEKSNIIRGWIFGTTLDSKTQSLLIVNNATNVVIKVCEFQFCNDPFLGVYHKNNKSWMESEFRVYSSANNCTFEYVSQPFLMDLEGKQGNFKNLREFVFKNIDGYFKIYSKHTPINLVRDLPQGFSALEPLVDLPIGINITRFQTLLALHRSYLTPGDSSSGWTAGAAAYYVGYLQPRTFLLKYNENGTITDAVDCALDPLSETKCTLKSFTVEKGIYQTSNFRVQPTESIVRFPNITNLCPFGEVFNATRFASVYAWNRKRISNCVADYSVLYNSASFSTFKCYGVSPTKLNDLCFTNVYADSFVIRGDEVIQIAPGQTGKIADYNYKLPDDFTGCVIAWNSNNLDSKVGGNYNYLYRLFRKSNLKPFERDISTEIYQAGSTPCNGVEGFNCYFPLQSYGFQPTNGVGYQPYRVVVLSFELLHAPATVCGPKKSTNLVKNKCVNFNFNGLTGTGVLTESNKKFLPFQQFGRDIADTTDAVRDPQTLEILDITPCSFGGVSVITPGTNTSNQVAVLYQDVNCTEVPVAIHADQLTPTWRVYSTGSNVFQTRAGCLIGAEHVNNSYECDIPIGAGICASYQTQTNSPRRARSVASQSIIAYTMSLGAENSVAYSNNSIAICTNFTISVTTEILPVSMTKTSVDCTMYICGDSTECSNLLLQYGSFCTQLNRALTGIAVEQDKNTQEVFAQVKQIYKTPPIKDFGGFNFSQILPDPSKPSKRSFIEDLLFNKVTLADAGFIKQYGDCLGDIAARDLICAQKFNGLTVLPPLLTDEMIAQYTSALLAGTITSGWTFGAGAALQIPFAMQMAYRFNGIGVTQNVLYENQKLIANQFNSAIGKIQDSLSSTASALGKLQDVVNQNAQALNTLVKQLSSNFGAISSVLNDILSRLDKVEAEVQIDRLITGRLQSLQTYVTQQLIRAAEIRASANLAATKMSECVLGQSKRVDFCGKGYHLMSFPQSAPHGVVFLHVTYVCAQEKNFTTAPAICHDGKAHFPREGVFVSNGTHWFVTQRNFYEPQIITTDNTFVSGNCDVVIGIVNNTVYDPLQPELDSGGGGSDIIKLLNEQVNKEMQSSNLYMSMSSWCYTHSLDGAGLFLFDHAAEEYEHAKKLIIFLNENNVPVQLTSISAPEHKFEGLTQIFQKAYEHEQHISESINNIVDHAIKSKDHATFNFLQWYVAEQHEEEVLFKDILDKIELIGNENHGLYLADQYVKGIAKSRKS

SEQ ID NO: 9181 - protein, 1309 aa, Artificial Sequence
  SARS-CoV-2/pangolin/Guangxi/P4L/2017__EPI_ISL_410538 spike protein (1-1141)(P709C_P1063C) Ferritin construct
MFVFLFVLPLVSSQCVNLTTRTGIPPGYTNSSTRGVYYPDKVFRSSILHLTQDLFLPFFSNVTWFNTINYQGGFKKFDNPVLPFNDGVYFASTEKSNIIRGWIFGTTLDARTQSLLIVNNATNVVIKVCEFQFCTDPFLGVYYHNNNKTWVENEFRVYSSANNCTFEYISQPFLMDLEGKQGNFKNLREFVFKNVDGYFKIYSKHTPIDLVRDLPRGFAALEPLVDLPIGINITRFQTLLALHRSYLTPGNLESGWTTGAAAYYVGYLQQRTFLLSYNQNGTITDAVDCSLDPLSETKCTLKSLTVEKGIYQTSNFRVQPTISIVRFPNITNLCPFGEVFNASKFASVYAWNRKRISNCVADYSVLYNSTSFSTFKCYGVSPTKLNDLCFTNVYADSFVVKGDEVRQIAPGQTGVIADYNYKLPDDFTGCVIAWNSVKQDALTGGNYGYLYRLFRKSKLKPFERDISTEIYQAGSTPCNGQVGLNCYYPLERYGFHPTTGVNYQPFRVVVLSFELLNGPATVCGPKLSTTLVKDKCVNFNFNGLTGTGVLTTSKKQFLPFQQFGRDISDTTDAVRDPQTLEILDITPCSFGGVSVITPGTNTSNQVAVLYQDVNCTEVPMAIHAEQLTPAWRVYSAGANVFQTRAGCLVGAEHVNNSYECDIPVGAGICASYHSMSSLRSVNQRSIIAYTMSLGAENSVAYSNNSIAICTNFTISVTTEILPVSMTKTSVDCTMYICGDSIECSNLLLQYGSFCTQLNRALTGIAVEQDKNTQEVFAQVKQIYKTPPIKDFGGFNFSQILPDPSKPSKRSFIEDLLFNKVTLADAGFIKQYGDCLGDIAARDLICAQKFNGLTVLPPLLTDEMIAQYTSALLAGTITSGWTFGAGAALQIPFAMQMAYRFNGIGVTQNVLYENQKLIANQFNSAIGKIQDSLSSTASALGKLQDVVNQNAQALNTLVKQLSSNFGAISSVLNDILSRLDKVEAEVQIDRLITGRLQSLQTYVTQQLIRAAEIRASANLAATKMSECVLGQSKRVDFCGKGYHLMSFPQSAPHGVVFLHVTYVCAQEKNFTTAPAICHEGKAHFPREGVFVSNGTHWFITQRNFYEPQIITTDNTFVSGSCDVVIGIVNNTVYDPLQPELDSGGGGSDIIKLLNEQVNKEMQSSNLYMSMSSWCYTHSLDGAGLFLFDHAAEEYEHAKKLIIFLNENNVPVQLTSISAPEHKFEGLTQIFQKAYEHEQHISESINNIVDHAIKSKDHATFNFLQWYVAEQHEEEVLFKDILDKIELIGNENHGLYLADQYVKGIAKSRKS

SEQ ID NO: 9182 - protein, 1309 aa, Artificial Sequence
  SARS-CoV-2/pangolin/Guangxi/P5L/2017__EPI_ISL_410540 spike protein (1-1141)(P709C_P1063C) Ferritin construct
MFVFLFVLPLVSSQCVNLTTRTGIPPGYTNSSTRGVYYPDKVFRSSILHLTQDLFLPFFSNVTWFNTINYQGGFKKFDNPVLPFNDGVYFASTEKSNIIRGWIFGTTLDARTQSLLIVNNATNVVIKVCEFQFCTDPFLGVYYHNNNKTWVENEFRVYSSANNCTFEYISQPFLMDLEGKQGNFKNLREFVFKNVDGYFKIYSKHTPIDLVRDLPRGFAALEPLVDLPIGINITRFQTLLALHRSYLTPGKLESGWTTGAAAYYVGYLQQRTFLLSYNQNGTITDAVDCSLDPLSETKCTLKSLTVEKGIYQTSNFRVQPTISIVRFPNITNLCPFGEVFNASKFASVYAWNRKRISNCVADYSVLYNSTSFSTFKCYGVSPTKLNDLCFTNVYADSFVVKGDEVRQIAPGQTGVIADYNYKLPDDFTGCVIAWNSVKQDALTGGNYGYLYRLFRKSKLKPFERDISTEIYQAGSTPCNGQVGLNCYYPLERYGFHPTTGVNYQPFRVVVLSFELLNGPATVCGPKLSTTLVKDKCVNFNFNGLTGTGVLTTSKKQFLPFQQFGRDISDTTDAVRDPQTLEILDITPCSFGGVSVITPGTNTSNQVAVLYQDVNCTEVPMAIHAEQLTPAWRVYSAGANVFQTRAGCLVGAEHVNNSYECDIPVGAGICASYHSMSSFRSVNQRSIIAYTMSLGAENSVAYSNNSIAICTNFTISVTTEILPVSMTKTSVDCTMYICGDSIECSNLLLQYGSFCTQLNRALTGIAVEQDKNTQEVFAQVKQIYKTPPIKDFGGFNFSQILPDPSKPSKRSFIEDLLFNKVTLADAGFIKQYGDCLGDIAARDLICAQKFNGLTVLPPLLTDEMIAQYTSALLAGTITSGWTFGAGAALQIPFAMQMAYRFNGIGVTQNVLYENQKLIANQFNSAIGKIQDSLSSTASALGKLQDVVNQNAQALNTLVKQLSSNFGAISSVLNDILSRLDKVEAEVQIDRLITGRLQSLQTYVTQQLIRAAEIRASANLAATKMSECVLGQSKRVDFCGKGYHLMSFPQSAPHGVVFLHVTYVCAQEKNFTTAPAICHEGKAHFPREGVFVSNGTHWFITQRNFYEPQIITTDNTFVSGSCDVVIGIVNNTVYDPLQPELDSGGGGSDIIKLLNEQVNKEMQSSNLYMSMSSWCYTHSLDGAGLFLFDHAAEEYEHAKKLIIFLNENNVPVQLTSISAPEHKFEGLTQIFQKAYEHEQHISESINNIVDHAIKSKDHATFNFLQWYVAEQHEEEVLFKDILDKIELIGNENHGLYLADQYVKGIAKSRKS

SEQ ID NO: 9183 - protein, 1309 aa, Artificial Sequence
  SARS-CoV-2/pangolin/Guangxi/P5E/2017__EPI_ISL_410541 spike protein (1-1141)(P709C_P1063C) Ferritin construct
MFVFLFVLPLVSSQCVNLTTRTGIPPGYTNSSTRGVYYPDKVFRSSILHLTQDLFLPFFSNVTWFNTITYQGGSKKFDNPVLPFNDGVYFASTEKSNIIRGWIFGTTLDARTQSLLIVNNATNVVIKVCEFQFCTDPFLGVYYHNNNKTWVENEFRVYSSANNCTFEYISQPFLMDLEGKQGNFKNLREFVFKNVDGYFKIYSKHTPIDLVRDLPRGFAALEPLVDLPIGINITRFQTLLALHRSYLTPGKLESGWTTGAAAYYVGYLQQRTFLLSYNQNGTITDAVDCSLDPLSETKCTLKSLTVEKGIYQTSNFRVQPTISIVRFPNITNLCPFGEVFNASKFASVYAWNRKRISNCVADYSVLYNSTSFSTFKCYGVSPTKLNDLCFTNVYADSFVVKGDEVRQIAPGQTGVIADYNYKLPDDFTGCVIAWNSVKQDALTGDNYGYLYRLFRKSKLKPFERDISTEIYQAGSTPCNGQVGLNCYYPLERYGFHPTTGVNYQPFRVVVLSFELLNGPATVCGPKLSTTLVKDKCVNFNFNGLTGTGVLTTSKKQFLPFQQFGRDISDTTDAVRDPQTLEILDITPCSFGGVSVITPGTNTSNQVAVLYQDVNCTEVPMAIHAEQLTPAWRVYSAGANVFQTRAGCLVGAEHVNNSYECDIPVGAGICASYHSMSSFRSVNQRSIIAYTMSLGAENSVAYSNNSIAICTNFTISVTTEILPVSMTKTSVDCTMYICGDSIECSNLLLQYGSFCTQLNRALTGIAVEQDKNTQEVFAQVKQIYKTPPIKDFGGFNFSQILPDPSKPSKRSFIEDLLFNKVTLADAGFIKQYGDCLGDIAARDLICAQKFNGLTVLPPLLTDEMIAQYTSALLAGTITSGWTFGAGAALQIPFAMQMAYRFNGIGVTQNVLYENQKLIANQFNSAIGKIQDSLSSTASALGKLQDVVNQNAQALNTLVKQLSSNFGAISSVLNDILSRLDKVEAEVQIDRLITGRLQSLQTYVTQQLIRAAEIRASANLAATKMSECVLGQSKRVDFCGKGYHLMSFPQSAPHGVVFLHVTYVCAQEKNFTTAPAICHEGKAHFPREGVFVSNGTHWFITQRNFYEPQIITTDNTFVSGSCDVVIGIVNNTVYDPLQPELDSGGGGSDIIKLLNEQVNKEMQSSNLYMSMSSWCYTHSLDGAGLFLFDHAAEEYEHAKKLIIFLNENNVPVQLTSISAPEHKFEGLTQIFQKAYEHEQHISESINNIVDHAIKSKDHATFNFLQWYVAEQHEEEVLFKDILDKIELIGNENHGLYLADQYVKGIAKSRKS

SEQ ID NO: 9184 - protein, 1307 aa, Artificial Sequence
  SARS-CoV-2/pangolin/Guangxi/P1E/2017__EPI_ISL_410539 spike protein (1-1139)(P707C_P1061C) Ferritin construct
MFVFLFVLPLVSSQCVNLTTRTGIQPGYTNSSTRGVYYPDKVFRSSILHLTQDLFLPFFSNVTWFNTINYQGGFKKFDNPVLPFNDGVYFASTEKSNIIRGWIFGTTLDARTQSLLIVNNATNVVIKVCEFQFCTDPFLGVYYHNNNKTWVENEFRVYSSANNCTFEYISQPFLMDLEGKQGNFKNLREFVFKNVDGYFKIYSKHTPIDLVRDLPRGFAALEPLVDLPIGINITRFQTLLALHRSYLTPGKLESGWTTGAAAYYVGYLQQRTFLLSYNQNGTITDAVDCSLDPLSETKCTLKSLTVEKGIYQTSNFRVQPTISIVRFPNITNLCPFGEVFNASKFASVYAWNRKRISNCVADYSVLYNSTSFSTFKCYGVSPTKLNDLCFTNVYADSFVVKGDEVRQIAPGQTGVIADYNYKLPDDFTGCVIAWNSVKQDALTGGNYLYRLFRKSKLKPFERDISTEIYQAGSTPCNGQVGLNCYYPLERYGFHPTTGVNYQPFRVVVLSFELLNGPATVCGPKLSTTLVKDKCVNFNFNGLTGTGVLTTSKKQFLPFQQFGRDISDTTDAVRDPQTLEILDITPCSFGGVSVITPGTNTSNQVAVLYQDVNCTEVPMAIHAEQLTPAWRVYSAGANVFQTRAGCLVGAEHVNNSYECDIPVGAGICASYHSMSSLRSVNQRSIIAYTMSLGAENSVAYSNNSIAICTNFTISVTTEILPVSMTKTSVDCTMYICGDSIECSNLLLQYGSFCTQLNRALTGIAVEQDKNTQEVFAQVKQIYKTPPIKDFGGFNFSQILPDPSKPSKRSFIEDLLFNKVTLADAGFIKQYGDCLGDIAARDLICAQKFNGLTVLPPLLTDEMIAQYTSALLAGTITSGWTFGAGAALQIPFAMQMAYRFNGIGVTQNVLYENQKLIANQFNSAIGKIQDSLSSTASALGKLQDVVNQNAQALNTLVKQLSSNFGAISSVLNDILSRLDKVEAEVQIDRLITGRLQSLQTYVTQQLIRAAEIRASANLAATKMSECVLGQSKRVDFCGKGYHLMSFPQSAPHGVVFLHVTYVCAQEKNFTTAPAICHEGKAHFPREGVFVSNGTHWFITQRNFYEPQIITTDNTFVSGSCDVVIGIVNNTVYDPLQPELDSGGGGSDIIKLLNEQVNKEMQSSNLYMSMSSWCYTHSLDGAGLFLFDHAAEEYEHAKKLIIFLNENNVPVQLTSISAPEHKFEGLTQIFQKAYEHEQHISESINNIVDHAIKSKDHATFNFLQWYVAEQHEEEVLFKDILDKIELIGNENHGLYLADQYVKGIAKSRKS

SEQ ID NO: 9185 - protein, 1315 aa, Artificial Sequence
  SARS-CoV-2/Wuhan/WIV05/2019__EPI_ISL_402128 spike protein (1-1147)(G889C_L1034C) Ferritin construct
MFVFLVLLPLVSSQCVNLTTRTQLPPAYTNSFTRGVYYPDKVFRSSVLHSTQDLFLPFFSNVTWFHAIHVSGTNGTKRFDNPVLPFNDGVYFASTEKSNIIRGWIFGTTLDSKTQSLLIVNNATNVVIKVCEFQFCNDPFLGVYYHKNNKSWMESEFRVYSSANNCTFEYVSQPFLMDLEGKQGNFKNLREFVFKNIDGYFKIYSKHTPINLVRDLPQGFSALEPLVDLPIGINITRFQTLLALHRSYLTPGDSSSGWTAGAAAYYVGYLQPRTFLLKYNENGTITDAVDCALDPLSETKCTLKSFTVEKGIYQTSNFRVQPTESIVRFPNITNLCPFGEVFNATRFASVYAWNRKRISNCVADYSVLYNSASFSTFKCYGVSPTKLNDLCFTNVYADSFVIRGDEVRQIAPGQTGKIADYNYKLPDDFTGCVIAWNSNNLDSKVGGNYNYLYRLFRKSNLKPFERDISTEIYQAGSTPCNGVEGFNCYFPLQSYGFQPTNGVGYQPYRVVVLSFELLHAPATVCGPKKSTNLVKNKCVNFNFNGLTGTGVLTESNKKFLPFQQFGRDIADTTDAVRDPQTLEILDITPCSFGGVSVITPGTNTSNQVAVLYQDVNCTEVPVAIHADQLTPTWRVYSTGSNVFQTRAGCLIGAEHVNNSYECDIPIGAGICASYQTQTNSPRRARSVASQSIIAYTMSLGAENSVAYSNNSIAIPTNFTISVTTEILPVSMTKTSVDCTMYICGDSTECSNLLLQYGSFCTQLNRALTGIAVEQDKNTQEVFAQVKQIYKTPPIKDFGGFNFSQILPDPSKPSKRSFIEDLLFNKVTLADAGFIKQYGDCLGDIAARDLICAQKFNGLTVLPPLLTDEMIAQYTSALLAGTITSGWTFCAGAALQIPFAMQMAYRFNGIGVTQNVLYENQKLIANQFNSAIGKIQDSLSSTASALGKLQDVVNQNAQALNTLVKQLSSNFGAISSVLNDILSRLDKVEAEVQIDRLITGRLQSLQTYVTQQLIRAAEIRASANLAATKMSECVCGQSKRVDFCGKGYHLMSFPQSAPHGVVFLHVTYVPAQEKNFTTAPAICHDGKAHFPREGVFVSNGTHWFVTQRNFYEPQIITTDNTFVSGNCDVVIGIVNNTVYDPLQPELDSGGGGSDIIKLLNEQVNKEMQSSNLYMSMSSWCYTHSLDGAGLFLFDHAAEEYEHAKKLIIFLNENNVPVQLTSISAPEHKFEGLTQIFQKAYEHEQHISESINNIVDHAIKSKDHATFNFLQWYVAEQHEEEVLFKDILDKIELIGNENHGLYLADQYVKGIAKSRKS

SEQ ID NO: 9186 - protein, 1311 aa, Artificial Sequence
  SARS-CoV-2/bat/Yunnan/RaTG13/2013__EPI_ISL_402131 spike protein (1-1143)(G885C_L1030C) Ferritin construct
MFVFLVLLPLVSSQCVNLTTRTQLPPAYTNSSTRGVYYPDKVFRSSVLHLTQDLFLPFFSNVTWFHAIHVSGTNGIKRFDNPVLPFNDGVYFASTEKSNIIRGWIFGTTLDSKTQSLLIVNNATNVVIKVCEFQFCNDPFLGVYYHKNNKSWMESEFRVYSSANNCTFEYVSQPFLMDLEGKQGNFKNLREFVFKNIDGYFKIYSKHTPINLVRDLPPGFSALEPLVDLPIGINITRFQTLLALHRSYLTPGDSSSGWTAGAAAYYVGYLQPRTFLLKYNENGTITDAVDCALDPLSETKCTLKSFTVEKGIYQTSNFRVQPTDSIVRFPNITNLCPFGEVFNATTFASVYAWNRKRISNCVADYSVLYNSTSFSTFKCYGVSPTKLNDLCFTNVYADSFVITGDEVRQIAPGQTGKIADYNYKLPDDFTGCVIAWNSKHIDAKEGGNFNYLYRLFRKANLKPFERDISTEIYQAGSKPCNGQTGLNCYYPLYRYGFYPTDGVGHQPYRVVVLSFELLNAPATVCGPKKSTNLVKNKCVNFNFNGLTGTGVLTESNKKFLPFQQFGRDIADTTDAVRDPQTLEILDITPCSFGGVSVITPGTNASNQVAVLYQDVNCTEVPVAIHADQLTPTWRVYSTGSNVFQTRAGCLIGAEHVNNSYECDIPIGAGICASYQTQTNSRSVASQSIIAYTMSLGAENSVAYSNNSIAIPTNFTISVTTEILPVSMTKTSVDCTMYICGDSTECSNLLLQYGSFCTQLNRALTGIAVEQDKNTQEVFAQVKQIYKTPPIKDFGGFNFSQILPDPSKPSKRSFIEDLLFNKVTLADAGFIKQYGDCLGDIAARDLICAQKFNGLTVLPPLLTDEMIAQYTSALLAGTITSGWTFCAGAALQIPFAMQMAYRFNGIGVTQNVLYENQKLIANQFNSAIGKIQDSLSSTASALGKLQDVVNQNAQALNTLVKQLSSNFGAISSVLNDILSRLDKVEAEVQIDRLITGRLQSLQTYVTQQLIRAAEIRASANLAATKMSECVCGQSKRVDFCGKGYHLMSFPQSAPHGVVFLHVTYVPAQEKNFTTAPAICHDGKAHFPREGVFVSNGTHWFVTQRNFYEPQIITTDNTFVSGSCDVVIGIVNNTVYDPLQPELDSGGGGSDIIKLLNEQVNKEMQSSNLYMSMSSWCYTHSLDGAGLFLFDHAAEEYEHAKKLIIFLNENNVPVQLTSISAPEHKFEGLTQIFQKAYEHEQHISESINNIVDHAIKSKDHATFNFLQWYVAEQHEEEVLFKDILDKIELIGNENHGLYLADQYVKGIAKSRKS

SEQ ID NO: 9187 - protein, 1315 aa, Artificial Sequence
  SARS-CoV-2/Wuhan/HBCDC-HB-01/2019__EPI_ISL_402132 spike protein (1-1147)(G889C_L1034C) Ferritin construct
MFVFLVLLPLVSSQCVNLTTRTQLPPAYTNSITRGVYYPDKVFRSSVLHSTQDLFLPFFSNVTWFHAIHVSGTNGTKRFDNPVLPFNDGVYFASTEKSNIIRGWIFGTTLDSKTQSLLIVNNATNVVIKVCEFQFCNDPFLGVYYHKNNKSWMESEFRVYSSANNCTFEYVSQPFLMDLEGKQGNFKNLREFVFKNIDGYFKIYSKHTPINLVRDLPQGFSALEPLVDLPIGINITRFQTLLALHRSYLTPGDSSSGWTAGAAAYYVGYLQPRTFLLKYNENGTITDAVDCALDPLSETKCTLKSFTVEKGIYQTSNFRVQPTESIVRFPNITNLCPFGEVFNATRFASVYAWNRKRISNCVADYSVLYNSASFSTFKCYGVSPTKLNDLCFTNVYADSFVIRGDEVRQIAPGQTGKIADYNYKLPDDFTGCVIAWNSNNLDSKVGGNYNYLYRLFRKSNLKPFERDISTEIYQAGSTPCNGVEGFNCYFPLQSYGFQPTNGVGYQPYRVVVLSFELLHAPATVCGPKKSTNLVKNKCVNFNFNGLTGTGVLTESNKKFLPFQQFGRDIADTTDAVRDPQTLEILDITPCSFGGVSVITPGTNTSNQVAVLYQDVNCTEVPVAIHADQLTPTWRVYSTGSNVFQTRAGCLIGAEHVNNSYECDIPIGAGICASYQTQTNSPRRARSVASQSIIAYTMSLGAENSVAYSNNSIAIPTNFTISVTTEILPVSMTKTSVDCTMYICGDSTECSNLLLQYGSFCTQLNRALTGIAVEQDKNTQEVFAQVKQIYKTPPIKDFGGFNFSQILPDPSKPSKRSFIEDLLFNKVTLADAGFIKQYGDCLGDIAARDLICAQKFNGLTVLPPLLTDEMIAQYTSALLAGTITSGWTFCAGAALQIPFAMQMAYRFNGIGVTQNVLYENQKLIANQFNSAIGKIQDSLSSTASALGKLQDVVNQNAQALNTLVKQLSSNFGAISSVLNDILSRLDKVEAEVQIDRLITGRLQSLQTYVTQQLIRAAEIRASANLAATKMSECVCGQSKRVDFCGKGYHLMSFPQSAPHGVVFLHVTYVPAQEKNFTTAPAICHDGKAHFPREGVFVSNGTHWFVTQRNFYEPQIITTDNTFVSGNCDVVIGIVNNTVYDPLQPELDSGGGGSDIIKLLNEQVNKEMQSSNLYMSMSSWCYTHSLDGAGLFLFDHAAEEYEHAKKLIIFLNENNVPVQLTSISAPEHKFEGLTQIFQKAYEHEQHISESINNIVDHAIKSKDHATFNFLQWYVAEQHEEEVLFKDILDKIELIGNENHGLYLADQYVKGIAKSRKS

SEQ ID NO: 9188 - protein, 1315 aa, Artificial Sequence
  SARS-CoV-2/Guangdong/20SF028/2020__EPI_ISL_403936 spike protein (1-1147)(G889C_L1034C) Ferritin construct
MFVFLVLLPLVSSQCVNLTTRTQLPPAYTNSFTRGVYYPDKVFRSSVLYSTQDLFLPFFSNVTWFHAIHVSGTNGTKRFDNPVLPFNDGVYFASTEKSNIIRGWIFGTTLDSKTQSLLIVNNATNVVIKVCEFQFCNDPFLGVYYHKNNKSWMESEFRVYSSANNCTFEYVSQPFLMDLEGKQGNFKNLREFVFKNIDGYFKIYSKHTPINLVRDLPQGFSALEPLVDLPIGINITRFQTLLALHRSYLTPGDSSSGWTAGAAAYYVGYLQPRTFLLKYNENGTITDAVDCALDPLSETKCTLKSFTVEKGIYQTSNFRVQPTESIVRFPNITNLCPFGEVFNATRFASVYAWNRKRISNCVADYSVLYNSASFSTFKCYGVSPTKLNDLCFTNVYADSFVIRGDEVRQIAPGQTGKIADYNYKLPDDFTGCVIAWNSNNLDSKVGGNYNYLYRLFRKSNLKPFERDISTEIYQAGSTPCNGVEGFNCYFPLQSYGFQPTNGVGYQPYRVVVLSFELLHAPATVCGPKKSTNLVKNKCVNFNFNGLTGTGVLTESNKKFLPFQQFGRDIADTTDAVRDPQTLEILDITPCSFGGVSVITPGTNTSNQVAVLYQDVNCTEVPVAIHADQLTPTWRVYSTGSNVFQTRAGCLIGAEHVNNSYECDIPIGAGICASYQTQTNSPRRARSVASQSIIAYTMSLGAENSVAYSNNSIAIPTNFTISVTTEILPVSMTKTSVDCTMYICGDSTECSNLLLQYGSFCTQLNRALTGIAVEQDKNTQEVFAQVKQIYKTPPIKDFGGFNFSQILPDPSKPSKRSFIEDLLFNKVTLADAGFIKQYGDCLGDIAARDLICAQKFNGLTVLPPLLTDEMIAQYTSALLAGTITSGWTFCAGAALQIPFAMQMAYRFNGIGVTQNVLYENQKLIANQFNSAIGKIQDSLSSTASALGKLQDVVNQNAQALNTLVKQLSSNFGAISSVLNDILSRLDKVEAEVQIDRLITGRLQSLQTYVTQQLIRAAEIRASANLAATKMSECVCGQSKRVDFCGKGYHLMSFPQSAPHGVVFLHVTYVPAQEKNFTTAPAICHDGKAHFPREGVFVSNGTHWFVTQRNFYEPQIITTDNTFVSGNCDVVIGIVNNTVYDPLQPELDSGGGGSDIIKLLNEQVNKEMQSSNLYMSMSSWCYTHSLDGAGLFLFDHAAEEYEHAKKLIIFLNENNVPVQLTSISAPEHKFEGLTQIFQKAYEHEQHISESINNIVDHAIKSKDHATFNFLQWYVAEQHEEEVLFKDILDKIELIGNENHGLYLADQYVKGIAKSRKS

SEQ ID NO: 9189 - protein, 1315 aa, Artificial Sequence
  SARS-CoV-2/Shenzhen/SZTH-001/2020__EPI_ISL_406592 spike protein (1-1147)(G889C_L1034C) Ferritin construct
MFVFLVLLPLVSSQCVNLTTRTQLPPAYTNSFTRGVYYPDKVFRSSVLHSTQDLFLPFFSNVTWFHAIHVSGTNGTKRFDNPVLPFNDGVYFASTEKSNIIRGWIFGTTLDSKTQSLLIVNNATNVVIKVCEFQFCNDPFLGVYYHKNNKSWMESEFRVYSSANNCTFEYVSQPFLMDLEGKQGNFKNLREFVFKNIDGYFKIYSKHTPINLVRDLPQGFSALEPLVDLPIGINITRFQTLLALHRSYLTPGDSSSGWTAGAAAYYVGYLQPRTFLLKYNENGTITDAVDCALDPLSETKCTLKSFTVEKGIYQTSNFRVQPTESIVRFPNITNLCPFGEVFNATRFASVYAWNRKRISNCVADYSVLYNSASFSTFKCYGVSPTKLNDLCFTNVYADSFVIRGDEVRQIAPGQTGKIADYNYKLPDDFTGCVIAWNSNNLDSKVGGNYNYLYRLFRKSNLKPFERDISTEIYQAGSTPCNGVEGFNCYFPLQSYGFQPTNGVGYQPYRVVVLSFELLHAPATVCGPKKSTNLVKNKCVNFNFNGLTGTGVLTESNKKFLPFQQFGRDIADTTDAVRDPQTLEILDITPCSFGGVSVITPGTNTSNQVAVLYQDVNCTEVPVAIHADQLTPTWRVYSTGSNVFQTRAGCLIGAEHVNNSYECDIPIGAGICASYQTQTNSPRRARSVASQSIIAYTMSLGAENSVAYSNNSIAIPTNFTISVTTEILPVSMTKTSVDCTMYICGDSTECSNLLLQYGSFCTQLNRALTGIAVEQDKNTQEVFAQVKQIYKTPPIKDFGGFNFSQILPDPSKPSKRSFIEDLLFNKVTLADAGFIKQYGDCLGDIAARDLICAQKFNGLTVLPPLLTDEMIAQYTSALLAGTITSGWTFCAGAALQIPFAMQMAYRFNGIGVTQNVLYENQKLIANQFNSAIGKIQDSLSSTASALGKLQDVVNQNAQALNTLVKQLSSNFGAISSVLNDILSRLDKVEAEVQIDRLITGRLQSLQTYVTQQLIRAAEIRASANLAATKMSECVCGQSKRVDFCGKGYHLMSFPQSAPHGVVFLHVTYVPAQEKNFTTAPAICHDGKAHFPREGVFVSNGTHWFVTQRNFYEPQIITTDNTFVSGNCDVLIGIVNNTVYDPLQPELDSGGGGSDIIKLLNEQVNKEMQSSNLYMSMSSWCYTHSLDGAGLFLFDHAAEEYEHAKKLIIFLNENNVPVQLTSISAPEHKFEGLTQIFQKAYEHEQHISESINNIVDHAIKSKDHATFNFLQWYVAEQHEEEVLFKDILDKIELIGNENHGLYLADQYVKGIAKSRKS

SEQ ID NO: 9190 - protein, 1315 aa, Artificial Sequence
  SARS-CoV-2/Shenzhen/SZTH-004/2020__EPI_ISL_406595 spike protein (1-1147)(G889C_L1034C) Ferritin construct
MFVFLVLLPLVSSQCVNLTTRTQLPPAYTNSFTRGVYYPDKVFRSSVLHSTQDLFLPFFSNVTWFHAIHVSGTNGTKRFDNPVLPFNDGVYFASTEKSNIIRGWIFGTTLDSKTQSLLIVNNATNVVIKVCEFQFCNDPFLGVYYHKNNKSWMESEFRVYSSANNCTFEYVSQPFLMDLEGKQGNFKNLREFVFKNIDGYFKIYSKHTPINLVRDLPQGFSALEPLVDLPIGINITRFQTLLALHRSYLTPGDSSSGWTAGAAAYYVGYLQPRTFLLKYNENGTITDAVDCALDPLSETKCTLKSFTVEKGIYQTSNFRVQPTESIVRFPNITNLCPFGEVFNATRFASVYAWDRKRISNCVAYYSVLYNSASFSTFKCYGVSPTKLNDLCFTNVYADSFVIRGDEVRQIAPGQTGKIADYNYKLPDDFTGCVIAWNSNNLDSKVGGNYNYLYRLFRKSNLKPFERDISTEIYQAGSTPCNGVEGFNCYFPLQSYGFQPTNGVGYQPYRVVVLSFELLHAPATVCGPKKSTNLVKNKCVNFNFNGLTGTGVLTESNKKFLPFQQFGRDIADTTDAVRDPQTLEILDITPCSFGGVSVITPGTNTSNQVAVLYQDVNCTEVPVAIHADQLTPTWRVYSTGSNVFQTRAGCLIGAEHVNNSYECDIPIGAGICASYQTQTNSPRRARSVASQSIIAYTMSLGAENSVAYSNNSIAIPTNFTISVTTEILPVSMTKTSVDCTMYICGDSTECSNLLLQYGSFCTQLNRALTGIAVEQDKNTQEVFAQVKQIYKTPPIKDFGGFNFSQILPDPSKPSKRSFIEDLLFNKVTLADAGFIKQYGDCLGDIAARDLICAQKFNGLTVLPPLLTDEMIAQYTSALLAGTITSGWTFCAGAALQIPFAMQMAYRFNGIGVTQNVLYENQKLIANQFNSAIGKIQDSLSSTASALGKLQDVVNQNAQALNTLVKQLSSNFGAISSVLNDILSRLDKVEAEVQIDRLITGRLQSLQTYVTQQLIRAAEIRASANLAATKMSECVCGQSKRVDFCGKGYHLMSFPQSAPHGVVFLHVTYVPAQEKNFTTAPAICHDGKAHFPREGVFVSNGTHWFVTQRNFYEPQIITTDNTFVSGNCDVVIGIVNNTVYDPLQPELDSGGGGSDIIKLLNEQVNKEMQSSNLYMSMSSWCYTHSLDGAGLFLFDHAAEEYEHAKKLIIFLNENNVPVQLTSISAPEHKFEGLTQIFQKAYEHEQHISESINNIVDHAIKSKDHATFNFLQWYVAEQHEEEVLFKDILDKIELIGNENHGLYLADQYVKGIAKSRKS

SEQ ID NO: 9191 - protein, 1315 aa, Artificial Sequence
  SARS-CoV-2/France/IDF0372/2020__EPI_ISL_406596 spike protein (1-1147)(G889C_L1034C) Ferritin construct
MFVFLVLLPLVSSQCVNLTTRTQLPPAYTNSFTRGVYYPDKVFRSSVLHSTQDLFLPFFSNVTWFHAIHVSGTNGTKRFDNPVLPFNDGVYFASTEKSNIIRGWIFGTTLDSKTQSLLIVNNATNVVIKVCEFQFCNDPFLGVYYHKNNKSWMESEFRVYSSANNCTFEYVSQPFLMDLEGKQGNFKNLREFVFKNIDGYFKIYSKHTPINLVRDLPQGFSALEPLVDLPIGINITRFQTLLALHRSYLTPGDSSSGWTAGAAAYYVGYLQPRTFLLKYNENGTITDAVDCALDPLSETKCTLKSFTVEKGIYQTSNFRVQPTESIVRFPNITNLCPFGEVFNATRFASVYAWNRKRISNCVADYSFLYNSASFSTFKCYGVSPTKLNDLCFTNVYADSFVIRGDEVRQIAPGQTGKIADYNYKLPDDFTGCVIAWNSNNLDSKVGGNYNYLYRLFRKSNLKPFERDISTEIYQAGSTPCNGVEGFNCYFPLQSYGFQPTNGVGYQPYRVVVLSFELLHAPATVCGPKKSTNLVKNKCVNFNFNGLTGTGVLTESNKKFLPFQQFGRDIADTTDAVRDPQTLEILDITPCSFGGVSVITPGTNTSNQVAVLYQDVNCTEVPVAIHADQLTPTWRVYSTGSNVFQTRAGCLIGAEHVNNSYECDIPIGAGICASYQTQTNSPRRARSVASQSIIAYTMSLGAENSVAYSNNSIAIPTNFTISVTTEILPVSMTKTSVDCTMYICGDSTECSNLLLQYGSFCTQLNRALTGIAVEQDKNTQEVFAQVKQIYKTPPIKDFGGFNFSQILPDPSKPSKRSFIEDLLFNKVTLADAGFIKQYGDCLGDIAARDLICAQKFNGLTVLPPLLTDEMIAQYTSALLAGTITSGWTFCAGAALQIPFAMQMAYRFNGIGVTQNVLYENQKLIANQFNSAIGKIQDSLSSTASALGKLQDVVNQNAQALNTLVKQLSSNFGAISSVLNDILSRLDKVEAEVQIDRLITGRLQSLQTYVTQQLIRAAEIRASANLAATKMSECVCGQSKRVDFCGKGYHLMSFPQSAPHGVVFLHVTYVPAQEKNFTTAPAICHDGKAHFPREGVFVSNGTHWFVTQRNFYEPQIITTDNTFVSGNCDVVIGIVNNTVYDPLQPELDSGGGGSDIIKLLNEQVNKEMQSSNLYMSMSSWCYTHSLDGAGLFLFDHAAEEYEHAKKLIIFLNENNVPVQLTSISAPEHKFEGLTQIFQKAYEHEQHISESINNIVDHAIKSKDHATFNFLQWYVAEQHEEEVLFKDILDKIELIGNENHGLYLADQYVKGIAKSRKS

SEQ ID NO: 9192 - protein, 1315 aa, Artificial Sequence
  SARS-CoV-2/Australia/VIC01/2020__EPI_ISL_406844 spike protein (1-1147)(G889C_L1034C) Ferritin construct
MFVFLVLLPLVSSQCVNLTTRTQLPPAYTNSFTRGVYYPDKVFRSSVLHSTQDLFLPFFSNVTWFHAIHVSGTNGTKRFDNPVLPFNDGVYFASTEKSNIIRGWIFGTTLDSKTQSLLIVNNATNVVIKVCEFQFCNDPFLGVYYHKNNKSWMESEFRVYSSANNCTFEYVSQPFLMDLEGKQGNFKNLREFVFKNIDGYFKIYSKHTPINLVRDLPQGFSALEPLVDLPIGINITRFQTLLALHRRYLTPGDSSSGWTAGAAAYYVGYLQPRTFLLKYNENGTITDAVDCALDPLSETKCTLKSFTVEKGIYQTSNFRVQPTESIVRFPNITNLCPFGEVFNATRFASVYAWNRKRISNCVADYSVLYNSASFSTFKCYGVSPTKLNDLCFTNVYADSFVIRGDEVRQIAPGQTGKIADYNYKLPDDFTGCVIAWNSNNLDSKVGGNYNYLYRLFRKSNLKPFERDISTEIYQAGSTPCNGVEGFNCYFPLQSYGFQPTNGVGYQPYRVVVLSFELLHAPATVCGPKKSTNLVKNKCVNFNFNGLTGTGVLTESNKKFLPFQQFGRDIADTTDAVRDPQTLEILDITPCSFGGVSVITPGTNTSNQVAVLYQDVNCTEVPVAIHADQLTPTWRVYSTGSNVFQTRAGCLIGAEHVNNSYECDIPIGAGICASYQTQTNSPRRARSVASQSIIAYTMSLGAENSVAYSNNSIAIPTNFTISVTTEILPVSMTKTSVDCTMYICGDSTECSNLLLQYGSFCTQLNRALTGIAVEQDKNTQEVFAQVKQIYKTPPIKDFGGFNFSQILPDPSKPSKRSFIEDLLFNKVTLADAGFIKQYGDCLGDIAARDLICAQKFNGLTVLPPLLTDEMIAQYTSALLAGTITSGWTFCAGAALQIPFAMQMAYRFNGIGVTQNVLYENQKLIANQFNSAIGKIQDSLSSTASALGKLQDVVNQNAQALNTLVKQLSSNFGAISSVLNDILSRLDKVEAEVQIDRLITGRLQSLQTYVTQQLIRAAEIRASANLAATKMSECVCGQSKRVDFCGKGYHLMSFPQSAPHGVVFLHVTYVPAQEKNFTTAPAICHDGKAHFPREGVFVSNGTHWFVTQRNFYEPQIITTDNTFVSGNCDVVIGIVNNTVYDPLQPELDSGGGGSDIIKLLNEQVNKEMQSSNLYMSMSSWCYTHSLDGAGLFLFDHAAEEYEHAKKLIIFLNENNVPVQLTSISAPEHKFEGLTQIFQKAYEHEQHISESINNIVDHAIKSKDHATFNFLQWYVAEQHEEEVLFKDILDKIELIGNENHGLYLADQYVKGIAKSRKS

SEQ ID NO: 9193 - protein, 1315 aa, Artificial Sequence
  SARS-CoV-2/Germany/BavPat1/2020__EPI_ISL_406862 spike protein (1-1147)(G889C_L1034C) Ferritin construct
MFVFLVLLPLVSSQCVNLTTRTQLPPAYTNSFTRGVYYPDKVFRSSVLHSTQDLFLPFFSNVTWFHAIHVSGTNGTKRFDNPVLPFNDGVYFASTEKSNIIRGWIFGTTLDSKTQSLLIVNNATNVVIKVCEFQFCNDPFLGVYYHKNNKSWMESEFRVYSSANNCTFEYVSQPFLMDLEGKQGNFKNLREFVFKNIDGYFKIYSKHTPINLVRDLPQGFSALEPLVDLPIGINITRFQTLLALHRSYLTPGDSSSGWTAGAAAYYVGYLQPRTFLLKYNENGTITDAVDCALDPLSETKCTLKSFTVEKGIYQTSNFRVQPTESIVRFPNITNLCPFGEVFNATRFASVYAWNRKRISNCVADYSVLYNSASFSTFKCYGVSPTKLNDLCFTNVYADSFVIRGDEVRQIAPGQTGKIADYNYKLPDDFTGCVIAWNSNNLDSKVGGNYNYLYRLFRKSNLKPFERDISTEIYQAGSTPCNGVEGFNCYFPLQSYGFQPTNGVGYQPYRVVVLSFELLHAPATVCGPKKSTNLVKNKCVNFNFNGLTGTGVLTESNKKFLPFQQFGRDIADTTDAVRDPQTLEILDITPCSFGGVSVITPGTNTSNQVAVLYQGVNCTEVPVAIHADQLTPTWRVYSTGSNVFQTRAGCLIGAEHVNNSYECDIPIGAGICASYQTQTNSPRRARSVASQSIIAYTMSLGAENSVAYSNNSIAIPTNFTISVTTEILPVSMTKTSVDCTMYICGDSTECSNLLLQYGSFCTQLNRALTGIAVEQDKNTQEVFAQVKQIYKTPPIKDFGGFNFSQILPDPSKPSKRSFIEDLLFNKVTLADAGFIKQYGDCLGDIAARDLICAQKFNGLTVLPPLLTDEMIAQYTSALLAGTITSGWTFCAGAALQIPFAMQMAYRFNGIGVTQNVLYENQKLIANQFNSAIGKIQDSLSSTASALGKLQDVVNQNAQALNTLVKQLSSNFGAISSVLNDILSRLDKVEAEVQIDRLITGRLQSLQTYVTQQLIRAAEIRASANLAATKMSECVCGQSKRVDFCGKGYHLMSFPQSAPHGVVFLHVTYVPAQEKNFTTAPAICHDGKAHFPREGVFVSNGTHWFVTQRNFYEPQIITTDNTFVSGNCDVVIGIVNNTVYDPLQPELDSGGGGSDIIKLLNEQVNKEMQSSNLYMSMSSWCYTHSLDGAGLFLFDHAAEEYEHAKKLIIFLNENNVPVQLTSISAPEHKFEGLTQIFQKAYEHEQHISESINNIVDHAIKSKDHATFNFLQWYVAEQHEEEVLFKDILDKIELIGNENHGLYLADQYVKGIAKSRKS

SEQ ID NO: 9194 - protein, 1315 aa, Artificial Sequence
  SARS-CoV-2/Wuhan/HBCDC-HB-02/2020__EPI_ISL_412978 spike protein (1-1147)(G889C_L1034C) Ferritin construct
MFVFLVLLPLVSSQCVNLTTRTQLPPAYTNSFTRGVYYPDKVFRSSVLHSTQDLFLPFFSNVTWFHAIHVSGTNGTKRFDNPVLPFNDGVYFASTEKSNIIRGWIFGTTLDSKTQSLLIVNNATNVVIKVCEFQFCNDPFLGVYYHKNNKSWMESEFRVYSSANNCTFEYVSQPFLMDLEGKQGNFKNLREFVFKNIDGYFKIYSKHTPINLVRDLPQGFSALEPLVDLPIGINITRFQTLLALHRSYLTPGDSSSGWTAGAAAYYVGYLQPRTFLLKYNENGTITDAVDCALDPLSETKCTLKSFTVEKGIYQTSNFRVQPTESIVRFPNITNLCPFGEVFNATRFASVYAWNRKRISNCVADYSVLYNSASFSTFKCYGVSPTKLNDLCFTNVYADSFVIRGDEVRQIAPGQTGKIADYNYKLPDDFTGCVIAWNSNNLDSKVGGNYNYLYRLFRKSNLKPFERDISTEIYQAGSTPCNGVEGFNCYFPLQSYGFQPTNGVGYQPYRVVVLSFELLHAPATVCGPKKSTNLVKNKCVNFNFNGLTGTGVLTESNKKFLPFQQFGRDIADTTDAVRDPQTLEILDITPCSFGGVSVITPGTNTSNQVAVLYQDVNCTEVPVAIHADQLTPTWRVYSTGSNVFQTRAGCLIGAEHVNNSYECDIPIGAGICASYQTQTNSPRRARSVASQSIIAYTMSLGAENSVAYSNNSIAIPTNFTISVTTEILPVSMTKTSVDCTMYICGDSTECSNFLLQYGSFCTQLNRALTGIAVEQDKNTQEVFAQVKQIYKTPPIKDFGGFNFSQILPDPSKPSKRSFIEDLLFNKVTLADAGFIKQYGDCLGDIAARDLICAQKFNGLTVLPPLLTDEMIAQYTSALLAGTITSGWTFCAGAALQIPFAMQMAYRFNGIGVTQNVLYENQKLIANQFNSAIGKIQDSLSSTASALGKLQDVVNQNAQALNTLVKQLSSNFGAISSVLNDILSRLDKVEAEVQIDRLITGRLQSLQTYVTQQLIRAAEIRASANLAATKMSECVCGQSKRVDFCGKGYHLMSFPQSAPHGVVFLHVTYVPAQEKNFTTAPAICHDGKAHFPREGVFVSNGTHWFVTQRNFYEPQIITTDNTFVSGNCDVVIGIVNNTVYDPLQPELDSGGGGSDIIKLLNEQVNKEMQSSNLYMSMSSWCYTHSLDGAGLFLFDHAAEEYEHAKKLIIFLNENNVPVQLTSISAPEHKFEGLTQIFQKAYEHEQHISESINNIVDHAIKSKDHATFNFLQWYVAEQHEEEVLFKDILDKIELIGNENHGLYLADQYVKGIAKSRKS

SEQ ID NO: 9195 - protein, 1315 aa, Artificial Sequence
  SARS-CoV-2/Australia/QLD02/2020__EPI_ISL_407896 spike protein (1-1147)(G889C_L1034C) Ferritin construct
MFVFLVLLPLVSSQCVNLTTRTQLPPAYTNSFTRGVYYPDKVFRSSVLHSTQDLFLPFFSNVTWFHAIHVSGTNGTKRFDNPVLPFNDGVYFASTEKSNIIRGWIFGTTLDSKTQSLLIVNNATNVVIKVCEFQFCNDPFLGVYYHKNNKSWMESEFRVYSSANNCTFEYVSQPFLMDLEGKQGNFKNLREFVFKNIDGYFKIYSKHTPINLVRDLPQGFSALEPLVDLPIGINITRFQTLLALHRSYLTPGDSSSGWTAGAAAYYVGYLQPRTFLLKYNENGTITDAVDCALDPLSETKCTLKSFTVEKGIYQTSNFRVQPTESIVRFPNITNLCPFGEVFNATRFASVYAWNRKRISNCVADYSVLYNSASFSTFKCYGVSPTKLNDLCFTNVYADSFVIRGDEVRQIAPGQTGKIADYNYKLPDDFTGCVIAWNSNNLDSKVGGNYNYLYRLFRKSNLKPFERDISTEIYQAGSTPCNGVEGFNCYFPLQSYGFQPTNGVGYQPYRVVVLSFELLHAPATVCGPKKSTNLVKNKCVNFNFNGLTGTGVLTESNKKFLPFQQFGRDIADTTDAVRDPQTLEILDITPCSFGGVSVITPGTNTSNQVAVLYQDVNCTEVPVAIHADQLTPTWRVYSTGSNVFQTRAGCLIGAEHVNNSYECDIPIGAGICASYQTQTNSPRRARSVASQSIIAYTMSLGAENSVAYSNNSIAIPTNFTISVTTEILPVSMTKTSVDCTMYICGDSTECSNLLLQYGSFCTQLNRALTGIAVEQDKNTQEVFAQVKQIYKTPPIKDFGGFNFSQILPDPSKPSKRSFIEDLLFNKVTLADAGFIKQYGDCLGDIAARDLICAQKFNGLTVLPPLLTDEMIAQYTSALLAGTITSGWTFCAGAALQIPFAMQMAYRFNGIGVTQNVLYENQKLIANQFNSAIGKIQDSLSSTASALGKLQDVVNQNAQALNTLVKQLSSNFGAISSVLNDILSRLDKVEAEVQIDRLITGRLQSLQTYVTQQLIRAAEIRASANLAATKMSECVCGQSKRVDFCGKGYHLMSFPQSAPHGVVFLHVTYVPAQEKNFTTAPAICHDGKAHFPREGVFVSNGTHWFVTQRNFYEPQIITTDNTFVSGNCDVVIGIVNNTVYDPLQLELDSGGGGSDIIKLLNEQVNKEMQSSNLYMSMSSWCYTHSLDGAGLFLFDHAAEEYEHAKKLIIFLNENNVPVQLTSISAPEHKFEGLTQIFQKAYEHEQHISESINNIVDHAIKSKDHATFNFLQWYVAEQHEEEVLFKDILDKIELIGNENHGLYLADQYVKGIAKSRKS

SEQ ID NO: 9196 - protein, 1315 aa, Artificial Sequence
  SARS-CoV-2/India/1-31/2020__EPI_ISL_413523 spike protein (1-1147)(G889C_L1034C) Ferritin construct
MFVFLVLLPLVSSQCVNLTTRTQLPPAYTNSFTRGVYYPDKVFRSSVLHSTQDLFLPFFSNVTWFHAIHVSGTNGTKRFDNPVLPFNDGVYFASTEKSNIIRGWIFGTTLDSKTQSLLIVNNATNVVIKVCEFQFCNDPFLGVYYHKNNKSWMESEFRVYSSANNCTFEYVSQPFLMDLEGKQGNFKNLREFVFKNIDGYFKIYSKHTPINLVRDLPQGFSALEPLVDLPIGINITRFQTLLALHRSYLTPGDSSSGWTAGAAAYYVGYLQPRTFLLKYNENGTITDAVDCALDPLSETKCTLKSFTVEKGIYQTSNFRVQPTESIVRFPNITNLCPFGEVFNATRFASVYAWNRKRISNCVADYSVLYNSASFSTFKCYGVSPTKLNDLCFTNVYADSFVIRGDEVRQIAPGQTGKIADYNYKLPDDFTGCVIAWNSNNLDSKVGGNYNYLYRLFRKSNLKPFERDISTEIYQAGSTPCNGVEGFNCYFPLQSYGFQPTNGVGYQPYRVVVLSFELLHAPATVCGPKKSTNLVKNKCVNFNFNGLTGTGVLTESNKKFLPFQQFGRDIADTTDAVRDPQTLEILDITPCSFGGVSVITPGTNTSNQVAVLYQDVNCTEVPVAIHADQLTPTWRVYSTGSNVFQTRAGCLIGAEHVNNSYECDIPIGAGICASYQTQTNSPRRARSVASQSIIAYTMSLGAENSVAYSNNSIAIPTNFTISVTTEILPVSMTKTSVDCTMYICGDSTECSNLLLQYGSFCTQLNRALTGIAVEQDKNTQEVFAQVKQIYKTPPIKDFGGFNFSQILPDPSKPSKRSFIEDLLFNKVTLADAGFIKQYGDCLGDIAARDLICAQKFNGLTVLPPLLTDEMIAQYTSALLAGTITSGWTFCAGAALQIPFAMQMAYRFNGIGVTQNVLYENQKLIANQFNSVIGKIQDSLSSTASALGKLQDVVNQNAQALNTLVKQLSSNFGAISSVLNDILSRLDKVEAEVQIDRLITGRLQSLQTYVTQQLIRAAEIRASANLAATKMSECVCGQSKRVDFCGKGYHLMSFPQSAPHGVVFLHVTYVPAQEKNFTTAPAICHDGKAHFPREGVFVSNGTHWFVTQRNFYEPQIITTDNTFVSGNCDVVIGIVNNTVYDPLQPELDSGGGGSDIIKLLNEQVNKEMQSSNLYMSMSSWCYTHSLDGAGLFLFDHAAEEYEHAKKLIIFLNENNVPVQLTSISAPEHKFEGLTQIFQKAYEHEQHISESINNIVDHAIKSKDHATFNFLQWYVAEQHEEEVLFKDILDKIELIGNENHGLYLADQYVKGIAKSRKS

SEQ ID NO: 9197 - protein, 1315 aa, Artificial Sequence
  SARS-CoV-2/Guangdong/GD2020087-P0008/2020__EPI_ISL_413863 spike protein (1-1147)(G889C_L1034C) Ferritin construct
MFVFLVLLPLVSSQCVNLTTRTQLPPAYTNSFTRGVYYPDKVFRSSVLHSTQDLFLPFFSNVTWFHAIHVSGTNGTKRFDNPVLPFNDGVYFASTEKSNIIRGWIFGTTLDSKTQSLLIVNNATNVVIKVCEFQFCNDPFLGVYYHKNNKSWMESEFRVYSSANNCTFEYVSQPFLMDLEGKQGNFKNLREFVFKNIDGYFKIYSKHTPINLVRDLPQGFSALEPLVDLPIGINITRFQTLLALHRSYLTPGDSSSGWTAGAAAYYVGYLQPRTFLLKYNENGTITDAVDCALDPLSETKCTLKSFTVEKGIYQTSNFRVQPTESIVRFPNITNLCPFGEVFNATRFASVYAWNRKRISNCVADYSVLYNSASFSTFKCYGVSPTKLNDLCFTNVYADSFVIRGDEVREIAPGQTGKIADYNYKLPDDFTGCVIAWNSNNLDSKVGGNYNYLYRLFRKSNLKPFERDISTEIYQAGSTPCNGVEGFNCYFPLQSYGFQPTNGVGYQPYRVVVLSFELLHAPATVCGPKKSTNLVKNKCVNFNFNGLTGTGVLTESNKKFLPFQQFGRDIADTTDAVRDPQTLEILDITPCSFGGVSVITPGTNTSNQVAVLYQDVNCTEVPVAIHADQLTPTWRVYSTGSNVFQTRAGCLIGAEHVNNSYECDIPIGAGICASYQTQTNSPRRARSVASQSIIAYTMSLGAENSVAYSNNSIAIPTNFTISVTTEILPVSMTKTSVDCTMYICGDSTECSNLLLQYGSFCTQLNRALTGIAVEQDKNTQEVFAQVKQIYKTPPIKDFGGFNFSQILPDPSKPSKRSFIEDLLFNKVTLADAGFIKQYGDCLGDIAARDLICAQKFNGLTVLPPLLTDEMIAQYTSALLAGTITSGWTFCAGAALQIPFAMQMAYRFNGIGVTQNVLYENQKLIANQFNSAIGKIQDSLSSTASALGKLQDVVNQNAQALNTLVKQLSSNFGAISSVLNDILSRLDKVEAEVQIDRLITGRLQSLQTYVTQQLIRAAEIRASANLAATKMSECVCGQSKRVDFCGKGYHLMSFPQSAPHGVVFLHVTYVPAQEKNFTTAPAICHDGKAHFPREGVFVSNGTHWFVTQRNFYEPQIITTDNTFVSGNCDVVIGIVNNTVYDPLQPELDSGGGGSDIIKLLNEQVNKEMQSSNLYMSMSSWCYTHSLDGAGLFLFDHAAEEYEHAKKLIIFLNENNVPVQLTSISAPEHKFEGLTQIFQKAYEHEQHISESINNIVDHAIKSKDHATFNFLQWYVAEQHEEEVLFKDILDKIELIGNENHGLYLADQYVKGIAKSRKS

SEQ ID NO: 9198 - protein, 1315 aa, Artificial Sequence
  SARS-CoV-2/Sweden/01/2020__EPI_ISL_411951 spike protein (1-1147)(G889C_L1034C) Ferritin construct
MFVFLVLLPLVSSQCVNLTTRTQLPPAYTNSFTRGVYYPDKVFRSSVLHSTQDLFLPFFSNVTWFHAIHVSGTNGTKRFDNPVLPFNDGVYFASTEKSNIIRGWIFGTTLDSKTQSLLIVNNATNVVIKVCEFQFCNDPFLGVYYHKNNKSWMESEFRVYSSANNCTFEYVSQPFLMDLEGKQGNFKNLREFVFKNIDGYFKIYSKHTPINLVRDLPQGFSALEPLVDLPIGINITRFQTLLALHRSYLTPGDSSSGWTAGAAAYYVGYLQPRTFLLKYNENGTITDAVDCALDPLSETKCTLKSFTVEKGIYQTSNFRVQPTESIVRFPNITNLCPFGEVFNATRFASVYAWNRKRISNCVADYSVLYNSASFSTFKCYGVSPTKLNDLCFTNVYADSFVIRGDEVRQIAPGQTGKIADYNYKLPDDFTGCVIAWNSNNLDSKVGGNYNYLYRLFRKSNLKPFERDISTEIYQAGSTPCNGVEGFNCYFPLQSYGFQPTNGVGYQPYRVVVLSFELLHAPATVCGPKKSTNLVKNKCVNFNFNGLTGTGVLTESNKKFLPFQQFGRDIADTTDAVRDPQTLEILDITPCSFGGVSVITPGTNTSNQVAVLYQDVNCTEVPVAIHADQLTPTWRVYSTGSNVFQTRAGCLIGAEHVNNSYECDIPIGAGICASYQTQTNSPRRARSVASQSIIAYTMSLGAENSVAYSNNSIAIPTNFTISVTTEILPVSMTKTSVDCTMYICGDSTECSNLLLQYGSFCTQLNRALTGIAVEQDKNTQEVFAQVKQIYKTPPIKDCGGFNFSQILPDPSKPSKRSFIEDLLFNKVTLADAGFIKQYGDCLGDIAARDLICAQKFNGLTVLPPLLTDEMIAQYTSALLAGTITSGWTFCAGAALQIPFAMQMAYRFNGIGVTQNVLYENQKLIANQFNSAIGKIQDSLSSTASALGKLQDVVNQNAQALNTLVKQLSSNFGAISSVLNDILSRLDKVEAEVQIDRLITGRLQSLQTYVTQQLIRAAEIRASANLAATKMSECVCGQSKRVDFCGKGYHLMSFPQSAPHGVVFLHVTYVPAQEKNFTTAPAICHDGKAHFPREGVFVSNGTHWFVTQRNFYEPQIITTDNTFVSGNCDVVIGIVNNTVYDPLQPELDSGGGGSDIIKLLNEQVNKEMQSSNLYMSMSSWCYTHSLDGAGLFLFDHAAEEYEHAKKLIIFLNENNVPVQLTSISAPEHKFEGLTQIFQKAYEHEQHISESINNIVDHAIKSKDHATFNFLQWYVAEQHEEEVLFKDILDKIELIGNENHGLYLADQYVKGIAKSRKS

SEQ ID NO: 9199 - protein, 1315 aa, Artificial Sequence
  SARS-CoV-2/Tianmen/HBCDC-HB-07/2020__EPI_ISL_412983 spike protein (1-1147)(G889C_L1034C) Ferritin construct
MFVFLVLLPLVSSQCVNLTTRTQLPPAYTNSFTRGVYYPDKVFRSSVLHSTQDLFLPFFSNVTWFHAIHVSGTNGTKRFDNPVLPFNDGVYFASTEKSNIIRGWIFGTTLDSKTQSLLIVNNATNVVIKVCEFQFCNDPFLGVYYHKNNKSWMESEFRVYSSANNCTFEYVSQPFLMDLEGKQGNFKNLREFVFKNIDGYFKIYSKHTPINLVRDLPQGFSALEPLVDLPIGINITRFQTLLALHRSYLTPGDSSSGWTAGAAAYYVGYLQPRTFLLKYNENGTITDAVDCALDPLSETKCTLKSFTVEKGIYQTSNFRVQPTESIVRFPNITNLCPFGEVFNATRFASVYAWNRKRISNCVADYSVLYNSASFSTFKCYGVSPTKLNDLCFTNVYADSFVIRGDEVRQIAPGQTGKIADYNYKLPDDFTGCVIAWNSNNLDSKVGGNYNYLYRLFRKSNLKPFERDISTEIYQAGSTPCNGVEGFNCYFPLQSYGFQPTNGVGYQPYRVVVLSFELLHAPATVCGPKKSTNLVKNKCVNFNFNGLTGTGVLTESNKKFLPFQQFGRDIADTTDAVRDPQTLEILDITPCSFGGVSVITPGTNTSNQVAVLYQDLNCTEVPVAIHADQLTPTWRVYSTGSNVFQTRAGCLIGAEHVNNSYECDIPIGAGICASYQTQTNSPRRARSVASQSIIAYTMSLGAENSVAYSNNSIAIPTNFTISVTTEILPVSMTKTSVDCTMYICGDSTECSNLLLQYGSFCTQLNRALTGIAVEQDKNTQEVFAQVKQIYKTPPIKDFGGFNFSQILPDPSKPSKRSFIEDLLFNKVTLADAGFIKQYGDCLGDIAARDLICAQKFNGLTVLPPLLTDEMIAQYTSALLAGTITSGWTFCAGAALQIPFAMQMAYRFNGIGVTQNVLYENQKLIANQFNSAIGKIQDSLSSTASALGKLQDVVNQNAQALNTLVKQLSSNFGAISSVLNDILSRLDKVEAEVQIDRLITGRLQSLQTYVTQQLIRAAEIRASANLAATKMSECVCGQSKRVDFCGKGYHLMSFPQSAPHGVVFLHVTYVPAQEKNFTTAPAICHDGKAHFPREGVFVSNGTHWFVTQRNFYEPQIITTDNTFVSGNCDVVIGIVNNTVYDPLQPELDSGGGGSDIIKLLNEQVNKEMQSSNLYMSMSSWCYTHSLDGAGLFLFDHAAEEYEHAKKLIIFLNENNVPVQLTSISAPEHKFEGLTQIFQKAYEHEQHISESINNIVDHAIKSKDHATFNFLQWYVAEQHEEEVLFKDILDKIELIGNENHGLYLADQYVKGIAKSRKS

SEQ ID NO: 9200 - protein, 1315 aa, Artificial Sequence
  SARS-CoV-2/Hong Kong/case42_VM20002493/2020__EPI_ISL_414527 spike protein (1-1147)(G889C_L1034C) Ferritin construct
MFVFLVLLPLVSSQCVNLTTRTQLPPAYTNSFTRGVYYPDKVFRSSVLHSTQDLFLPFFSNVTWFHAIHVSGTNGTKRFDNPVLPFNDGVYFASTEKSNIIRGWIFGTTLDSKTQSLLIVNNATNVVIKVCEFQFCNDPFLGVYYHKNNKSWMESEFRVYSSANNCTFEYVSQPFLMDLEGKQGNFKNLREFVFKNIDGYFKIYSKHTPINLVRDLPQGFSALEPLVDLPIGINITRFQTLLALHRSYLTPGDSSSGWTAGAAAYYVGYLQPRTFLLKYNENGTITDAVDCALDPLSETKCTLKSFTVEKGIYQTSNFRVQPTESIVRFPNITNLCPFGEVFNATRFASVYAWNRKRISNCVADYSVLYNSASFSTFKCYGVSPTKLNDLCFTNVYADSFVIRGDEVRQIAPGQTGKIADYNYKLPDDFTGCVIAWNSNNLDSKVGGNYNYLYRLFRKSNLKPFERDISTEIYQAGSTPCNGVEGFNCYFPLQSYGFQPTNGVGYQPYRVVVLSFELLHAPATVCGPKKSTNLVKNKCVNFNFNGLTGTGVLTESNKKFLPFQQFGRDIADTTDAVRDPQTLEILDITPCSFGGVSVITPGTNTSNQVAVLYQDVNCTEVPVAIHADQLTPTWRVYSTGSNVFQTRAGCLIGAEHVNNSYECDIPIGAGICASYQTQTNSPRRARSVASQSIIAYTMSLGAENSVAYSNNSIAIPTNFAISVTTEILPVSMTKTSVDCTMYICGDSTECSNLLLQYGSFCTQLNRALTGIAVEQDKNTQEVFAQVKQIYKTPPIKDFGGFNFSQILPDPSKPSKRSFIEDLLFNKVTLADAGFIKQYGDCLGDIAARDLICAQKFNGLTVLPPLLTDEMIAQYTSALLAGTITSGWTFCAGAALQIPFAMQMAYRFNGIGVTQNVLYENQKLIANQFNSAIGKIQDSLSSTASALGKLQDVVNQNAQALNTLVKQLSSNFGAISSVLNDILSRLDKVEAEVQIDRLITGRLQSLQTYVTQQLIRAAEIRASANLAATKMSECVCGQSKRVDFCGKGYHLMSFPQSAPHGVVFLHVTYVPAQEKNFTTAPAICHDGKAHFPREGVFVSNGTHWFVTQRNFYEPQIITTDNTFVSGNCDVVIGIVNNTVYDPLQPELDSGGGGSDIIKLLNEQVNKEMQSSNLYMSMSSWCYTHSLDGAGLFLFDHAAEEYEHAKKLIIFLNENNVPVQLTSISAPEHKFEGLTQIFQKAYEHEQHISESINNIVDHAIKSKDHATFNFLQWYVAEQHEEEVLFKDILDKIELIGNENHGLYLADQYVKGIAKSRKS

SEQ ID NO: 9201 - protein, 1315 aa, Artificial Sequence
  SARS-CoV-2/USA/CruiseA-23/2020__EPI_ISL_414482 spike protein (1-1147)(G889C_L1034C) Ferritin construct
MFVFLVLLPLVSSQCVNLTTRTQLPPAYTNSFTRGVYYPDKVFRSSVLHSTQDLFLPFFSNVTWFHAIHVSGTNGTKRFDNPVLPFNDGVYFASTEKSNIIRGWIFGTTLDSKTQSLLIVNNATNVVIKVCEFQFCNDPFLGVYYHKNNKSWMESEFRVYSSANNCTFEYVSQPFLMDLEVKQGNFKNLREFVFKNIDGYFKIYSKHTPINLVRDLPQGFSALEPLVDLPIGINITRFQTLLALHRSYLTPGDSSSGWTAGAAAYYVGYLQPRTFLLKYNENGTITDAVDCALDPLSETKCTLKSFTVEKGIYQTSNFRVQPTESIVRFPNITNLCPFGEVFNATRFASVYAWNRKRISNCVADYSVLYNSASFSTFKCYGVSPTKLNDLCFTNVYADSFVIRGDEVRQIAPGQTGKIADYNYKLPDDFTGCVIAWNSNNLDSKVGGNYNYLYRLFRKSNLKPFERDISTEIYQAGSTPCNGVEGFNCYFPLQSYGFQPTNGVGYQPYRVVVLSFELLHAPATVCGPKKSTNLVKNKCVNFNFNGLTGTGVLTESNKKFLPFQQFGRDIADTTDAVRDPQTLEILDITPCSFGGVSVITPGTNTSNQVAVLYQDVNCTEVPVAIHADQLTPTWRVYSTGSNVFQTRAGCLIGAEHVNNSYECDIPIGAGICASYQTQTNSPRRARSVASQSIIAYTMSLGAENSVAYSNNSIAIPTNFTISVTTEILPVSMTKTSVDCTMYICGDSTECSNLLLQYGSFCTQLNRALTGIAVEQDKNTQEVFAQVKQIYKTPPIKDFGGFNFSQILPDPSKPSKRSFIEDLLFNKVTLADAGFIKQYGDCLGDIAARDLICAQKFNGLTVLPPLLTDEMIAQYTSALLAGTITSGWTFCAGAALQIPFAMQMAYRFNGIGVTQNVLYENQKLIANQFNSAIGKIQDSLSSTASALGKLQDVVNQNAQALNTLVKQLSSNFGAISSVLNDILSRLDKVEAEVQIDRLITGRLQSLQTYVTQQLIRAAEIRASANLAATKMSECVCGQSKRVDFCGKGYHLMSFPQSAPHGVVFLHVTYVPAQEKNFTTAPAICHDGKAHFPREGVFVSNGTHWFVTQRNFYEPQIITTDNTFVSGNCDVVIGIVNNTVYDPLQPELDSGGGGSDIIKLLNEQVNKEMQSSNLYMSMSSWCYTHSLDGAGLFLFDHAAEEYEHAKKLIIFLNENNVPVQLTSISAPEHKFEGLTQIFQKAYEHEQHISESINNIVDHAIKSKDHATFNFLQWYVAEQHEEEVLFKDILDKIELIGNENHGLYLADQYVKGIAKSRKS

SEQ ID NO: 9202 - protein, 1315 aa, Artificial Sequence
  SARS-CoV-2/Hong Kong/case85_VM20002868/2020__EPI_ISL_414519 spike protein (1-1147)(G889C_L1034C) Ferritin construct
MFVFLVLVPLVSSQCVNLTTRTQLPPAYTNSFTRGVYYPDKVFRSSVLHSTQDLFLPFFSNVTWFHAIHVSGTNGTKRFDNPVLPFNDGVYFASTEKSNIIRGWIFGTTLDSKTQSLLIVNNATNVVIKVCEFQFCNDPFLGVYYHKNNKSWMESEFRVYSSANNCTFEYVSQPFLMDLEGKQGNFKNLREFVFKNIDGYFKIYSKHTPINLVRDLPQGFSALEPLVDLPIGINITRFQTLLALHRSYLTPGDSSSGWTAGAAAYYVGYLQPRTFLLKYNENGTITDAVDCALDPLSETKCTLKSFTVEKGIYQTSNFRVQPTESIVRFPNITNLCPFGEVFNATRFASVYAWNRKRISNCVADYSVLYNSASFSTFKCYGVSPTKLNDLCFTNVYADSFVIRGDEVRQIAPGQTGKIADYNYKLPDDFTGCVIAWNSNNLDSKVGGNYNYLYRLFRKSNLKPFERDISTEIYQAGSTPCNGVEGFNCYFPLQSYGFQPTNGVGYQPYRVVVLSFELLHAPATVCGPKKSTNLVKNKCVNFNFNGLTGTGVLTESNKKFLPFQQFGRDIADTTDAVRDPQTLEILDITPCSFGGVSVITPGTNTSNQVAVLYQDVNCTEVPVAIHADQLTPTWRVYSTGSNVFQTRAGCLIGAEHVNNSYECDIPIGAGICASYQTQTNSPRRARSVASQSIIAYTMSLGAENSVAYSNNSIAIPTNFTISVTTEILPVSMTKTSVDCTMYICGDSTECSNLLLQYGSFCTQLNRALTGIAVEQDKNTQEVFAQVKQIYKTPPIKDFGGFNFSQILPDPSKPSKRSFIEDLLFNKVTLADAGFIKQYGDCLGDIAARDLICAQKFNGLTVLPPLLTDEMIAQYTSALLAGTITSGWTFCAGAALQIPFAMQMAYRFNGIGVTQNVLYENQKLIANQFNSAIGKIQDSLSSTASALGKLQDVVNQNAQALNTLVKQLSSNFGAISSVLNDILSRLDKVEAEVQIDRLITGRLQSLQTYVTQQLIRAAEIRASANLAATKMSECVCGQSKRVDFCGKGYHLMSFPQSAPHGVVFLHVTYVPAQEKNFTTAPAICHDGKAHFPREGVFVSNGTHWFVTQRNFYEPQIITTDNTFVSGNCDVVIGIVNNTVYDPLQPELDSGGGGSDIIKLLNEQVNKEMQSSNLYMSMSSWCYTHSLDGAGLFLFDHAAEEYEHAKKLIIFLNENNVPVQLTSISAPEHKFEGLTQIFQKAYEHEQHISESINNIVDHAIKSKDHATFNFLQWYVAEQHEEEVLFKDILDKIELIGNENHGLYLADQYVKGIAKSRKS

SEQ ID NO: 9203 - protein, 1315 aa, Artificial Sequence; identical to SEQ ID NO: 9193
  SARS-CoV-2/England/200990660/2020__EPI_ISL_414523 spike protein (1-1147)(G889C_L1034C) Ferritin construct

SEQ ID NO: 9204 - protein, 1315 aa, Artificial Sequence
  SARS-CoV-2/Australia/NSW09/2020__EPI_ISL_413595 spike protein (1-1147)(G889C_L1034C) Ferritin construct
MFVFLVLLPLVSSQCVNLTTRTQLPPAYTNSFTRGVYYPDKVFRSSVLHSTQDLFLPFFSNVTWFHAIHVSGTNGTKRFDNPVLPFNDGVYFASTEKSNIIRGWIFGTTLDSKTQSLLIVNNATNVVIKVCEFQFCNDPFLGVYYHKNNKSWMESEFRVYSSANNCTFEYVSQPFLMDLEGKQGNFKNLREFVFKNIDGYFKIYSKHTPINLVRDLPQGFSALEPLVDLPIGINITRFQTLLALHRSYLTPGDSSSGWTAGAAAYYVGYLQPRTFLLKYNENGTITDAVDCALDPLSETKCTLKSFTVEKGIYQTSNFRVQPTESIVRFPNITNLCPFGEVFNATRFASVYAWNRKRISNCVADYSVLYNSASFSTFKCYGVSPTKLNDLCFTNVYADSFVIRGDEVRQIAPGQTGKIADYNYKLPDDFTGCVIAWNSNNLDSKVGGNYNYLYRLFRKSNLKPFERDISTEIYQAGSTPCNGVEGFNCYFPLQSYGFQPTNGVGYQPYRVVVLSFELLHAPATVCGPKKSTNLVKNKCVNFNFNGLTGTGVLTESNKKFLPFQQFGRDIADTTDAVRDPQTLEILDITPCSFGGVSVITPGTNTSNQVAVLYQDVNCTEVPVAIHADQLTPTWRVYSTGSNVFQTRAGCLIGAEHVNNSYECDIPIGAGICASYQTQTNSPRRARSVASQSIIAYTMSLGAENSVAYSNNSIAIPTNFTISVTTEILPVSMTKTSVDCTMYICGDSTECSNLLLQYGSFCTQLNRALTGIAVEQDKNTQEVFAQVKQIYKTPPIKDFGGFNFSQILPDPSKPSKRSFIEDLLFNKVTLADAGFIKQYGDCLGDIAARDLICAQKFNGLTVLPPLLTDEMIAQYTSALLAGTITSGWTFCAGAALQIPFAMQMAYRFNGIGVTQNVLYENQKLIANQFNSAIGKIQDSLSFTASALGKLQDVVNQNAQALNTLVKQLSSNFGAISSVLNDILSRLDKVEAEVQIDRLITGRLQSLQTYVTQQLIRAAEIRASANLAATKMSECVCGQSKRVDFCGKGYHLMSFPQSAPHGVVFLHVTYVPAQEKNFTTAPAICHDGKAHFPREGVFVSNGTHWFVTQRNFYEPQIITTDNTFVSGNCDVVIGIVNNTVYDPLQPELDSGGGGSDIIKLLNEQVNKEMQSSNLYMSMSSWCYTHSLDGAGLFLFDHAAEEYEHAKKLIIFLNENNVPVQLTSISAPEHKFEGLTQIFQKAYEHEQHISESINNIVDHAIKSKDHATFNFLQWYVAEQHEEEVLFKDILDKIELIGNENHGLYLADQYVKGIAKSRKS

SEQ ID NO: 9205 - protein, 1315 aa, Artificial Sequence; identical to SEQ ID NO: 9185
  SARS-CoV-2/Australia/NSW10/2020__EPI_ISL_413596 spike protein (1-1147)(G889C_L1034C) Ferritin construct

SEQ ID NO: 9206 - protein, 1315 aa, Artificial Sequence
  SARS-CoV-2/Switzerland/1000477797/2020__EPI_ISL_413023 spike protein (1-1147)(G889C_L1034C) Ferritin construct
MFVFLVLLPLVSSQCVNLTTRTQLPPAYTNSFTRGVYYPDKVFRSSVLHSTQDLFLPFFSNVTWFHAIHVSGTNGTKRFDNPVLPFNDGVYFASTEKSNIIRGWIFGTTLDSKTQSLLIVNNATNVVIKVCEFQFCNDPFLGVYYHKNNKSWMESEFRVYSSANNCTFEYVSQPFLMDLEGKQGNFKNLREFVFKNIDGYFNIYSKHTPINLVRDLPQGFSALEPLVDLPIGINITRFQTLLALHRSYLTPGDSSSGWTAGAAAYYVGYLQPRTFLLKYNENGTITDAVDCALDPLSETKCTLKSFTVEKGIYQTSNFRVQPTESIVRFPNITNLCPFGEVFNATRFASVYAWNRKRISNCVADYSVLYNSASFSTFKCYGVSPTKLNDLCFTNVYADSFVIRGDEVRQIAPGQTGKIADYNYKLPDDFTGCVIAWNSNNLDSKVGGNYNYLYRLFRKSNLKPFERDISTEIYQAGSTPCNGVEGFNCYFPLQSYGFQPTNGVGYQPYRVVVLSFELLHAPATVCGPKKSTNLVKNKCVNFNFNGLTGTGVLTESNKKFLPFQQFGRDIADTTDAVRDPQTLEILDITPCSFGGVSVITPGTNTSNQVAVLYQGVNCTEVPVAIHADQLTPTWRVYSTGSNVFQTRAGCLIGAEHVNNSYECDIPIGAGICASYQTQTNSPRRARSVASQSIIAYTMSLGAENSVAYSNNSIAIPTNFTISVTTEILPVSMTKTSVDCTMYICGDSTECSNLLLQYGSFCTQLNRALTGIAVEQDKNTQEVFAQVKQIYKTPPIKDFGGFNFSQILPDPSKPSKRSFIEDLLFNKVTLADAGFIKQYGDCLGDIAARDLICAQKFNGLTVLPPLLTDEMIAQYTSALLAGTITSGWTFCAGAALQIPFAMQMAYRFNGIGVTQNVLYENQKLIANQFNSAIGKIQDSLSSTASALGKLQDVVNQNAQALNTLVKQLSSNFGAISSVLNDILSRLDKVEAEVQIDRLITGRLQSLQTYVTQQLIRAAEIRASANLAATKMSECVCGQSKRVDFCGKGYHLMSFPQSAPHGVVFLHVTYVPAQEKNFTTAPAICHDGKAHFPREGVFVSNGTHWFVTQRNFYEPQIITTDNTFVSGNCDVVIGIVNNTVYDPLQPELDSGGGGSDIIKLLNEQVNKEMQSSNLYMSMSSWCYTHSLDGAGLFLFDHAAEEYEHAKKLIIFLNENNVPVQLTSISAPEHKFEGLTQIFQKAYEHEQHISESINNIVDHAIKSKDHATFNFLQWYVAEQHEEEVLFKDILDKIELIGNENHGLYLADQYVKGIAKSRKS

SEQ ID NO: 9207 - protein, 1315 aa, Artificial Sequence
  SARS-CoV-2/Belgium/BA-02291/2020__EPI_ISL_415159 spike protein (1-1147)(G889C_L1034C) Ferritin construct
MFVFLVLLPLVSSQCVNLTTRTQLPPAYTNSFTRGVYYPDKVFRSSVLHSTQDLFLPFFSNVTWFHAIHVSGTNGTKRFDNPVLPFNDGVYFASTEKSNIIRGWIFGTTLDSKTQSLLIVNNATNVVIKVCEFQFCNDPFLGVYYHKNNKSWMESEFRVYSSANNCTFEYVSQPFLMDLEGKQGNFKNLREFVFKNIDGYFKIYSKHTPINLVRDLPQGFSALEPLVDLPIGINITRFQTLLALHRSYLTPGDSSSGWTAGAAAYYVGYLQPRTFLLKYNENGTITDAVDCALDPLSETKCTLKSFTVEKGIYQTSNFRVQPTESIVRFPNITNLCPFGEVFNATRFASVYAWNRKRISNCVADYSVLYNSASFSTFKCYGVSPTKLNDLCFTNVYADSFVIRGDEVRQIAPGQTGKIADYNYKLPDDFTGCVIAWNSNNLDSKVGGNYNYLYRLFRRSNLKPFERDISTEIYQAGSTPCNGVEGFNCYFPLQSYGFQPTNGVGYQPYRVVVLSFELLPAPATVCGPKKSTNLVKNKCVNFNFNGLTGTGVLTESNKKFLPFQQFGRDIADTTDAVRDPQTLEILDITPCSFGGVSVITPGTNTSNQVAVLYQGVNCTEVPVAIHADQLTPTWRVYSTGSNVFQTRAGCLIGAEHVNNSYECDIPIGAGICASYQTQTNSPRRARSVASQSIIAYTMSLGAENSVAYSNNSIAIPTNFTISVTTEILPVSMTKTSVDCTMYICGDSTECSNLLLQYGSFCTQLNRALTGIAVEQDKNTQEVFAQVKQIYKTPPIKDFGGFNFSQILPDPSKPSKRSFIEDLLFNKVTLADAGFIKQYGDCLGDIAARDLICAQKFNGLTVLPPLLTDEMIAQYTSALLAGTITSGWTFCAGAALQIPFAMQMAYRFNGIGVTQNVLYENQKLIANQFNSAIGKIQDSLSSAAPALGKLQDVVNQNAQALNTLVKQLSSNFGAISSVLNDILSRLDKVEAEVQIDRLITGRLQSLQTYVTQQLIRAAEIRASANLAATKMSECVCGQSKRVDFCGKGYHLMSFPQSAPHGVVFLHVTYVPAQEKNFTTAPAICHDGKAHFPREGVFVSNGTHWFVTQRNFYEPQIITTDNTFVSGNCDVVIGIVNNTVYDPLQPELDSGGGGSDIIKLLNEQVNKEMQSSNLYMSMSSWCYTHSLDGAGLFLFDHAAEEYEHAKKLIIFLNENNVPVQLTSISAPEHKFEGLTQIFQKAYEHEQHISESINNIVDHAIKSKDHATFNFLQWYVAEQHEEEVLFKDILDKIELIGNENHGLYLADQYVKGIAKSRKS

SEQ ID NO: 9208 - protein, 1315 aa, Artificial Sequence
  SARS-CoV-2/USA/WA8-UW5/2020__EPI_ISL_413486 spike protein (1-1147)(G889C_L1034C) Ferritin construct
MFVFLVLLPLVSSQCVNLTTRTQLPPAYTNSFTRGVYYPDKVFRSSVLHSTQDLFLPFFSNVTWFHAIHVSGTNGTKRFDNPVLPFNDGVYFASTEKSNIIRGWIFGTTLDSKTQSLLIVNNATNVVIKVCEFQFCNDPFLGVYYHKNNKSWMESEFRVYSSANNCTFEYVSQPFLMDLEGKQGNFKNLREFVFKNIDGYFKIYSKHTPINLVRDLPQGFSALEPLVDLPIGINITRFQTLLALHRSYLTPGDSSSGWTAGAAAYYVGYLQPRTFLLKYNENGTITDAVDCALDPLSETKCTLKSFTVEKGIYQTSNFRVQPTESIVRFPNITNLCPFGEVFNATRFASVYAWNRKRISNCVADYSVLYNSASFSTFKCYGVSPTKLNDLCFTNVYADSFVIRGDEVRQIAPGQTGKIADYNYKLPDDFTGCVIAWNSNNLDSKVGGNYNYLYRLFRKSNLKPFERDISTEIYQAGSTPCNGVEGFNCYFPLQSYGFQPTNGVGYQPYRVVVLSFELLHAPATVCGPKKSTNLVKNKCVNFNFNGLTGTGVLTESNKKFLPFQQFGRDIADTTDAVRDPQTLEILDITPCSFGGVSVITPGTNTSNQVAVLYQDVNCTEVPVAIHADQLTPTWRVYSTGSNVFQTRAGCLIGAEYVNNSYECDIPIGAGICASYQTQTNSPRRARSVASQSIIAYTMSLGAENSVAYSNNSIAIPTNFTISVTTEILPVSMTKTSVDCTMYICGDSTECSNLLLQYGSFCTQLNRALTGIAVEQDKNTQEVFAQVKQIYKTPPIKDFGGFNFSQILPDPSKPSKRSFIEDLLFNKVTLADAGFIKQYGDCLGDIAARDLICAQKFNGLTVLPPLLTDEMIAQYTSALLAGTITSGWTFCAGAALQIPFAMQMAYRFNGIGVTQNVLYENQKLIANQFNSAIGKIQDSLSSTASALGKLQDVVNQNAQALNTLVKQLSSNFGAISSVLNDILSRLDKVEAEVQIDRLITGRLQSLQTYVTQQLIRAAEIRASANLAATKMSECVCGQSKRVDFCGKGYHLMSFPQSAPHGVVFLHVTYVPAQEKNFTTAPAICHDGKAHFPREGVFVSNGTHWFVTQRNFYEPQIITTDNTFVSGNCDVVIGIVNNTVYDPLQPELDSGGGGSDIIKLLNEQVNKEMQSSNLYMSMSSWCYTHSLDGAGLFLFDHAAEEYEHAKKLIIFLNENNVPVQLTSISAPEHKFEGLTQIFQKAYEHEQHISESINNIVDHAIKSKDHATFNFLQWYVAEQHEEEVLFKDILDKIELIGNENHGLYLADQYVKGIAKSRKS

SEQ ID NO: 9209 - protein, 1315 aa, Artificial Sequence
  SARS-CoV-2/England/20102000506/2020__EPI_ISL_415147 spike protein (1-1147)(G889C_L1034C) Ferritin construct
MFVFLVLLPLVSSQCVNLTTRTQLPPAYTNSFTRGVYYPDKVFRSSVLHSTQDLFLPFFSNVTWFHAIHVSGTNGTKRFDNPVLPFNDGVYFASTEKSNIIRGWIFGTTLDSKTQSLLIVNNATNVVIKVCEFQFCNDPFLGVYYHKNNKSWMESEFRVYSSANNCTFEYVSQPFLMDLEGKQGNFKNLREFVFKNIDGYFKIYSKHTPINLVRDLPQGFSALEPLVDLPIGINITRFQTLLALHRSYLTPGDSSSGWTAGAAAYYVGYLQPRTFLLKYNENGTITDAVDCALDPLSETKCTLKSFTVEKGIYQTSNFRVQPTESIVRFPNITNLCPFGEVFNATRFASVYAWNRKRISNCVADYSVLYNSASFSTFKCYGVSPTKLNDLCFTNVYADSFVIRGDEVRQIAPGQTGKIADYNYKLPDDFTGCVIAWNSNNLDSKVGGNYNYLYRLFRKSNLKPFERDISTEIYQAGSTPCNGVEGFNCYFPLQSYGFQPTNGVGYQPYRVVVLSFELLHAPATVCGPKKSTNLVKNKCVNFNFNGLTGTGVLTESNKKFLPFQQFGRDIADTTDAVRDPQTLEILDITPCSFGGVSVITPGTNTSNQVAVLYQGVNCTEVPVAIHADQLTPTWRVYSTGSNVFQTRAGCLIGAEHVNNSYECDIPIGAGICASYQTQTNSPRRARSVASQSIIAYTMSLGAENSVAYSNNSIAIPTNFTISVTTEILPVSMTKTSVDCTMYICGDSTECSNLLLQYGSFCTQLNRALTGIAVEQDKNTQEVFAQVKQIYKTPPIKDFGGFNFSQILPDPSKPSKRSFIEDLLFNKVTLADAGFIKQYGYCLGDIAARDLICAQKFNGLTVLPPLLTDEMIAQYTSALLAGTITSGWTFCAGAALQIPFAMQMAYRFNGIGVTQNVLYENQKLIANQFNSAIGKIQDSLSSTASALGKLQDVVNQNAQALNTLVKQLSSNFGAISSVLNDILSRLDKVEAEVQIDRLITGRLQSLQTYVTQQLIRAAEIRASANLAATKMSECVCGQSKRVDFCGKGYHLMSFPQSAPHGVVFLHVTYVPAQEKNFTTAPAICHDGKAHFPREGVFVSNGTHWFVTQRNFYEPQIITTDNTFVSGNCDVVIGIVNNTVYDPLQPELDSGGGGSDIIKLLNEQVNKEMQSSNLYMSMSSWCYTHSLDGAGLFLFDHAAEEYEHAKKLIIFLNENNVPVQLTSISAPEHKFEGLTQIFQKAYEHEQHISESINNIVDHAIKSKDHATFNFLQWYVAEQHEEEVLFKDILDKIELIGNENHGLYLADQYVKGIAKSRKS

SEQ ID NO: 9210 - protein, 1315 aa, Artificial Sequence
  SARS-CoV-2/Belgium/VAG-03013/2020__EPI_ISL_415155 spike protein (1-1147)(G889C_L1034C) Ferritin construct
MFVFLVLLPLVSSQCVNLTTRTQLPPAYTNSFTRGVYYPDKVFRSSVLHSTQDLFLPFFSNVTWFHAIHVSGTNGTKRFDNPVLPFNDGVYFASTEKSNIIRGWIFGTTLDSKTQSLLIVNNATNVVIKVCEFQFCNDPFLGVYYHKNNKSWMESEFRVYSSANNCTFEYVSQPFLMDLEGKQGNFKNLREFVFKNIDGYFKIYSKHTPINLVRDLPQGFSALEPLVDLPIGINITRFQTLLALHRSYLTPGDSSSGWTAGAAAYYVGYLQPRTFLLKYNENGTITDAVDCALDPLSETKCTLKSFTVEKGIYQTSNFRVQPTESIVRFPNITNLCPFGEVFNATRFASVYAWNRKRISNCVADYSVLYNSASFSTFKCYGVSPTKLNDLCFTNVYADSFVIRGDEVRQIAPGQTGKIADYNYKLPDDFTGCVIAWNSNNLDSKVGGNYNYLYRLFRKSNLKPFERDISTEIYQAGSTPCNGVEGFNCYFPLQSYGFQPTNGVGYQPYRVVVLSFELLHAPATVCGPKKSTNLVKNKCVNFNFNGLTGTGVLTESNKKFLPFQQFGRDIADTTDAVRDPQTLEILDITPCSFGGVSVITPGTNTSNQVAVLYQGVNCTEVPVAIHADQLTPTWRVYSTGSNVFQTRAGCLIGAEHVNNSYECDIPIGAGICASYQTQTNSPRRARSVASQSIIAYTMSLGAENSVAYSNNSIAIPTNFTISVTTEILPVSMTKTSVDCTMYICGDSTECSNLLLQYGSFCTQLNRALTGIAVEQDKNTQEVFAQVKQIYKTPPIKDFGGFNFSQILPDPSKPSKRSFIEDLLFNKVTLADAGFIKQYGDCLGDIAARDLICAQKFNGLTVLPPLLTDEMIAQYTSALLAGTITSGWTFCAGAALQIPFAMQMAYRFNGIGVTQNVLYENQKLIANQFNSAIGKIQDSLSSTATALGKLQDVVNQNAQALNTLVKQLSSNFGAISSVLNDILSRLDKVEAEVQIDRLITGRLQSLQTYVTQQLIRAAEIRASANLAATKMSECVCGQSKRVDFCGKGYHLMSFPQSAPHGVVFLHVTYVPAQEKNFTTAPAICHDGKAHFPREGVFVSNGTHWFVTQRNFYEPQIITTDNTFVSGNCDVVIGIVNNTVYDPLQPELDSGGGGSDIIKLLNEQVNKEMQSSNLYMSMSSWCYTHSLDGAGLFLFDHAAEEYEHAKKLIIFLNENNVPVQLTSISAPEHKFEGLTQIFQKAYEHEQHISESINNIVDHAIKSKDHATFNFLQWYVAEQHEEEVLFKDILDKIELIGNENHGLYLADQYVKGIAKSRKS

SEQ ID NO: 9211 - protein, 1315 aa, Artificial Sequence
  SARS-CoV-2/Belgium/BC-03016/2020__EPI_ISL_415157 spike protein (1-1147)(G889C_L1034C) Ferritin construct
MFVFLVLLPLVSSQCVNLTTRTQLPPAYTNSFTRGVYYPDKVFRSSVLHSTQDLFLPFFSNVTWFHAIHVSGTNGTKRFDNPVLPFNDGVYFASTEKSNIIRGWIFGTTLDSKTQSLLIVNNATNVVIKVCEFQFCNDPFLGVYYHKNNKSWMESEFRVYSSANNCTFEYVSQPFLMDLEGKQGNFKNLREFVFKNIDGYFKIYSKHTPINLVRDLPQGFSALEPLVDLPIGINITRFQTLLALHRSYLTPGDSSSGWTAGAAAYYVGYLQPRTFLLKYNENGTITDAVDCALDPLSETKCTLKSFTVEKGIYQTSNFRVQPTESIVRFPNITNLCPFGEVFNATRFASVYAWNRKRISNCVADYSVLYNSASFSTFKCYGVSPTKLNDLCFTNVYADSFVIRGDEVRQIAPGQTGKIADYNYKLPDDFTGCVIAWNSNNLDSKVGGNYNYLYRLFRKSNLKPFERDISTEIYQAGSTPCNGVEGFNCYFPLQSYGFQPTNGVGYQPYRVVVLSFELLHAPATVCGPKKSTNLVKNKCVNFNFNGLTGTGVLTESNKKFLPFQQFGRDIADTTDAVRDPQTLEILDITPCSFGGVSVITPGTNTSNQVAVLYQGVNCTEVPVAIHADQLTPTWRVYSTGSNVFQTRAGCLIGAEHVNNSYECDIPIGAGICASYQTQTNSPRRARSVASQSIIAYTMSLGAENSVAYSNNSIAIPTNFTISVTTEILPVSMTKTSVDCTMYICGDSTECSNLLLQYGSFCTQLNRALTGIAVEQDKNTQEVFAQVKQIYKTPPIKDFGGFNFSQILPDPSKPSKRSFIEDLLFNKVTLADAGFIKQYGDCLGDIAARDLICAQKFNGLTVLPPLLTDEMIAQYTSALLAGTITSGWTFCAGAALQIPFAMQMAYRFNGIGVTQNVLYENQKLIANQFNSAIGKIQDSLSSTAPALGKLQDVVNQNAQALNTLVKQLSSNFGAISSVLNDILSRLDKVEAEVQIDRLITGRLQSLQTYVTQQLIRAAEIRASANLAATKMSECVCGQSKRVDFCGKGYHLMSFPQSAPHGVVFLHVTYVPAQEKNFTTAPAICHDGKAHFPREGVFVSNGTHWFVTQRNFYEPQIITTDNTFVSGNCDVVIGIVNNTVYDPLQPELDSGGGGSDIIKLLNEQVNKEMQSSNLYMSMSSWCYTHSLDGAGLFLFDHAAEEYEHAKKLIIFLNENNVPVQLTSISAPEHKFEGLTQIFQKAYEHEQHISESINNIVDHAIKSKDHATFNFLQWYVAEQHEEEVLFKDILDKIELIGNENHGLYLADQYVKGIAKSRKS

SEQ ID NO: 9212 - protein, 1315 aa, Artificial Sequence
  SARS-CoV-2/Germany/BavPat3/2020__EPI_ISL_414521 spike protein (1-1147)(G889C_L1034C) Ferritin construct
MFVFLVLLPLVSSQCVNLTTRTQLPPAYTNSFTRGVYYPDKVFRSSVLHSTQDLFLPFFSNVTWFHAIHVSGTNGTKRFDNPVLPFNDGVYFASTEKSNIIRGWIFGTTLDSKTQSLLIVNNATNVVIKVCEFQFCNDPFLGVYYHKNNKSWMESEFRVYSSANNCTFEYVSQPFLMDLEGKQGNFKNLREFVFKNIDGYFKIYSKHTPINLVRDLPQGFSALEPLVDLPIGINITRFQTLLALHRSYLTPGDSSSGWTAGAAAYYVGYLQPRTFLLKYNENGTITDAVDCALDPLSETKCTLKSFTVEKGIYQTSNFRVQPTESIVRFPNITNLCPFGEVFNATRFASVYAWNRKRISNCVADYSVLYNSASFSTFKCYGVSPTKLNDLCFTNVYADSFVIRGDEVRQIAPGQTGKIADYNYKLPDDFTGCVIAWNSNNLDSKVGGNYNYLYRLFRKSNLKPFERDISTEIYQAGSTPCNGVEGFNCYFPLQSYGFQPTNGVGYQPYRVVVLSFELLHAPATVCGPKKSTNLVKNKCVNFNFNGLTGTGVLTESNKKFLPFQQFGRDIADTTDAVRDPQTLEILDITPCSFGGVSVITPGTNTSNQVAVLYQDVNCTEVPVAIHADQLTPTWRVYSTGSNVFQTRAGCLIGAEHVNNSYECDIPIGAGICASYQTQTNSPRRARSVASQSIIAYTMSLGAENSVAYSNNSIAIPTNFTISVTTEILPVSMTKTSVDCTMYICGDSTECSNLLLQYGSFCTQLNRALTGIAVEQDKNTQQVFAQVKQIYKTPPIKDFGGFNFSQILPDPSKPSKRSFIEDLLFNKVTLADAGFIKQYGDCLGDIAARDLICAQKFNGLTVLPPLLTDEMIAQYTSALLAGTITSGWTFCAGAALQIPFAMQMAYRFNGIGVTQNVLYENQKLIANQFNSAIGKIQDSLSSTASALGKLQDVVNQNAQALNTLVKQLSSNFGAISSVLNDILSRLDKVEAEVQIDRLITGRLQSLQTYVTQQLIRAAEIRASANLAATKMSECVCGQSKRVDFCGKGYHLMSFPQSAPHGVVFLHVTYVPAQEKNFTTAPAICHDGKAHFPREGVFVSNGTHWFVTQRNFYEPQIITTDNTFVSGNCDVVIGIVNNTVYDPLQPELDSGGGGSDIIKLLNEQVNKEMQSSNLYMSMSSWCYTHSLDGAGLFLFDHAAEEYEHAKKLIIFLNENNVPVQLTSISAPEHKFEGLTQIFQKAYEHEQHISESINNIVDHAIKSKDHATFNFLQWYVAEQHEEEVLFKDILDKIELIGNENHGLYLADQYVKGIAKSRKS

SEQ ID NO: 9213 - protein, 1315 aa, Artificial Sequence
  SARS-CoV-2/France/HF1805/2020__EPI_ISL_414628 spike protein (1-1147)(G889C_L1034C) Ferritin construct
MFVFLVLLPLVSSQCVNLTTRTQLPPAYTNSFTRGVYYPDKVFRSSVLHSTQDLFLPFFSNVTWFHAIHVSGTNGTKRFDNPVLPFNDGVYFASTEKSNIIRGWIFGTTLDSKTQSLLIVNNATNVVIKVCEFQFCNDPFLGVYYHKNNKSWMESEFRVYSSANNCTFEYVSQPFLMDLEGKQGNFKNLREFVFKNIDGYFKIYSKHTPINLVRDLPQGFSALEPLVDLPIGINITRFQTLLALHRSYLTPGDSSSGWTAGAAAYYVGYLQPRTFLLKYNENGTITDAVDCALDPLSETKCTLKSFTVEKGIYQTSNFRVQPTESIVRFPNITNLCPFGEVFNATRFASVYAWNRKRISNCVADYSVLYNSASFSTFKCYGVSPTKLNDLCFTNVYADSFVIRGDEVRQIAPGQTGKIADYNYKLPDDFTGCVIAWNSNNLDSKVGGNYNYLYRLFRKSNLKPFERDISTEIYQAGSTPCNGVEGFNCYFPLQSYGFQPTNGVGYQPYRVVVLSFELLHAPATVCGPKKSTNLVKNKCVNFNFNGLTGTGVLTESNKKFLPFQQFGRDIADTTDAVRDPQTLEILDITPCSFGGVSVITPGTNTSNQVAVLYQGVNCTEVPVAIHADQLTPTWRVYSTGSNVFQTRAGCLIGAEHVNNSYECDIPIGAGICASYQTQTNSPRRARSVASQSIIAYTMSLGAENSVAYSNNSIAIPTNFTISVTTEILPVSMTKTSVDCTMYICGDSTECSNLLLQYGSFCTQLNRALTGIAVEQDKNTQEVFAQVKQIYKTPPIKDFGGFNFSQILPDPSKPSKRSFIEDLLFNKVTLADAGFIKQYGDCLGDIAARDLICAQKFNGLTVLPPLLTDEMIAQYTSALLAGTITSGWTFCAGAALQIPFAMQMAYRFNGIGVTQNVLYENQKLIANQFNSAIGKIQDSLSSTASALGKLQDVVNQNAQALNTLVKQLSSNFGAISSVLNDILSRLDKVEAEVQIDRLITGRLQSLQTYVTQQLIRAAEIRASANLAATKMSECVCGQSKRVDFCGKGYHLMSFPQSAPHGVVFLHVTYVPAQEKNFTTAPAICHDGKAHFPREGVFVSNGTHWFVTQRNFYEPQIITTDNTFVSGNCDVVIGVVNNTVYDPLQPELDSGGGGSDIIKLLNEQVNKEMQSSNLYMSMSSWCYTHSLDGAGLFLFDHAAEEYEHAKKLIIFLNENNVPVQLTSISAPEHKFEGLTQIFQKAYEHEQHISESINNIVDHAIKSKDHATFNFLQWYVAEQHEEEVLFKDILDKIELIGNENHGLYLADQYVKGIAKSRKS

SEQ ID NO: 9214 - protein, 1315 aa, Artificial Sequence
  SARS-CoV-2/Netherlands/ZuidHolland_9/2020__EPI_ISL_414445 spike protein (1-1147)(G889C_L1034C) Ferritin construct
MFVFLVLLPLVSSQCVNLTTRTQLPPAYTNSFTRGVYYPDKVFRSSVLHSTQDLFLPFFSNVTWFHAIHVSGTNGTKRFDNPVLPFNDGVYFASTEKSNIIRGWIFGTTLDSKTQSLLIVNNATNVVIKVCEFQFCNDPFLGVYYHKNNKSWMESEFRVYSSANNCTFEYVSQPFLMDLEGKQGNFKNLREFVFKNIDGYFKIYSKHTPINLVRDLPQGFSALEPLVDLPIGINITRFQTLLALHRSYLTPGDSSSGWTAGAAAYYVGYLQPRTFLLKYNENGTITDAVDCALDPLSETKCTLKSFTVEKGIYQTSNFRVQPTESIVRFPNITNLCPFGEVFNATRFASVYAWNRKRISNCVADYSVLYNSASFSTFKCYGVSPTKLNDLCFTNVYADSFVIRGDEVRQIAPGQTGKIADYNYKLPDDFTGCVIAWNSNNLDSKVGGNYNYLYRLFRKSNLKPFERDISTEIYQAGSTPCNGVEGFNCYFPLQSYGFQPTNGVGYQPYRVVVLSFELLHAPATVCGPKKSTNLVKNKCVNFNFNGLTGTGVLTESNKKFLPFQQFGRDIADTTDAVRDPQTLEILDITPCSFGGVSVITPGTNTSNQVAVLYQGVNCTEVPVAIHADQLTPTWRVYSTGSNVFQTRAGCLIGAEHVNNSYECDIPIGAGICASYQTQTNSPRRARSVASQSIIAYTMSLGAENSVAYSNNSIAIPTNFTISVTTEILPVSMTKTSVDCTMYICGDSTECSNLLLQYGSFCTQLNRALTGIAVEQDKNTQEVFAQVKQIYKTPPIKDFGGFNFSQILPDPSKPSKRSFIEDLLFNKVTLADAGFIKQYGDCLGDIAARDLICVQKFNGLTVLPPLLTDEMIAQYTSALLAGTITSGWTFCAGAALQIPFAMQMAYRFNGIGVTQNVLYENQKLIANQFNSAIGKIQDSLSSTASALGKLQDVVNQNAQALNTLVKQLSSNFGAISSVLNDILSRLDKVEAEVQIDRLITGRLQSLQTYVTQQLIRAAEIRASANLAATKMSECVCGQSKRVDFCGKGYHLMSFPQSAPHGVVFLHVTYVPAQEKNFTTAPAICHDGKAHFPREGVFVSNGTHWFVTQRNFYEPQIITTDNTFVSGNCDVVIGIVNNTVYDPLQPELDSGGGGSDIIKLLNEQVNKEMQSSNLYMSMSSWCYTHSLDGAGLFLFDHAAEEYEHAKKLIIFLNENNVPVQLTSISAPEHKFEGLTQIFQKAYEHEQHISESINNIVDHAIKSKDHATFNFLQWYVAEQHEEEVLFKDILDKIELIGNENHGLYLADQYVKGIAKSRKS

SEQ ID NO: 9215 - protein, 1315 aa, Artificial Sequence
  SARS-CoV-2/Finland/FIN03032020A/2020__EPI_ISL_413602 spike protein (1-1147)(G889C_L1034C) Ferritin construct
MFVFLVLLPLVSSQCVNLTTRTQLPPAYTNSFTRGVYYPDKVFRSSVLHSTQDLFLPFFSNVTWFHAIHVSGTNGTKRFDNPVLPFNDGVYFASTEKSNIIRGWIFGTTLDSKTQSLLIVNNATNVVIKVCEFQFCNDPFLGVYYHKNNKSWMESEFRVYSSANNCTFEYVSQPFLMDLEGKQGNFKNLREFVFKNIDGYFKIYSKHTPINLVRDLPQGFSALEPLVDLPIGINITRFQTLLALHRSYLTPGDSSSGWTAGAAAYYVGYLQPRTFLLKYNENGTITDAVDCALDPLSETKCTLKSFTVEKGIYQTSNFRVQPTESIVRFPNITNLCPFGEVFNATRFASVYAWNRKRISNCVADYSVLYNSASFSTFKCYGVSPTKLNDLCFTNVYADSFVIRGDEVRQIAPGQTGKIADYNYKLPDDFTGCVISWNSNNLDSKVGGNYNYLYRLFRKSNLKPFERDISTEIYQAGSTPCNGVEGFNCYFPLQSYGFQPTNGVGYQPYRVVVLSFELLHAPATVCGPKKSTNLVKNKCVNFNFNGLTGTGVLTESNKKFLPFQQFGRDIADTTDAVRDPQTLEILDITPCSFGGVSVITPGTNTSNQVAVLYQGVNCTEVPVAIHADQLTPTWRVYSTGSNVFQTRAGCLIGAEHVNNSYECDIPIGAGICASYQTQTNSPRRARSVASQSIIAYTMSLGAENSVAYSNNSIAIPTNFTISVTTEILPVSMTKTSVDCTMYICGDSTECSNLLLQYGSFCTQLNRALTGIAVEQDKNTQEVFAQVKQIYKTPPIKDFGGFNFSQILPDPSKPSKRSFIEDLLFNKVTLADAGFIKQYGDCLGDIAARDLICAQKFNGLTVLPPLLTDEMIAQYTSALLAGTITSGWTFCAGAALQIPFAMQMAYRFNGIGVTQNVLYENQKLIANQFNSAIGKIQDSLSSTASALGKLQDVVNQNAQALNTLVKQLSSNFGAISSVLNDILSRLDKVEAEVQIDRLITGRLQSLQTYVTQQLIRAAEIRASANLAATKMSECVCGQSKRVDFCGKGYHLMSFPQSAPHGVVFLHVTYVPAQEKNFTTAPAICHDGKAHFPREGVFVSNGTHWFVTQRNFYEPQIITTDNTFVSGNCDVVIGIVNNTVYDPLQPELDSGGGGSDIIKLLNEQVNKEMQSSNLYMSMSSWCYTHSLDGAGLFLFDHAAEEYEHAKKLIIFLNENNVPVQLTSISAPEHKFEGLTQIFQKAYEHEQHISESINNIVDHAIKSKDHATFNFLQWYVAEQHEEEVLFKDILDKIELIGNENHGLYLADQYVKGIAKSRKS

SEQ ID NO: 9216 - protein, 1315 aa, Artificial Sequence
  SARS-CoV-2/France/GE1977/2020__EPI_ISL_414632 spike protein (1-1147)(G889C_L1034C) Ferritin construct
MFVFLVLLPLVSSQCVNLTTRTQLPPAYTNSFTRGVYYPDKVFRSSVLHSTQDLFLPFFSNVTWFHAIHVSGTNGTKRFDNPVLPFNDGVYFASTEKSNIIRGWIFGTTLDSKTQSLLIVNNATNVVIKVCEFQFCNDPFLGVYYHKNNKSWMESEFRVYSSANNCTFEYVSQPFLMDLEGKQGNFKNLREFVFKNIDGYFKIYSKHTPINLVRDLPQGFSALEPLVDLPIGINITRFQTLLALHRSYLTPGDSSSGWTAGAAAYYVGYLQPRTFLLKYNENGTITDAVDCALDPLSETKCTLKSFTVEKGIYQTSNFRVQPTESIVRFPNITNLCPFGEVFNATRFASVYAWNRKRISNCVADYSVLYNSASFSTFKCYGVSPTKLNDLCFTNVYADSFVIRGDEVRQIAPGQTGKIADYNYKLPDDFTGCVIAWNSNNLDSKVGGNYNYLYRLFRKSNLKPFERDISTEIYQAGSTPCNGVEGFNCYFPLQSYGFQPTNGVGYQPYRVVVLSFELLHAPATVCGPKKSTNLVKNKCVNFNFNGLTGTGVLTESNKKFLPFQQFGRDIADTTDAVRDPQTLEILDITPCSFGGVSVITPGTNTSNQVAVLYQGVNCTEVPVAIHADQLTPTWRVYSTGSNVFQTRAGCLIGAEHVNNSYECDIPIGAGICASYQTQTNSPRRARSVASQSIIAYTMSLGAENSVAYSNNSIAIPTNFTISVTTEILPVSMTKTSVDCTMYICGDSTECSNLLLQYGSFCTQLNRALTGIAVEQDKNTQEVFAQVKQIYKTPPIKDFGGFNFSQILPDPSKPSKRSFIEDLLFNKVTLADAGFIKQYGDCLGDIAARDLICAQKFNGLTVLPPLLTDEMIAQYTSALLAGTITSGWTFCAGAALQIPFAMQMAYRFNGIGVTQNVLYENQKLIANQFNSAIGKIQDSLFSTASALGKLQDVVNQNAQALNTLVKQLSSNFGAISSVLNDILSRLDKVEAEVQIDRLITGRLQSLQTYVTQQLIRAAEIRASANLAATKMSECVCGQSKRVDFCGKGYHLMSFPQSAPHGVVFLHVTYVPAQEKNFTTAPAICHDGKAHFPREGVFVSNGTHWFVTQRNFYEPQIITTDNTFVSGNCDVVIGIVNNTVYDPLQPELDSGGGGSDIIKLLNEQVNKEMQSSNLYMSMSSWCYTHSLDGAGLFLFDHAAEEYEHAKKLIIFLNENNVPVQLTSISAPEHKFEGLTQIFQKAYEHEQHISESINNIVDHAIKSKDHATFNFLQWYVAEQHEEEVLFKDILDKIELIGNENHGLYLADQYVKGIAKSRKS

SEQ ID NO: 9217 - protein, 1315 aa, Artificial Sequence
  SARS-CoV-2/Finland/FIN-313/2020__EPI_ISL_414641 spike protein (1-1147)(G889C_L1034C) Ferritin construct
MFVFLVLLPLVSSQCVNLTTRTQLPPAYTNSFTRGVYYPDKVFRSSVLHSTQDLFLPFFSNVTWFHAIHVSGTNGTKRFDNPVLPFNDGVYFASTEKSNIIRGWIFGTTLDSKTQSLLIVNNATNVVIKVCEFQFCNDPFLGVYYHKNNKSWMESEFRVYSSANNCTFEYVSQPFLMDLEGKQGNFKNLREFVFKNIDGYFKIYSKHTPINLVRDLPQGFSALEPLVDLPIGINITRFKTLLALHRSYLTPGDSSSGWTAGAAAYYVGYLQPRTFLLKYNENGTITDAVDCALDPLSETKCTLKSFTVEKGIYQTSNFRVQPTESIVRFPNITNLCPFGEVFNATRFASVYAWNRKRISNCVADYSVLYNSASFSTFKCYGVSPTKLNDLCFTNVYADSFVIRGDEVRQIAPGQTGKIADYNYKLPDDFTGCVIAWNSNNLDSKVGGNYNYLYRLFRKSNLKPFERDISTEIYQAGSTPCNGVEGFNCYFPLQSYGFQPTNGVGYQPYRVVVLSFELLHAPATVCGPKKSTNLVKNKCVNFNFNGLTGTGVLTESNKKFLPFQQFGRDIADTTDAVRDPQTLEILDITPCSFGGVSVITPGTNTSNQVAVLYQGVNCTEVPVAIHADQLTPTWRVYSTGSNVFQTRAGCLIGAEHVNNSYECDIPIGAGICASYQTQTNSPRRARSVASQSIIAYTMSLGAENSVAYSNNSIAIPTNFTISVTTEILPVSMTKTSVDCTMYICGDSTECSNLLLQYGSFCTQLNRALTGIAVEQDKNTQEVFAQVKQIYKTPPIKDFGGFNFSQILPDPSKPSKRSFIEDLLFNKVTLADAGFIKQYGDCLGDIAARDLICAQKFNGLTVLPPLLTDEMIAQYTSALLAGTITSGWTFCAGAALQIPFAMQMAYRFNGIGVTQNVLYENQKLIANQFNSAIGKIQDSLSSTASALGKLQDVVNQNAQALNTLVKQLSSNFGAISSVLNDILSRLDKVEAEVQIDRLITGRLQSLQTYVTQQLIRAAEIRASANLAATKMSECVCGQSKRVDFCGKGYHLMSFPQSAPHGVVFLHVTYVPAQEKNFTTAPAICHDGKAHFPREGVFVSNGTHWFVTQRNFYEPQIITTDNTFVSGNCDVVIGIVNNTVYDPLQPELDSGGGGSDIIKLLNEQVNKEMQSSNLYMSMSSWCYTHSLDGAGLFLFDHAAEEYEHAKKLIIFLNENNVPVQLTSISAPEHKFEGLTQIFQKAYEHEQHISESINNIVDHAIKSKDHATFNFLQWYVAEQHEEEVLFKDILDKIELIGNENHGLYLADQYVKGIAKSRKS

SEQ ID NO: 9218 - protein, 1315 aa, Artificial Sequence
  SARS-CoV-2/Netherlands/ZuidHolland_2/2020__EPI_ISL_414556 spike protein (1-1147)(G889C_L1034C) Ferritin construct
MFVFLVLLPLVSSQCVNLTTRTQLPPAYTNSFTRGVYYPDKVFRSSVLHSTQDLFLPFFSNVTWFHAIHVSGTNGTKRFDNPVLPFNDGVYFASTEKSNIIRGWIFGTTLDSKTQSLLIVNNATNVVIKVCEFQFCNDPFLGVYYHKNNKSWMESEFRVYSSANNCTFEYVSQPFLMDLEGKQGNFKNLREFVFKNIDGYFKIYSKHTPINLVRDLPQGFSALEPLVDLPIGINITRFQTLLALHRSYLTPGDSSSGWTAGAAAYYVGYLQPRTFLLKYNENGTITDAVDCALDPLSETKCTLKSFTVEKGIYQTSNFRVQPTESIVRFPNITNLCPFGEVFNATRFASVYAWNRKRISNCVADYSVLYNSASFSTFKCYGVSPTKLNDLCFTNVYADSFVIRGDEVRQIAPGQTGKIADYNYKLPDDFTGCVIAWNSNNLDSKVGGNYNYLYRLFRKSNLKPFERDISTEIYQAGSTPCNGVEGFNCYFPLQSYGFQPTNGVGYQPYRVVVLSFELLHAPATVCGPKKSTNLVKNKCVNFNFNGLTGTGVLTESNKKFLPFQQFGRDIADTTDAVRDPQTLEILDITPCSFGGVSVITPGTNTSNQVAVLYQGVNCTEVPVAIHADQLTPTWRVYSTGSNVFQTRAGCLIGAEHVNNSYECDIPIGAGICASYQTQTNSPRRARSVASQSIIAYTMSLGAENSVAYSNNSIAIPTNFTISVTTEILPVSMTKTSVDCTMYICGDSTECSNLLLQYGSFCTQLNRALTGIALEQDKNTQEVFAQVKQIYKTPPIKDFGGFNFSQILPDPSKPSKRSFIEDLLFNKVTLADAGFIKQYGDCLGDIAARDLICAQKFNGLTVLPPLLTDEMIAQYTSALLAGTITSGWTFCAGAALQIPFAMQMAYRFNGIGVTQNVLYENQKLIANQFNSAIGKIQDSLSSTASALGKLQDVVNQNAQALNTLVKQLSSNFGAISSVLNDILSRLDKVEAEVQIDRLITGRLQSLQTYVTQQLIRAAEIRASANLAATKMSECVCGQSKRVDFCGKGYHLMSFPQSAPHGVVFLHVTYVPAQEKNFTTAPAICHDGKAHFPREGVFVSNGTHWFVTQRNFYEPQIITTDNTFVSGNCDVVIGIVNNTVYDPLQPELDSGGGGSDIIKLLNEQVNKEMQSSNLYMSMSSWCYTHSLDGAGLFLFDHAAEEYEHAKKLIIFLNENNVPVQLTSISAPEHKFEGLTQIFQKAYEHEQHISESINNIVDHAIKSKDHATFNFLQWYVAEQHEEEVLFKDILDKIELIGNENHGLYLADQYVKGIAKSRKS

SEQ ID NO: 9219 - protein, 1315 aa, Artificial Sequence
  SARS-CoV-2/USA/WA-UW31/2020__EPI_ISL_414618 spike protein (1-1147)(G889C_L1034C) Ferritin construct
MFVFLVLLPLVSSQCVNLTTRTQLPPAYTNSFTRGVYYPDKVFRSSVLHSTQDLFLPFFSNVTWFHAIHVSGTNGTKRFDNPVLPFNDGVYFASTEKSNIIRGWIFGTTLDSKTQSLLIVNNATNVVIKVCEFQFCNDPFLGVYYHKNNKSWMESEFRVYSSANNCTFEYVSQPFLMDLEGKQGNFKNLREFVFKNIDGYFKIYSKHTPINLVRDLPQGFSALEPLVDLPIGINITRFQTLLALHRSYLTPGDSSSGWTAGAAAYYVGYLQPRTFLLKYNENGTITDAVDCALDPLSETKCTLKSFTVEKGIYQTSNFRVQPTESIVRFPNITNLCPFGEVFNATRFASVYAWNRKRISNCVADYSVLYNSASFSTFKCYGVSPTKLNDLCFTNVYADSFVIRGDEVRQIAPGQTGKIADYNYKLPDDFTGCVIAWNSNNLDSKVGGNYNYLYRLFRKSNLKPFERDISTEIYQAGSTPCNGAEGFNCYFPLQSYGFQPTNGVGYQPYRVVVLSFELLHAPATVCGPKKSTNLVKNKCVNFNFNGLTGTGVLTESNKKFLPFQQFGRDIADTTDAVRDPQTLEILDITPCSFGGVSVITPGTNTSNQVAVLYQDVNCTEVPVAIHADQLTPTWRVYSTGSNVFQTRAGCLIGAEHVNNSYECDIPIGAGICASYQTQTNSPRRARSVASQSIIAYTMSLGAENSVAYSNNSIAIPTNFTISVTTEILPVSMTKTSVDCTMYICGDSTECSNLLLQYGSFCTQLNRALTGIAVEQDKNTQEVFAQVKQIYKTPPIKDFGGFNFSQILPDPSKPSKRSFIEDLLFNKVTLADAGFIKQYGDCLGDIAARDLICAQKFNGLTVLPPLLTDEMIAQYTSALLAGTITSGWTFCAGAALQIPFAMQMAYRFNGIGVTQNVLYENQKLIANQFNSAIGKIQDSLSSTASALGKLQDVVNQNAQALNTLVKQLSSNFGAISSVLNDILSRLDKVEAEVQIDRLITGRLQSLQTYVTQQLIRAAEIRASANLAATKMSECVCGQSKRVDFCGKGYHLMSFPQSAPHGVVFLHVTYVPAQEKNFTTAPAICHDGKAHFPREGVFVSNGTHWFVTQRNFYEPQIITTDNTFVSGNCDVVIGIVNNTVYDPLQPELDSGGGGSDIIKLLNEQVNKEMQSSNLYMSMSSWCYTHSLDGAGLFLFDHAAEEYEHAKKLIIFLNENNVPVQLTSISAPEHKFEGLTQIFQKAYEHEQHISESINNIVDHAIKSKDHATFNFLQWYVAEQHEEEVLFKDILDKIELIGNENHGLYLADQYVKGIAKSRKS

SEQ ID NO: 9220 - protein, 1315 aa, Artificial Sequence
  SARS-CoV-2/South Korea/SNU01/2020__EPI_ISL_411929 spike protein (1-1147)(G889C_L1034C) Ferritin construct
MFVFLVLLPLVSSQCVNLTTRTQLPPAYTNSFTRGVYYPDKVFRSSVLHSTQDLFLPFFSNVTWFHAIHVSGTNGTKRFDNPVLPFNDGVYFASTEKSNIIRGWIFGTTLDSKTQSLLIVNNATNVVIKVCEFQFCNDPFLGVYYHKNNKSWMESEFRVYSSANNCTFEYVSQPFLMDLEGKQGNFKNLREFVFKNIDGYFKIYSKHTPINLVRDLPQGFWALEPLVDLPIGINITRFQTLLALHRSYLTPGDSSSGWTAGAAAYYVGYLQPRTFLLKYNENGTITDAVDCALDPLSETKCTLKSFTVEKGIYQTSNFRVQPTESIVRFPNITNLCPFGEVFNATRFASVYAWNRKRISNCVADYSVLYNSASFSTFKCYGVSPTKLNDLCFTNVYADSFVIRGDEVRQIAPGQTGKIADYNYKLPDDFTGCVIAWNSNNLDSKVGGNYNYLYRLFRKSNLKPFERDISTEIYQAGSTPCNGVEGFNCYFPLQSYGFQPTNGVGYQPYRVVVLSFELLHAPATVCGPKKSTNLVKNKCVNFNFNGLTGTGVLTESNKKFLPFQQFGRDIADTTDAVRDPQTLEILDITPCSFGGVSVITPGTNTSNQVAVLYQDVNCTEVPVAIHADQLTPTWRVYSTGSNVFQTRAGCLIGAEHVNNSYECDIPIGAGICASYQTQTNSPRRARSVASQSIIAYTMSLGAENSVAYSNNSIAIPTNFTISVTTEILPVSMTKTSVDCTMYICGDSTECSNLLLQYGSFCTQLNRALTGIAVEQDKNTQEVFAQVKQIYKTPPIKDFGGFNFSQILPDPSKPSKRSFIEDLLFNKVTLADAGFIKQYGDCLGDIAARDLICAQKFNGLTVLPPLLTDEMIAQYTSALLAGTITSGWTFCAGAALQIPFAMQMAYRFNGIGVTQNVLYENQKLIANQFNSAIGKIQDSLSSTASALGKLQDVVNQNAQALNTLVKQLSSNFGAISSVLNDILSRLDKVEAEVQIDRLITGRLQSLQTYVTQQLIRAAEIRASANLAATKMSECVCGQSKRVDFCGKGYHLMSFPQSAPHGVVFLHVTYVPAQEKNFTTAPAICHDGKAHFPREGVFVSNGTHWFVTQRNFYEPQIITTDNTFVSGNCDVVIGIVNNTVYDPLQPELDSGGGGSDIIKLLNEQVNKEMQSSNLYMSMSSWCYTHSLDGAGLFLFDHAAEEYEHAKKLIIFLNENNVPVQLTSISAPEHKFEGLTQIFQKAYEHEQHISESINNIVDHAIKSKDHATFNFLQWYVAEQHEEEVLFKDILDKIELIGNENHGLYLADQYVKGIAKSRKS

SEQ ID NO: 9221 - protein, 1315 aa, Artificial Sequence
  SARS-CoV-2/China/WF0004/2020__EPI_ISL_413694 spike protein (1-1147)(G889C_L1034C) Ferritin construct
MFVFLVLLPLVSSQCVNLTTRTQLPPAYTNSFTRGVYYPDKVFRSSVLHSTQDLFLPFFSNVTWFHAIHVSGTNGTKRFDNPVLPFNDGVYFASTEKSNIIRGWIFGTTLDSKTQSLLIVNNATNVVIKVCEFQFCNDPFLGVYYHKNNKSWTESEFRVYSSANNCTFEYVSQPFLMDLEGKQGNFKNLREFVFKNIDGYFKIYSKHTPINLVRDLPQGFSALEPLVDLPIGINITRFQTLLALHRSYLTPGDSSSGWTAGAAAYYVGYLQPRTFLLKYNENGTITDAVDCALDPLSETKCTLKSFTVEKGIYQTSNFRVQPTESIVRFPNITNLCPFGEVFNATRFASVYAWNRKRISNCVADYSVLYNSASFSTFKCYGVSPTKLNDLCFTNVYADSFVIRGDEVRQIAPGQTGKIADYNYKLPDDFTGCVIAWNSNNLDSKVGGNYNYLYRLFRKSNLKPFERDISTEIYQAGSTPCNGVEGFNCYFPLQSYGFQPTNGVGYQPYRVVVLSFELLHAPATVCGPKKSTNLVKNKCVNFNFNGLTGTGVLTESNKKFLPFQQFGRDIADTTDAVRDPQTLEILDITPCSFGGVSVITPGTNTSNQVAVLYQDVNCTEVPVAIHADQLTPTWRVYSTGSNVFQTRAGCLIGAEHVNNSYECDIPIGAGICASYQTQTNSPRRARSVASQSIIAYTMSLGAENSVAYSNNSIAIPTNFTISVTTEILPVSMTKTSVDCTMYICGDSTECSNLLLQYGSFCTQLNRALTGIAVEQDKNTQEVFAQVKQIYKTPPIKDFGGFNFSQILPDPSKPSKRSFIEDLLFNKVTLADAGFIKQYGDCLGDIAARDLICAQKFNGLTVLPPLLTDEMIAQYTSALLAGTITSGWTFCAGAALQIPFAMQMAYRFNGIGVTQNVLYENQKLIANQFNSAIGKIQDSLSSTASALGKLQDVVNQNAQALNTLVKQLSSNFGAISSVLNDILSRLDKVEAEVQIDRLITGRLQSLQTYVTQQLIRAAEIRASANLAATKMSECVCGQSKRFDFCGKGYHLMSFPQSAPHGVVFLHVTYVPAQEKNFTTAPAICHDGKAHFPREGVFVSNGTHWFVTQRNFYEPQIITTDNTFVSGNCDVVIGIVNNTVYDPLQPELDSGGGGSDIIKLLNEQVNKEMQSSNLYMSMSSWCYTHSLDGAGLFLFDHAAEEYEHAKKLIIFLNENNVPVQLTSISAPEHKFEGLTQIFQKAYEHEQHISESINNIVDHAIKSKDHATFNFLQWYVAEQHEEEVLFKDILDKIELIGNENHGLYLADQYVKGIAKSRKS

SEQ ID NO: 9222 - protein, 1315 aa, Artificial Sequence
  SARS-CoV-2/China/WF0028/2020__EPI_ISL_413791 spike protein (1-1147)(G889C_L1034C) Ferritin construct
MFVFLVLLPLVSSQCVNLTTRTQLPPAYTNSFTRGVYYPDKVFRSSVLHSTQDLFLPFFSNVTWFHAIHVSGTNGTKRFDNPVLPFNDGVYFASTEKSNIIRGWIFGTTLDSKTQSLLIVNNATNVVIKVCEFQFCNDPFLGVYYHKNNKSWMESEFRVYSSANNCTFEYVSQPFLMDLEGKQGNFKNLREFVFKNIDGYFKIYSKHTPINLVRDLPQGFSALEPLVDLPIGINITRFQTLLALHRSYLTPGDSSSGWTAGAAAYYVGYLQPRTFLLKYNENGTITDAVDCALDPLSETKCTLKSFTVEKGIYQTSNFRVQPTESIVRFPNITNLCPFGEVFNATRFASVYAWNRKRISNCVADYSVLYNSASFSTFKCYGVSPTKLNDLCFTNVYADSFVIRGDEVRQIAPGQTGKIADYNYKLPDDFTGCVIAWNSNNLDSKVGGNYNYLYRLFRKSNLKPFERDISTEIYQAGSTPCNGVEGFNCYFPLQSYGFQPTNGVGYQPYRVVVLSFELLHAPATVCGPKKSTNLVKNKCVNFNFNGLTGTGVLTESNKKFLPFQQFGRDIADTTDAVRDPQTLEILDITPCSFGGVSVITPGTNTSNQVAVLYQDVNCTEVPVAIHADQLTPTWRVYSTGSNVFQTRAGCLIGAEHVNNSYECDIPIGAGICASYQTQTNSPRRARSVASQSIIAYTMSLGAENSVAYSNNSIAIPTNFTISVTTEILPVSMTKTSVDCTMYICGDSTECSNLLLQYGSFCTQLNRALTGIAVEQDKNTQEVFAQVKQIYKTPPIKDFGGFNFSQILPDPSKPSKRSFIEDLLFNKVTLADAGFIKQYGDCLGDIAARDLICAQKFNGLTVLPPLLTDEMIAQYTSALLAGTITSGWTFCAGAALQIPFAMQMAYRFNGIGVTQNVLYENQKLIANQFNSAIGKIQDSLSSTASALGKLQDVVNQNAQALNTLVKQLSSNFGAISSVLNDILSRLDKVEAEVQIDRLITGRLQSLQTYVTQQLIRAAEIRASANLAATKMSECVCGQSKRVDFCGKGYHLMSFPQSAPHGVVFLHVTYVPAQEKNFTTAPAICHDGKAHFPREGVFVSNGTHWFVTQRNFYEPQIITTDNTFVSGNCDVVIGIVNNTVYDPLQPELESGGGGSDIIKLLNEQVNKEMQSSNLYMSMSSWCYTHSLDGAGLFLFDHAAEEYEHAKKLIIFLNENNVPVQLTSISAPEHKFEGLTQIFQKAYEHEQHISESINNIVDHAIKSKDHATFNFLQWYVAEQHEEEVLFKDILDKIELIGNENHGLYLADQYVKGIAKSRKS

SEQ ID NO: 9223 - protein, 1315 aa, Artificial Sequence
  SARS-CoV-2/2019-nCoV/USA-CruiseA-18/2020__MT159716.1 spike protein (1-1147)(G889C_L1034C) Ferritin construct
MFVFLVLLPLVSSQCVNLTTRTQLPPAYTNSFTRGVYYPDKVFRSSVLHSTQDLFLPFFSNVTWFHAIHVSGTNGTKRFDNPVLPFNDGVYFASTEKSNIIRGWIFGTTLDSKTQSLLIVNNATNVVIKVCEFQFCNDPFLGVYYHKNNKSWMESELRVYSSANNCTFEYVSQPFLMDLEGKQGNFKNLREFVFKNIDGYFKIYSKHTPINLVRDLPQGFSALEPLVDLPIGINITRFQTLLALHRSYLTPGDSSSGWTAGAAAYYVGYLQPRTFLLKYNENGTITDAVDCALDPLSETKCTLKSFTVEKGIYQTSNFRVQPTESIVRFPNITNLCPFGEVFNATRFASVYAWNRKRISNCVADYSVLYNSASFSTFKCYGVSPTKLNDLCFTNVYADSFVIRGDEVRQIAPGQTGKIADYNYKLPDDFTGCVIAWNSNNLDSKVGGNYNYLYRLFRKSNLKPFERDISTEIYQAGSTPCNGVEGFNCYFPLQSYGFQPTNGVGYQPYRVVVLSFELLHAPATVCGPKKSTNLVKNKCVNFNFNGLTGTGVLTESNKKFLPFQQFGRDIADTTDAVRDPQTLEILDITPCSFGGVSVITPGTNTSNQVAVLYQDVNCTEVPVAIHADQLTPTWRVYSTGSNVFQTRAGCLIGAEHVNNSYECDIPIGAGICASYQTQTNSPRRARSVASQSIIAYTMSLGAENSVAYSNNSIAIPTNFTISVTTEILPVSMTKTSVDCTMYICGDSTECSNLLLQYGSFCTQLNRALTGIAVEQDKNTQEVFAQVKQIYKTPPIKDFGGFNFSQILPDPSKPSKRSFIEDLLFNKVTLADAGFIKQYGDCLGDIAARDLICAQKFNGLTVLPPLLTDEMIAQYTSALLAGTITSGWTFCAGAALQIPFAMQMAYRFNGIGVTQNVLYENQKLIANQFNSAIGKIQDSLSSTASALGKLQDVVNQNAQALNTLVKQLSSNFGAISSVLNDILSRLDKVEAEVQIDRLITGRLQSLQTYVTQQLIRAAEIRASANLAATKMSECVCGQSKRVDFCGKGYHLMSFPQSAPHGVVFLHVTYVPAQEKNFTTAPAICHDGKAHFPREGVFVSNGTHWFVTQRNFYEPQIITTDNTFVSGNCDVVIGIVNNTVYDPLQPELDSGGGGSDIIKLLNEQVNKEMQSSNLYMSMSSWCYTHSLDGAGLFLFDHAAEEYEHAKKLIIFLNENNVPVQLTSISAPEHKFEGLTQIFQKAYEHEQHISESINNIVDHAIKSKDHATFNFLQWYVAEQHEEEVLFKDILDKIELIGNENHGLYLADQYVKGIAKSRKS

SEQ ID NO: 9224 - protein, 1315 aa, Artificial Sequence
  SARS-CoV-2/SARS-CoV-2/Yunnan-01/human/2020/CHN__MT049951.1 spike protein (1-1147)(G889C_L1034C) Ferritin construct
MFVFLVLLPLVSSQCVNLTTRTQLPPANTNSFTRGVYYPDKVFRSSVLHSTQDLFLPFFSNVTWFHAIHVSGTNGTKRFDNPVLPFNDGVYFASTEKSNIIRGWIFGTTLDSKTQSLLIVNNATNVVIKVCEFQFCNDPFLGVYYHKNNKSWMESEFRVYSSANNCTFEYVSQPFLMDLEGKQGNFKNLREFVFKNIDGYFKIYSKHTPINLVRDLPQGFSALEPLVDLPIGINITRFQTLLALHRSYLTPGDSSSGWTAGAAAYYVGYLQPRTFLLKYNENGTITDAVDCALDPLSETKCTLKSFTVEKGIYQTSNFRVQPTESIVRFPNITNLCPFGEVFNATRFASVYAWNRKRISNCVADYSVLYNSASFSTFKCYGVSPTKLNDLCFTNVYADSFVIRGDEVRQIAPGQTGKIADYNYKLPDDFTGCVIAWNSNNLDSKVGGNYNYLYRLFRKSNLKPFERDISTEIYQAGSTPCNGVEGFNCYFPLQSYGFQPTNGVGYQPYRVVVLSFELLHAPATVCGPKKSTNLVKNKCVNFNFNGLTGTGVLTESNKKFLPFQQFGRDIADTTDAVRDPQTLEILDITPCSFGGVSVITPGTNTSNQVAVLYQDVNCTEVPVAIHADQLTPTWRVYSTGSNVFQTRAGCLIGAEHVNNSYECDIPIGAGICASYQTQTNSPRRARSVASQSIIAYTMSLGAENSVAYSNNSIAIPTNFTISVTTEILPVSMTKTSVDCTMYICGDSTECSNLLLQYGSFCTQLNRALTGIAVEQDKNTQEVFAQVKQIYKTPPIKDFGGFNFSQILPDPSKPSKRSFIEDLLFNKVTLADAGFIKQYGDCLGDIAARDLICAQKFNGLTVLPPLLTDEMIAQYTSALLAGTITSGWTFCAGAALQIPFAMQMAYRFNGIGVTQNVLYENQKLIANQFNSAIGKIQDSLSSTASALGKLQDVVNQNAQALNTLVKQLSSNFGAISSVLNDILSRLDKVEAEVQIDRLITGRLQSLQTYVTQQLIRAAEIRASANLAATKMSECVCGQSKRVDFCGKGYHLMSFPQSAPHGVVFLHVTYVPAQEKNFTTAPAICHDGKAHFPREGVFVSNGTHWFVTQRNFYEPQIITTDNTFVSGNCDVVIGIVNNTVYDPLQPELDSGGGGSDIIKLLNEQVNKEMQSSNLYMSMSSWCYTHSLDGAGLFLFDHAAEEYEHAKKLIIFLNENNVPVQLTSISAPEHKFEGLTQIFQKAYEHEQHISESINNIVDHAIKSKDHATFNFLQWYVAEQHEEEVLFKDILDKIELIGNENHGLYLADQYVKGIAKSRKS

SEQ ID NO: 9225 - protein, 1315 aa, Artificial Sequence
  SARS-CoV-2/USA/WA-UW292/2020__EPI_ISL_418077 spike protein (1-1147)(G889C_L1034C) Ferritin construct
MFVFLVLLPLVSSQCVNLTTRTQLPPAYTNSFTRGVYYPDKVFRSSVLHSTQDLFLPFFSNVTWFHAIHVSGTNGTKRFDNPVLPFNDGVYFASTEKSNIIRGWIFGTTLDSKTQSLLIVNNATNVVIKVCEFQFCNDPFLGVYYHKNNKSWMESEFRVYSSANNCTFEYVSQPFLMDLEGKQGNFKNLREFVFKNIDGYFKIYSKHTPINLVRDLPQGFSALEPLVDLPIGINITRFQTLLALHRSYLTPGDSSSGWTAGAAAYYVGYLQPRTFLLKYNENGTITDAVDCALDPLSETKCTLKSFTVEKGIYQTSNFRVQPTESIVRFPNITNLCPFGEVFNATRFASVYAWNRKRISNCVADYSVLYNSASFSTFKCYGVSPTKLNDLCFTNVYADSFVIRGDEVRQIAPGQTGKIADYNYKLPDDFTGCVIAWNSNNLDSKVGGNYNYLYRLFRKSNLKPFERDISTEIYQASSTPCNGVEGFNCYFPLQSYGFQPTNGVGYQPYRVVVLSFELLHAPATVCGPKKSTNLVKNKCVNFNFNGLTGTGVLTESNKKFLPFQQFGRDIADTTDAVRDPQTLEILDITPCSFGGVSVITPGTNTSNQVAVLYQDVNCTEVPVAIHADQLTPTWRVYSTGSNVFQTRAGCLIGAEHVNNSYECDIPIGAGICASYQTQTNSPRRARSVASQSIIAYTMSLGAENSVAYSNNSIAIPTNFTISVTTEILPVSMTKTSVDCTMYICGDSTECSNLLLQYGSFCTQLNRALTGIAVEQDKNTQEVFAQVKQIYKTPPIKDFGGFNFSQILPDPSKPSKRSFIEDLLFNKVTLADAGFIKQYGDCLGDIAARDLICAQKFNGLTVLPPLLTDEMIAQYTSALLAGTITSGWTFCAGAALQIPFAMQMAYRFNGIGVTQNVLYENQKLIANQFNSAIGKIQDSLSSTASALGKLQDVVNQNAQALNTLVKQLSSNFGAISSVLNDILSRLDKVEAEVQIDRLITGRLQSLQTYVTQQLIRAAEIRASANLAATKMSECVCGQSKRVDFCGKGYHLMSFPQSAPHGVVFLHVTYVPAQEKNFTTAPAICHDGKAHFPREGVFVSNGTHWFVTQRNFYEPQIITTDNTFVSGNCDVVIGIVNNTVYDPLQPELDSGGGGSDIIKLLNEQVNKEMQSSNLYMSMSSWCYTHSLDGAGLFLFDHAAEEYEHAKKLIIFLNENNVPVQLTSISAPEHKFEGLTQIFQKAYEHEQHISESINNIVDHAIKSKDHATFNFLQWYVAEQHEEEVLFKDILDKIELIGNENHGLYLADQYVKGIAKSRKS

SEQ ID NO: 9226 - protein, 1315 aa, Artificial Sequence
  SARS-CoV-2/Iceland/192/2020__EPI_ISL_417819 spike protein (1-1147)(G889C_L1034C) Ferritin construct
MFVFFVLLPLVSSQCVNLTTRTQLPPAYTNSFTRGVYYPDKVFRSSVLHSTQDLFLPFFSNVTWFHAIHVSGTNGTKRFDNPVLPFNDGVYFASTEKSNIIRGWIFGTTLDSKTQSLLIVNNATNVVIKVCEFQFCNDPFLGVYYHKNNKSWMESEFRVYSSANNCTFEYVSQPFLMDLEGKQGNFKNLREFVFKNIDGYFKIYSKHTPINLVRDLPQGFSALEPLVDLPIGINITRFQTLLALHRSYLTPGDSSSGWTAGAAAYYVGYLQPRTFLLKYNENGTITDAVDCALDPLSETKCTLKSFTVEKGIYQTSNFRVQPTESIVRFPNITNLCPFGEVFNATRFASVYAWNRKRISNCVADYSVLYNSASFSTFKCYGVSPTKLNDLCFTNVYADSFVIRGDEVRQIAPGQTGKIADYNYKLPDDFTGCVIAWNSNNLDSKVGGNYNYLYRLFRKSNLKPFERDISTEIYQAGSTPCNGVEGFNCYFPLQSYGFQPTNGVGYQPYRVVVLSFELLHAPATVCGPKKSTNLVKNKCVNFNFNGLTGTGVLTESNKKFLPFQQFGRDIADTTDAVRDPQTLEILDITPCSFGGVSVITPGTNTSNQVAVLYQGVNCTEVPVAIHADQLTPTWRVYSTGSNVFQTRAGCLIGAEHVNNSYECDIPIGAGICASYQTQTNSPRRARSVASQSIIAYTMSLGAENSVAYSNNSIAIPTNFTISVTTEILPVSMTKTSVDCTMYICGDSTECSNLLLQYGSFCTQLNRALTGIAVEQDKNTQEVFAQVKQIYKTPPIKDFGGFNFSQILPDPSKPSKRSFIEDLLFNKVTLADAGFIKQYGDCLGDIAARDLICAQKFNGLTVLPPLLTDEMIAQYTSALLAGTITSGWTFCAGAALQIPFAMQMAYRFNGIGVTQNVLYENQKLIANQFNSAIGKIQDSLSSTASALGKLQDVVNQNAQALNTLVKQLSSNFGAISSVLNDILSRLDKVEAEVQIDRLITGRLQSLQTYVTQQLIRAAEIRASANLAATKMSECVCGQSKRVDFCGKGYHLMSFPQSAPHGVVFLHVTYVPAQEKNFTTAPAICHDGKAHFPREGVFVSNGTHWFVTQRNFYEPQIITTDNTFVSGNCDVVIGIVNNTVYDPLQPELDSGGGGSDIIKLLNEQVNKEMQSSNLYMSMSSWCYTHSLDGAGLFLFDHAAEEYEHAKKLIIFLNENNVPVQLTSISAPEHKFEGLTQIFQKAYEHEQHISESINNIVDHAIKSKDHATFNFLQWYVAEQHEEEVLFKDILDKIELIGNENHGLYLADQYVKGIAKSRKS

SEQ ID NO: 9227 - protein, 1315 aa, Artificial Sequence
  SARS-CoV-2/Belgium/ULG-6939/2020__EPI_ISL_417020 spike protein (1-1147)(G889C_L1034C) Ferritin construct
MFVFLVLLPLVSSQCVNLTTRTQLPPAYTNSFTRGVYYPDKVFRSSVLHSTQDLFLPFFSNVTWFHAIHVSGTNGTKRFDNPVLPFNDGVYFASTEKSNIIRGWIFGTTLDSKTQSLLIVNNATNVVIKVCEFQFCNDPFLGVYYHKNNKSWMESEFRVYSSANNCTFEYVSQPFLMDLEGKQGNFKNLREFVFKNIDGYFKIYSKHTPINLVRDLPQGFSALEPLVDLPIGINITRFQTLLALHRSYLTPGDSSSGWTAGAAAYYVGYLQPRTFLLKYNENGTITDAVDCALDPLSETKCTLKSFTVEKGIYQTSNFRVQPTESIVRFPNITNLCPFGEVFNATRFASVYAWNRKRISNCVADYSVLYNSASFSTFKCYGVSPTKLNDLCFTNVYADSFVIRGDEVRQIAPGQTGKIADYNYKLPDDFTGCVIAWNSNNLDSKVGGNYNYLYRLFRKSNLKPFERDISTEIYQAGSTPCNGVEGFNCYFPLQSYGFQPTNGVGYQPYRVVVLSFELLHAPATVCGPKKSTNLVKNKCVNFNFNGLTGTGVLTESNKKFLPFQQFGRDIADTTDAVRDPQTLEILDITPCSFGGVSVITPGTNTSNQVAVLYQGVNCTEVPVAIHADQLTPTWRVYSTGSNVFQTRAGCLIGAEHVNNSYECDIPIGAGICASYQTQTNSPRRARSVASQSIIAYTMSLGAENSVVYSNNSIAIPTNFTISVTTEILPVSMTKTSVDCTMYICGDSTECSNLLLQYGSFCTQLNRALTGIAVEQDKNTQEVFAQVKQIYKTPPIKDFGGFNFSQILPDPSKPSKRSFIEDLLFNKVTLADAGFIKQYGDCLGDIAARDLICAQKFNGLTVLPPLLTDEMIAQYTSALLAGTITSGWTFCAGAALQIPFAMQMAYRFNGIGVTQNVLYENQKLIANQFNSAIGKIQDSLSSTASALGKLQDVVNQNAQALNTLVKQLSSNFGAISSVLNDILSRLDKVEAEVQIDRLITGRLQSLQTYVTQQLIRAAEIRASANLAATKMSECVCGQSKRVDFCGKGYHLMSFPQSAPHGVVFLHVTYVPAQEKNFTTAPAICHDGKAHFPREGVFVSNGTHWFVTQRNFYEPQIITTDNTFVSGNCDVVIGIVNNTVYDPLQPELDSGGGGSDIIKLLNEQVNKEMQSSNLYMSMSSWCYTHSLDGAGLFLFDHAAEEYEHAKKLIIFLNENNVPVQLTSISAPEHKFEGLTQIFQKAYEHEQHISESINNIVDHAIKSKDHATFNFLQWYVAEQHEEEVLFKDILDKIELIGNENHGLYLADQYVKGIAKSRKS

SEQ ID NO: 9228 - protein, 1315 aa, Artificial Sequence
  SARS-CoV-2/France/HF2496/2020__EPI_ISL_418231 spike protein (1-1147)(G889C_L1034C) Ferritin construct
MFVFLVLLPLVSSQCVNLTTRTQLPPAYTNSFTRGVYYPDKVFRSSVLHSTQDLFLPFFSNVTWFHAIHVSGTNGTKRFDNPVLPFNDGVYFASTEKSNIIRGWIFGTTLDSKTQSLLIVNNATNVVIKVCEFQFCNDPFLGVYYHKNNKSWMESEFRVYSSANNCTFEYVSQPFLMDLEGKQGNFKNLREFVFKNIDGYFKIYSKHTPINLVRDLPQGFSALEPLVDLPIGINITRFQTLLALHRSYLTPGDSSSGWTAGAAAYYVGYLQPRTFLLKYNENGTITDAVDCALDPLSETKCTLKSFTVEKGIYQTSNFRVQPTESIVRFPNITNLCPFGEVFNATRFASVYAWNRKRISNCVADYSVLYNSASFSTFKCYGVSPTKLNDLCFTNVYADSFVIRGDEVRQIAPGQTGKIADYNYKLPDDFTGCVIAWNSNNLDSKVGGNYNYLYRLFRKSNLKPFERDISTEIYQAGSTPCNGVEGFNCYFPLQSYGFQPTNGVGYQPYRVVVLSFELLHAPATVCGPKKSTNLVKNKCVNFNFNGLTGTGVLTESNKKFLPFQQFGRDIADTTDAVRDPQTLEILDITPCSFGGVSVITPGTNTSNQVAVLYQGVNCTEVPVAIHADQLTPTWRVYSTGSNVFQTRAGCLIGAEHVNNSYECDIPIGAGICASYQTQTNSPRRARSVASQSIIAYTMSLGAENSVAYSNNSIAIPTNFTISVTTEILPVSMTKTSVDCTMYICGDSTECSNLLLQYGSFCTQLNRALTGIAVEQDKNTQEVFAQVKQIYKTPPIKDFGGFNFSQILPDPSKPSKRSFIEDLLFNKVTLADAGFIKQYGDCLGDIVARDLICAQKFNGLTVLPPLLTDEMIAQYTSALLAGTITSGWTFCAGAALQIPFAMQMAYRFNGIGVTQNVLYENQKLIANQFNSAIGKIQDSLSSTASALGKLQDVVNQNAQALNTLVKQLSSNFGAISSVLNDILSRLDKVEAEVQIDRLITGRLQSLQTYVTQQLIRAAEIRASANLAATKMSECVCGQSKRVDFCGKGYHLMSFPQSAPHGVVFLHVTYVPAQEKNFTTAPAICHDGKAHFPREGVFVSNGTHWFVTQRNFYEPQIITTDNTFVSGNCDVVIGIVNNTVYDPLQPELDSGGGGSDIIKLLNEQVNKEMQSSNLYMSMSSWCYTHSLDGAGLFLFDHAAEEYEHAKKLIIFLNENNVPVQLTSISAPEHKFEGLTQIFQKAYEHEQHISESINNIVDHAIKSKDHATFNFLQWYVAEQHEEEVLFKDILDKIELIGNENHGLYLADQYVKGIAKSRKS

SEQ ID NO: 9229 - protein, 1315 aa, Artificial Sequence
  SARS-CoV-2/USA/WA-UW291/2020__EPI_ISL_418076 spike protein (1-1147)(G889C_L1034C) Ferritin construct
MFVFLVLLPLVSSQCVNLTTRTQLPPAYTNSFTRGVYYPDKVFRSSVLHSTQDLFLPFFSNVTWFHAIHVSGTNGTKRFDNPVLPFNDGVYFASTEKSNIIRGWIFGTTLDSKTQSLLIVNNATNVVIKVCEFQFCNDPFLGVYYHKNNKSWMESEFRVYSSANNCTFEYVSQPFLMDLEGKQGNFKNLREFVFKNIDGYFKIYSKHTPINLVRDLPQGFSALEPLVDLPIGINITRFQTLLALHRSYLTPGDSSSGWTAGAAAYYVGYLQPRTFLLKYNENGTITDAVDCALDPLSETKCTLKSFTVEKGIYQTSNFRVQPTESIVRFPNITNLCPFGEVFNATRFASVYAWNRKRISNCVADYSVLYNSASFSTFKCYGVSPTKLNDLCFTNVYADSFVIRGDEVRQIAPGQTGKIADYNYKLPDDFTGCVIAWNSNNLDSKVGGNYNYLYRLFRKSNLKPFERDISTEIYQAGSTPCNGVEGFNCYFPLQSYGFQPTNGVGYQPYRVVVLSFELLHAPATVCGPKKSTNLVKNKCVNFNFNGLTGTGVLTESNKKFLPFQQFGRDIADTTDAVRDPQTLEILDITPCSFGGVSVITPGTNTSNQVAVLYQGVNCTEVPVAIHADQLTPTWRVYSTGSNVFQTRAGCLIGAEHVNNSYECDIPIGAGICASYQTQTNSPRRARSVASQSIIAYTMSLGAENSVAYSNNSIAIPTNFTISVTTEILPVSMTKTSVDCTMYICGDSTECSNLLLQYGSFCTQLNRALTGIAVEQDKNTQEVFAQVKQIYKTPPIKDFGGFNFSQILPDPSKPSKRSFIEDLLFNKVTLADAGFIKQYGDCLGDIAARDLICAQKFNGLTVLPPLLTDEMIAQYTSALLAGTITSGWTFCAGAALQIPFAMQMAYRFNGIGVTQNVLYENQKLIANQFNSAIGKIQYSLSSTASALGKLQDVVNQNAQALNTLVKQLSSNFGAISSVLNDILSRLDKVEAEVQIDRLITGRLQSLQTYVTQQLIRAAEIRASANLAATKMSECVCGQSKRVDFCGKGYHLMSFPQSAPHGVVFLHVTYVPAQEKNFTTAPAICHDGKAHFPREGVFVSNGTHWFVTQRNFYEPQIITTDNTFVSGNCDVVIGIVNNTVYDPLQPELDSGGGGSDIIKLLNEQVNKEMQSSNLYMSMSSWCYTHSLDGAGLFLFDHAAEEYEHAKKLIIFLNENNVPVQLTSISAPEHKFEGLTQIFQKAYEHEQHISESINNIVDHAIKSKDHATFNFLQWYVAEQHEEEVLFKDILDKIELIGNENHGLYLADQYVKGIAKSRKS

SEQ ID NO: 9230 - protein, 1315 aa, Artificial Sequence; identical to SEQ ID NO: 9193
  SARS-CoV-2/Portugal/PT0034/2020__EPI_ISL_418019 spike protein (1-1147)(G889C_L1034C) Ferritin construct

SEQ ID NO: 9231 - protein, 1315 aa, Artificial Sequence; identical to SEQ ID NO: 9185
  SARS-CoV-2/Iceland/202/2020__EPI_ISL_417750 spike protein (1-1147)(G889C_L1034C) Ferritin construct

SEQ ID NO: 9232 - protein, 1315 aa, Artificial Sequence
  SARS-CoV-2/USA/WA-UW261/2020__EPI_ISL_418046 spike protein (1-1147)(G889C_L1034C) Ferritin construct
MFVFLVLLPLVSSQCVNLTTRTQLPPAYTNSFTRGVYYPDKVFRSSVLHSTQDLFLPFFSNVTWFHAIHVSGTNGTKRFDNPVLPFNDGVYFASTEKSNIIRGWIFGTTLDSKTQSLLIVNNATNVVIKVCEFQFCNDPFLGVYYHKNNKSWMESEFRVYSSANNCTFEYVSQPFLMDLEGKQGNFKNLREFVFKNIDGYFKIYSKHTPINLVRDLPQGFSALEPLVDLPIGINITRFQTLLALHRSYLTPGDSSSGWTAGAAAYYVGYLQPRTFLLKYNENGTITDAVDCALDPLSETKCTLKSFTVEKGIYQTSNFRVQPTESIVRFPNITNLCPFGEVFNATRFTSVYAWNRKRISNCVADYSVLYNSASFSTFKCYGVSPTKLNDLCFTNVYADSFVIRGDEVRQIAPGQTGKIADYNYKLPDDFTGCVIAWNSNNLDSKVGGNYNYLYRLFRKSNLKPFERDISTEIYQAGSTPCNGVEGFNCYFPLQSYGFQPTNGVGYQPYRVVVLSFELLHAPATVCGPKKSTNLVKNKCVNFNFNGLTGTGVLTESNKKFLPFQQFGRDIADTTDAVRDPQTLEILDITPCSFGGVSVITPGTNTSNQVAVLYQDVNCTEVPVAIHADQLTPTWRVYSTGSNVFQTRAGCLIGAEHVNNSYECDIPIGAGICASYQTQTNSPRRARSVASQSIIAYTMSLGAENSVAYSNNSIAIPTNFTISVTTEILPVSMTKTSVDCTMYICGDSTECSNLLLQYGSFCTQLNRALTGIAVEQDKNTQEVFAQVKQIYKTPPIKDFGGFNFSQILPDPSKPSKRSFIEDLLFNKVTLADAGFIKQYGDCLGDIAARDLICAQKFNGLTVLPPLLTDEMIAQYTSALLAGTITSGWTFCAGAALQIPFAMQMAYRFNGIGVTQNVLYENQKLIANQFNSAIGKIQDSLSSTASALGKLQDVVNQNAQALNTLVKQLSSNFGAISSVLNDILSRLDKVEAEVQIDRLITGRLQSLQTYVTQQLIRAAEIRASANLAATKMSECVCGQSKRVDFCGKGYHLMSFPQSAPHGVVFLHVTYVPAQEKNFTTAPAICHDGKAHFPREGVFVSNGTHWFVTQRNFYEPQIITTDNTFVSGNCDVVIGIVNNTVYDPLQPELDSGGGGSDIIKLLNEQVNKEMQSSNLYMSMSSWCYTHSLDGAGLFLFDHAAEEYEHAKKLIIFLNENNVPVQLTSISAPEHKFEGLTQIFQKAYEHEQHISESINNIVDHAIKSKDHATFNFLQWYVAEQHEEEVLFKDILDKIELIGNENHGLYLADQYVKGIAKSRKS

SEQ ID NO: 9233 - protein, 1315 aa, Artificial Sequence
  SARS-CoV-2/Portugal/PT0035/2020__EPI_ISL_418020 spike protein (1-1147)(G889C_L1034C) Ferritin construct
MFVFLVLLPLVSSQCVNLTTRTQLPPAYTNSFTRGVYYPDKVFRSSVLHSTQDLFLPFFSNVTWFHAIHVSGTNGTKRFDNPVLPFNDGVYFASTEKSNIIRGWIFGTTLDSKTQSLLIVNNATNVVIKVCEFQFCNDPFLGVYYHKNNKSWMESEFRVYSSANNCTFEYVSQPFLMDLEGKQGNFKNLREFVFKNIDGYFKIYSKHTPINLVRDLPQGFSALEPLVDLPIGINITRFQTLLALHRSYLTPGDSSSGWTAGAAAYYVGYLQPRTFLLKYNENGTITDAVDCALDPLSETKCTLKSFTVEKGIYQTSNFRVQPTESIVRFPNITNLCPFGEVFNATRFASVYAWNRKRISNCVADYSVLYNSASFSTFKCYGVSPTKLNDLCFTNVYADSFVIRGDEVRQIAPGQTGKIADYNYKLPDDFTGCVIAWNSNNLDSKVGGNYNYLYRLFRKSNLKPFERDISTEIYQAGSTPCNGVEGFNCYFPLQSYGFQPTNGVGYQPYRVVVLSFELLHAPATVCGPKKSTNLVKNKCVNFNFNGLTGTGVLTESNKKFLPFQQFGRDIADTTDAVRDPQTLEILDITPCSFGGVSVITPGTNTSNQVAVLYQDVNCTEVPVAIHADQLTPTWRVYSTGSNVFQTRAGCLIGAEHVNNSYECDIPIGAGICASYQTQTNSPRRARSVASQSIIAYTMSLGAENSVAYSNNSIAIPTNFTISVTTEILPVSMTKTSVDCTMYICGDSTECSNLLLQYGSFCTQLNRALTGIAVEQDKNTQEVFAQVKQIYKTPPIKDFGGFNFSQILPDPSKPSKRSFIEDLLFNKVTLADAGFIKQYGDCLGDISARDLICAQKFNGLTVLPPLLTDEMIAQYTSALLAGTITSGWTFCAGAALQIPFAMQMAYRFNGIGVTQNVLYENQKLIANQFNSAIGKIQDSLSSTASALGKLQDVVNQNAQALNTLVKQLSSNFGAISSVLNDILSRLDKVEAEVQIDRLITGRLQSLQTYVTQQLIRAAEIRASANLAATKMSECVCGQSKRVDFCGKGYHLMSFPQSAPHGVVFLHVTYVPAQEKNFTTAPAICHDGKAHFPREGVFVSNGTHWFVTQRNFYEPQIITTDNTFVSGNCDVVIGIVNNTVYDPLQPELDSGGGGSDIIKLLNEQVNKEMQSSNLYMSMSSWCYTHSLDGAGLFLFDHAAEEYEHAKKLIIFLNENNVPVQLTSISAPEHKFEGLTQIFQKAYEHEQHISESINNIVDHAIKSKDHATFNFLQWYVAEQHEEEVLFKDILDKIELIGNENHGLYLADQYVKGIAKSRKS

SEQ ID NO: 9234 - protein, 1315 aa, Artificial Sequence
  SARS-CoV-2/USA/NY-NYUMC7/2020__EPI_ISL_418192 spike protein (1-1147)(G889C_L1034C) Ferritin construct
MFVFLVLLPLVSSQCVNLTTRTQLPPAYTNSFTRGVYYPDKVFRSSVLHSTQDLFLPFFSNVTWFHAIHVSGTNGTKRFDNPVLPFNDGVYFASTEKSNIIRGWIFGTTLDSKTQSLLIVNNATNVVIKVCEFQFCNDPFLGVYHHKNNKSWMESEFRVYSSANNCTFEYVSQPFLMDLEGKQGNFKNLREFVFKNIDGYFKIYSKHTPINLVRDLPQGFSALEPLVDLPIGINITRFQTLLALHRSYLTPGDSSSGWTAGAAAYYVGYLQPRTFLLKYNENGTITDAVDCALDPLSETKCTLKSFTVEKGIYQTSNFRVQPTESIVRFPNITNLCPFGEVFNATRFASVYAWNRKRISNCVADYSVLYNSASFSTFKCYGVSPTKLNDLCFTNVYADSFVIRGDEVRQIAPGQTGKIADYNYKLPDDFTGCVIAWNSNNLDSKVGGNYNYLYRLFRKSNLKPFERDISTEIYQAGSTPCNGVEGFNCYFPLQSYGFQPTNGVGYQPYRVVVLSFELLHAPATVCGPKKSTNLVKNKCVNFNFNGLTGTGVLTESNKKFLPFQQFGRDIADTTDAVRDPQTLEILDITPCSFGGVSVITPGTNTSNQVAVLYQGVNCTEVPVAIHADQLTPTWRVYSTGSNVFQTRAGCLIGAEHVNNSYECDIPIGAGICASYQTQTNSPRRARSVASQSIIAYTMSLGAENSVAYSNNSIAIPTNFTISVTTEILPVSMTKTSVDCTMYICGDSTECSNLLLQYGSFCTQLNRALTGIAVEQDKNTQEVFAQVKQIYKTPPIKDFGGFNFSQILPDPSKPSKRSFIEDLLFNKVTLADAGFIKQYGDCLGDIAARDLICAQKFNGLTVLPPLLTDEMIAQYTSALLAGTITSGWTFCAGAALQIPFAMQMAYRFNGIGVTQNVLYENQKLIANQFNSAIGKIQDSLSSTASALGKLQDVVNQNAQALNTLVKQLSSNFGAISSVLNDILSRLDKVEAEVQIDRLITGRLQSLQTYVTQQLIRAAEIRASANLAATKMSECVCGQSKRVDFCGKGYHLMSFPQSAPHGVVFLHVTYVPAQEKNFTTAPAICHDGKAHFPREGVFVSNGTHWFVTQRNFYEPQIITTDNTFVSGNCDVVIGIVNNTVYDPLQPELDSGGGGSDIIKLLNEQVNKEMQSSNLYMSMSSWCYTHSLDGAGLFLFDHAAEEYEHAKKLIIFLNENNVPVQLTSISAPEHKFEGLTQIFQKAYEHEQHISESINNIVDHAIKSKDHATFNFLQWYVAEQHEEEVLFKDILDKIELIGNENHGLYLADQYVKGIAKSRKS

SEQ ID NO: 9235 - protein, 1315 aa, Artificial Sequence
  SARS-CoV-2/Iceland/189/2020__EPI_ISL_417709 spike protein (1-1147)(G889C_L1034C) Ferritin construct
MFVFLVLLPLVSSQCVNLTTRTQLPPAYTNSFTRGVYYPDKVFRSSVLHSTQDLFLPFFSNVTWFHAIHVSGTNGTKRFDNPVLPFNDGVYFASTEKSNIIRGWIFGTTLDSKTQSLLIVNNATNVVIKVCEFQFCNDPFLGVYYHKNNKSWMESEFRVYSSANNCTFEYVSQPFLMDLEGKQGNFKNLREFVFKNIDGYFKIYSKHTPINLVRDLPQGFSALEPLVDLPIGINITRFQTLLALHRSYLTPGDSSSGWTAGAAAYYVGYLQPRTFLLKYNENGTITDAVDCALDPLSETKCTLKSFTVEKGIYQTSNFRVQPTESIVRFPNITNLCPFGEVFNATRFASVYAWNRKRISNCVADYSVLYNSASFSTFKCYGVSPTKLNDLCFTNVYADSFVIRGDEVRQIAPGQTGKIADYNYKLPDDFTGCVIAWNSNNLDSKVGGNYNYLYRLFRKSNLKPFERDISTEIYQAGSTPCNGVEGFNCYFPLQSYGFQPTNGVGYQPYRVVVLSFELLHAPATVCGPKKSTNLVKNKCVNFNFNGLTGTGVLTESNKKFLPFQQFGRDIADTTDAVRDPQTLEILDITPCSFGGVSVITPGTNTSNQVAVLYQGVNCTEVPVAIHADQLTPTWRVYSTGSNVFQTRAGCLIGAEHVNNSYECDIPIGAGICASYQTQTNSPRRARSVASQSIIAYTMSLGAENSVAYSNNSIAIPTNFTISVTTEILPVSMTKTSVDCTMYICGDSTECSNLLLQYGSFCTQLNRALTGIAVEQDKNTQEVFAQVKQIYKTPPIKDFGGFNFSQILPDPSKPSKRSFIEDLLFNKVTLADAGFTKQYGDCLGDIAARDLICAQKFNGLTVLPPLLTDEMIAQYTSALLAGTITSGWTFCAGAALQIPFAMQMAYRFNGIGVTQNVLYENQKLIANQFNSAIGKIQDSLSSTASALGKLQDVVNQNAQALNTLVKQLSSNFGAISSVLNDILSRLDKVEAEVQIDRLITGRLQSLQTYVTQQLIRAAEIRASANLAATKMSECVCGQSKRVDFCGKGYHLMSFPQSAPHGVVFLHVTYVPAQEKNFTTAPAICHDGKAHFPREGVFVSNGTHWFVTQRNFYEPQIITTDNTFVSGNCDVVIGIVNNTVYDPLQPELDSGGGGSDIIKLLNEQVNKEMQSSNLYMSMSSWCYTHSLDGAGLFLFDHAAEEYEHAKKLIIFLNENNVPVQLTSISAPEHKFEGLTQIFQKAYEHEQHISESINNIVDHAIKSKDHATFNFLQWYVAEQHEEEVLFKDILDKIELIGNENHGLYLADQYVKGIAKSRKS

SEQ ID NO: 9236 - protein, 1315 aa, Artificial Sequence
  SARS-CoV-2/Australia/NSW56/2020__EPI_ISL_417408 spike protein (1-1147)(G889C_L1034C) Ferritin construct
MFVFLVLLPLVSSQCVNLTTRTQLPPAYTNSFTRGVYYPDKVFRSSVLHSTQDLFLPFFSNVTWFHAIHVSGTNGTKRFDNPVLPFNDGVYFASTEKSNIIRGWIFGTTLDSKTQSLLIVNNATNVVIKVCEFQFCNDPFLGVYYHKNNKSWMESEFRVYSSANNCTFEYVSQPFLMDLEGKQGNFKNLREFVFKNIDGYFKIYSKHTPINLVRDLPQGFSALEPLVDLPIGINITRFQTLLALHRSYLTPGDSSSGWTAGAAAYYVGYLQPRTFLLKYNENGTITDAVDCALDPLSETKCTLKSFTVEKGIYQTSNFRVQPTESIVRFPNITNLCPFGEVFNATRFASVYAWNRKRISNCVADYSVLYNSASFSTFKCYGVSPTKLNDLCFTNVYADSFVIRGDEVRQIAPGQTGKIADYNYKLPDDFTGCVIAWNSNNLDSKVGGNYNYLYRLFRKSNLKPFERDISTEIYQAGSTPCNGVEGFNCYFPLQSYGFQPTNGVGYQPYRVVVLSFELLHAPATVCGPKKSTNLVKNKCVNFNFNGLTGTGVLTESNKKFLPFQQFGRDIADTTDAVRDPQTLEILDITPCSFGGVSVITPGTNTSNQVAVLYQDVNCTEVPVAIHADQLTPTWRVYSTGSNVFQTRAGCLIGAEHVNNSYECDIPIGAGICASYQTQTNSPRRARSVASQSIIAYTMSLGAENSVAYSNNSIAIPTNFTISVTTEILPVSMTKTSVDCTMYICGDSTECSNLLLQYGSFCTQLNRALTGIAVEQDKNTQEVFAQVKQIYKTPPIKDFGGFNFSQILPDSSKPSKRSFIEDLLFNKVTLADAGFIKQYGDCLGDIAARDLICAQKFNGLTVLPPLLTDEMIAQYTSALLAGTITSGWTFCAGAALQIPFAMQMAYRFNGIGVTQNVLYENQKLIANQFNSAIGKIQDSLSSTASALGKLQDVVNQNAQALNTLVKQLSSNFGAISSVLNDILSRLDKVEAEVQIDRLITGRLQSLQTYVTQQLIRAAEIRASANLAATKMSECVCGQSKRVDFCGKGYHLMSFPQSAPHGVVFLHVTYVPAQEKNFTTAPAICHDGKAHFPREGVFVSNGTHWFVTQRNFYEPQIITTDNTFVSGNCDVVIGIVNNTVYDPLQPELDSGGGGSDIIKLLNEQVNKEMQSSNLYMSMSSWCYTHSLDGAGLFLFDHAAEEYEHAKKLIIFLNENNVPVQLTSISAPEHKFEGLTQIFQKAYEHEQHISESINNIVDHAIKSKDHATFNFLQWYVAEQHEEEVLFKDILDKIELIGNENHGLYLADQYVKGIAKSRKS

SEQ ID NO: 9237 - protein, 1315 aa, Artificial Sequence
  SARS-CoV-2/Iceland/280/2020__EPI_ISL_417608 spike protein (1-1147)(G889C_L1034C) Ferritin construct
MFVFLVLLPLVSSQCVNLTTRTQLPPAYTNSFTRGVYYPDKVFRSSVLHSTQDLFLPFFSNVTWFHAIHVSGTNGTKRFDNPVLPFNDGVYFASTEKSNIIRGWIFGTTLDSKTQSLLIVNNATNVVIKVCEFQFCNDPFLGVYYHKNNKSWMESEFRVYSSANNCTFEYVSQPFLMDLEGKQGNFKNLREFVFKNIDGYFKIYSKHTPINLVRDLPQGFSALEPLVDLPIGINITRFQTLLALHRSYLTPGDSSSGWTAGAAAYYVGYLQPRTFLLKYNENGTITDAVDCALDPLSETKCTLKSFTVEKGIYQTSNFRVQPTESIVRFPNITNLCPFGEVFNATRFASVYAWNRKRISNCVADYSVLYNSASFSTFKCYGVSPTKLNDLCFTNVYADSFVIRGDEVRQIAPGQTGKIADYNYKLPDDFTGCVIAWNSNNLDSKVGGNYNYLYRLFRKSNLKPFERDISTEIYQAGSTPCNGVEGFNCYFPLQSYGFQPTNGVGYQPYRVVVLSFELLHAPATVCGPKKSTNLVKNKCVNFNFNGLTGTGVLTESNKKFLPFQQFGRDIADTTDAVRDPQTLEILDITPCSFGGVSVITPGTNTSNQVAVLYQGVNCTEVPVAIHADQLTPTWRVYSTGSNVFQTRAGCLIGAEHVNNSYECDIPIGAGICASYHTQTNSPRRARSVASQSIIAYTMSLGAENSVAYSNNSIAIPTNFTISVTTEILPVSMTKTSVDCTMYICGDSTECSNLLLQYGSFCTQLNRALTGIAVEQDKNTQEVFAQVKQIYKTPPIKDFGGFNFSQILPDPSKPSKRSFIEDLLFNKVTLADAGFIKQYGDCLGDIAARDLICAQKFNGLTVLPPLLTDEMIAQYTSALLAGTITSGWTFCAGAALQIPFAMQMAYRFNGIGVTQNVLYENQKLIANQFNSAIGKIQDSLSSTASALGKLQDVVNQNAQALNTLVKQLSSNFGAISSVLNDILSRLDKVEAEVQIDRLITGRLQSLQTYVTQQLIRAAEIRASANLAATKMSECVCGQSKRVDFCGKGYHLMSFPQSAPHGVVFLHVTYVPAQEKNFTTAPAICHDGKAHFPREGVFVSNGTHWFVTQRNFYEPQIITTDNTFVSGNCDVVIGIVNNTVYDPLQPELDSGGGGSDIIKLLNEQVNKEMQSSNLYMSMSSWCYTHSLDGAGLFLFDHAAEEYEHAKKLIIFLNENNVPVQLTSISAPEHKFEGLTQIFQKAYEHEQHISESINNIVDHAIKSKDHATFNFLQWYVAEQHEEEVLFKDILDKIELIGNENHGLYLADQYVKGIAKSRKS

SEQ ID NO: 9238 - protein, 1315 aa, Artificial Sequence; identical to SEQ ID NO: 9193
  SARS-CoV-2/Iceland/247/2020__EPI_ISL_417575 spike protein (1-1147)(G889C_L1034C) Ferritin construct

SEQ ID NO: 9239 - protein, 1315 aa, Artificial Sequence
  SARS-CoV-2/Iceland/238/2020__EPI_ISL_417566 spike protein (1-1147)(G889C_L1034C) Ferritin construct
MFVFLVLLPLVSSQCVNLTTRTQLPPAYTNSFTRGVYYPDKVFRSSVLHSTQDLFLPFFSNVTWFHAIHVSGTNGTKRFDNPVLPFNDGVYFASTEKSNIIRGWIFGTTLDSKTQSLLIVNNATNVVIKVCEFQFCNDPFLGVYYHKNNKSWMESEFRVYSSANNCTFEYVSQPFLMDLEGKQGNFKNLREFVFKNIDGYFKIYSKHTPINLVRDLPQGFSALEPLVDLPIGINITRFQTLLALHRSYLTPGDSSSGWTAGAAAYYVGYLQPRTFLLKYNENGTITDAVDCALDPLSETKCTLKSFTVEKGIYQTSNFRVQPTESIVRFPNITNLCPFGEVFNATRFASVYAWNRKRISNCVADYSVLYNSASFSTFKCYGVSPTKLNDLCFTNVYADSFVIRGDEVRQIAPGQTGKIADYNYKLPDDFTGCVIAWNSNNLDSKVGGNYNYLYRLFRKSNLKPFERDISTEIYQAGSTPCNGVEGFNCYFPLQSYGFQPTNGVGYQPYRVVVLSFELLHAPATVCGPKKSTNLVKNKCVNFNFNGLTGTGVLTESNKKFLPFQQFGRDIADTTDAVRDPQTLEILDITPCSFGGVSVITPGTNTSNQVAVLYQGVNCTEVPVAIHADQLTPTWRVYSTGSNVFQTRAGCLIGAEHVNNSYECDIPIGAGICASYQTQTNSPRRARSVASQSIIAYTMSLGAENSVAYSNNSIAIPTNFTISVTTEILPVSMTKTSVDCTMYICGDSTECSNLLLQYGSFCTQLNRALTGIAVEQDKNTQEVFAQVKQIYKTPPIKDFGGFNFSQILPDPSKPSKRSFIEDLLFNKVTLADVGFIKQYGDCLGDIAARDLICAQKFNGLTVLPPLLTDEMIAQYTSALLAGTITSGWTFCAGAALQIPFAMQMAYRFNGIGVTQNVLYENQKLIANQFNSAIGKIQDSLSSTASALGKLQDVVNQNAQALNTLVKQLSSNFGAISSVLNDILSRLDKVEAEVQIDRLITGRLQSLQTYVTQQLIRAAEIRASANLAATKMSECVCGQSKRVDFCGKGYHLMSFPQSAPHGVVFLHVTYVPAQEKNFTTAPAICHDGKAHFPREGVFVSNGTHWFVTQRNFYEPQIITTDNTFVSGNCDVVIGIVNNTVYDPLQPELDSGGGGSDIIKLLNEQVNKEMQSSNLYMSMSSWCYTHSLDGAGLFLFDHAAEEYEHAKKLIIFLNENNVPVQLTSISAPEHKFEGLTQIFQKAYEHEQHISESINNIVDHAIKSKDHATFNFLQWYVAEQHEEEVLFKDILDKIELIGNENHGLYLADQYVKGIAKSRKS

SEQ ID NO: 9240 - protein, 1315 aa, Artificial Sequence
  SARS-CoV-2/Greece/16/2020__EPI_ISL_418265 spike protein (1-1147)(G889C_L1034C) Ferritin construct
MFVFLVLLPLVSSQCVNLTTRTQLPPAYTNSFTRGVYYPDKVFRSSVLHSTQDLFLPFFSNVTWFHAIHVSGTNGTKRFDNPVLPFNDGVYFASTEKSNIIRGWIFGTTLDSKTQSLLIVNNATNVVIKVCEFQFCNDPFLGVYYHKNNKSWMESEFRVYSSANNCTFEYVSQPFLMDLEGKQGNFKNLREFVFKNVDGYFKIYSKHTPINLVRDLPQGFSALEPLVDLPIGINITRFQTLLALHRSYLTPGDSSSGWTAGAAAYYVGYLQPRTFLLKYNENGTITDAVDCALDPLSETKCTLKSFTVEKGIYQTSNFRVQPTESIVRFPNITNLCPFGEVFNATRFASVYAWNRKRISNCVADYSVLYNSASFSTFKCYGVSPTKLNDLCFTNVYADSFVIRGDEVRQIAPGQTGKIADYNYKLPDDFTGCVIAWNSNNLDSKVGGNYNYLYRLFRKSNLKPFERDISTEIYQAGSTPCNGVEGFNCYFPLQSYGFQPTNGVGYQPYRVVVLSFELLHAPATVCGPKKSTNLVKNKCVNFNFNGLTGTGVLTESNKKFLPFQQFGRDIADTTDAVRDPQTLEILDITPCSFGGVSVITPGTNTSNQVAVLYQDVNCTEVPVAIHADQLTPTWRVYSTGSNVFQTRAGCLIGAEHVNNSYECDIPIGAGICASYQTQTNSPRRARSVASQSIIAYTMSLGAENSVAYSNNSIAIPTNFTISVTTEILPVSMTKTSVDCTMYICGDSTECSNLLLQYGSFCTQLNRALTGIAVEQDKNTQEVFAQVKQIYKTPPIKDFGGFNFSQILPDPSKPSKRSFIEDLLFNKVTLADAGFIKQYGDCLGDIAARDLICAQKFNGLTVLPPLLTDEMIAQYTSALLAGTITSGWTFCAGAALQIPFAMQMAYRFNGIGVTQNVLYENQKLIANQFNSAIGKIQDSLSSTASALGKLQDVVNQNAQALNTLVKQLSSNFGAISSVLNDILSRLDKVEAEVQIDRLITGRLQSLQTYVTQQLIRAAEIRASANLAATKMSECVCGQSKRVDFCGKGYHLMSFPQSAPHGVVFLHVTYVPAQEKNFTTAPAICHDGKAHFPREGVFVSNGTHWFVTQRNFYEPQIITTDNTFVSGNCDVVIGIVNNTVYDPLQPELDSGGGGSDIIKLLNEQVNKEMQSSNLYMSMSSWCYTHSLDGAGLFLFDHAAEEYEHAKKLIIFLNENNVPVQLTSISAPEHKFEGLTQIFQKAYEHEQHISESINNIVDHAIKSKDHATFNFLQWYVAEQHEEEVLFKDILDKIELIGNENHGLYLADQYVKGIAKSRKS

SEQ ID NO: 9241 - protein, 1315 aa, Artificial Sequence
  SARS-CoV-2/Iceland/319/2020__EPI_ISL_417648 spike protein (1-1147)(G889C_L1034C) Ferritin construct
MFVFLVLLPLVSSQCVNLTTRTQLPPAYTNSFTRGVYYPDKVFRSSVLHSTQDLFLPFFSNVTWFHAIHVSGTNGTKRFDNPVLPFNDGVYFASTEKSNIIRGWIFGTTLDSKTQSLLIVNNATNVVIKVCEFQFCNDPFLGVYYHKNNKSWMESEFRVYSSANNCTFEYVSQPFLIDLEGKQGNFKNLREFVFKNIDGYFKIYSKHTPINLVRDLPQGFSALEPLVDLPIGINITRFQTLLALHRSYLTPGDSSSGWTAGAAAYYVGYLQPRTFLLKYNENGTITDAVDCALDPLSETKCTLKSFTVEKGIYQTSNFRVQPTESIVRFPNITNLCPFGEVFNATRFASVYAWNRKRISNCVADYSVLYNSASFSTFKCYGVSPTKLNDLCFTNVYADSFVIRGDEVRQIAPGQTGKIADYNYKLPDDFTGCVIAWNSNNLDSKVGGNYNYLYRLFRKSNLKPFERDISTEIYQAGSTPCNGVEGFNCYFPLQSYGFQPTNGVGYQPYRVVVLSFELLHAPATVCGPKKSTNLVKNKCVNFNFNGLTGTGVLTESNKKFLPFQQFGRDIADTTDAVRDPQTLEILDITPCSFGGVSVITPGTNTSNQVAVLYQGVNCTEVPVAIHADQLTPTWRVYSTGSNVFQTRAGCLIGAEHVNNSYECDIPIGAGICASYQTQTNSPRRARSVASQSIIAYTMSLGAENSVAYSNNSIAIPTNFTISVTTEILPVSMTKTSVDCTMYICGDSTECSNLLLQYGSFCTQLNRALTGIAVEQDKNTQEVFAQVKQIYKTPPIKDFGGFNFSQILPDPSKPSKRSFIEDLLFNKVTLADAGFIKQYGDCLGDIAARDLICAQKFNGLTVLPPLLTDEMIAQYTSALLAGTITSGWTFCAGAALQIPFAMQMAYRFNGIGVTQNVLYENQKLIANQFNSAIGKIQDSLSSTASALGKLQDVVNQNAQALNTLVKQLSSNFGAISSVLNDILSRLDKVEAEVQIDRLITGRLQSLQTYVTQQLIRAAEIRASANLAATKMSECVCGQSKRVDFCGKGYHLMSFPQSAPHGVVFLHVTYVPAQEKNFTTAPAICHDGKAHFPREGVFVSNGTHWFVTQRNFYEPQIITTDNTFVSGNCDVVIGIVNNTVYDPLQPELDSGGGGSDIIKLLNEQVNKEMQSSNLYMSMSSWCYTHSLDGAGLFLFDHAAEEYEHAKKLIIFLNENNVPVQLTSISAPEHKFEGLTQIFQKAYEHEQHISESINNIVDHAIKSKDHATFNFLQWYVAEQHEEEVLFKDILDKIELIGNENHGLYLADQYVKGIAKSRKS

SEQ ID NO: 9242 - protein, 1315 aa, Artificial Sequence
  SARS-CoV-2/Congo/94/2020__EPI_ISL_417947 spike protein (1-1147)(G889C_L1034C) Ferritin construct
MFVFLVLLPLVSSQCVNLTTRTQLPPAYTNSFTRGVYYPDKVFRSSVLHSTQDLFLPFFSNVTWFHAIHVSGTNGTKRFDNPVLPFNDGVYFASTEKSNIIRGWIFGTTLDSKTQSLLIVNNATNVVIKVCEFQFCNDPFLGVYYHKNNKSWMESEFRVYSSANNCTFEYVSQPFLMDLEGKQGNFKNLREFVFKNIDGYFKIYSKHTPINLVRDLPQGFSALEPLVDLPIGINITRFQTLLALHRSYLTPGDSSSGWTAGAAAYYVGYLQPRTFLLKYNENGTITDAVDCALDPLSETKCTLKSFTVEKGIYQTSNFRVQPTESIVRFPNITNLCPFGEVFNATRFASVYAWNRKRISNCVADYSVLYNSASFSTFKCYGVSPTKLNDLCFTNVYADSFVIRGDEVRQIAPGQTGKIADYNYKLPDDFTGCVIAWNSNNLDSKVGGNYNYLYRLFRKSNLKPFERDISTEIYQAGSTPCNGVEGFNCYFPLQSYGFQPTNGVGYQPYRVVVLSFELLHAPATVCGPKKSTNLVKNKCVNFNFNGLTGTGVLTESNKKFLPFQQFGRDIADTTDAVRDPQTLEILDITPCSFGGVSVITPGTNTSNQVAVLYQGVNCTEVPVAIHADQLTPTWRVYSTGSNVFQTRAGCLIGAEHVNNSYECDIPIGAGICASYQTQTNSPRRARSVASQSIIAYTMSLGAENSVAYSNNSIAIPTNFTISVTTEILPVSMTKTSVDCTMYICGDSTECSNLLLQYGSFCTQLNRALTGIAVEQDKNTQEVFAQVKQIYKTPPIKDFGGFNFSQILPDPSKPSKRSFIEDILFNKVTLADAGFIKQYGDCLGDIAARDLICAQKFNGLTVLPPLLTDEMIAQYTSALLAGTITSGWTFCAGAALQIPFAMQMAYRFNGIGVTQNVLYENQKLIANQFNSAIGKIQDSLSSTASALGKLQDVVNQNAQALNTLVKQLSSNFGAISSVLNDILSRLDKVEAEVQIDRLITGRLQSLQTYVTQQLIRAAEIRASANLAATKMSECVCGQSKRVDFCGKGYHLMSFPQSAPHGVVFLHVTYVPAQEKNFTTAPAICHDGKAHFPREGVFVSNGTHWFVTQRNFYEPQIITTDNTFVSGNCDVVIGIVNNTVYDPLQPELDSGGGGSDIIKLLNEQVNKEMQSSNLYMSMSSWCYTHSLDGAGLFLFDHAAEEYEHAKKLIIFLNENNVPVQLTSISAPEHKFEGLTQIFQKAYEHEQHISESINNIVDHAIKSKDHATFNFLQWYVAEQHEEEVLFKDILDKIELIGNENHGLYLADQYVKGIAKSRKS

SEQ ID NO: 9243 - protein, 1315 aa, Artificial Sequence
  SARS-CoV-2/Congo/158/2020__EPI_ISL_417950 spike protein (1-1147)(G889C_L1034C) Ferritin construct
MFVFLVLLPLVSSQCVNLTTRTQLPPAYTNSFTRGVYYPDKVFRSSVLHSTQDLFLPFFSNVTWFHAIHVSGTNGTKRFDNPVLPFNDGVYFASTEKSNIIRGWIFGTTLDSKTQSLLIVNNATNVVIKVCEFQFCNDPFLGVYYHKNNKSWMESEFRVYSSANNCTFEYVSQPFLMDLEGKQGNFKNLREFVFKNIDGYFKIYSKHTPINLVRDLPQGFSALEPLVDLPIGINITRFQTLLALHRSYLTPGDSSSGWTAGAAAYYVGYLQPRTFLLKYNENGTITDAVDCALDPLSETKCTLKSFTVEKGIYQTSNFRVQPTESIVRFPNITNLCPFGEVFNATRFASVYAWNRKRISNCVADYSVLYNSASFSTFKCYGVSPTKLNDLCFTNVYADSFVIRGDEVRQIAPGQTGKIADYNYKLPDDFTGCVIAWNSNNLDSKVGGNYNYLYRLFRKSNLKPFERDISTEIYQAGSTPCNGVEGFNCYFPLQSYGFQPTNGVGYQPYRVVVLSFELLHAPATVCGPKKSTNLVKNKCVNFNFNGLTGTGVLTESNKKFLPFQQFGRDIADTTDAVRDPQTLEILDITPCSFGGVSVITPGTNTSNQVAVLYQDVNCTEVPVAIHADQLTPTWRVYSTGSNVFQTRAGCLIGAEHVNNSYECDIPIGAGICASYQTQTNSPRRARSVASQSIIAYTMSLGAENSVAYSNNSIAIPTNFTISVTTEILPVSMTKTSVDCTMYICGDSTECSNLLLQYGSFCTQLNRALTGIAVEQDKNTQEVFAQVKQIYKTPPIKDFGGFNFSQILPDPSKPSKRSFIEDLLFNKVTLADAGFIKQYGDCLGDIAARDLICAQKFNGLTVLPPLLTDEMIAQYTSALLAGTITSGWTFCAGAALQIPFAMQMAYRFNGIGVTQNVLYENQKLIANQFNSAIGKIQDSLSSTASALGKLQDVVNQNAQALNTLVKQLSSNFGAISSVLNDILSRLDKVEAEVQIDRLITGRLQSLQTYVTQQLIRAAEIRASANLAATKMSECVCGQSKRVDFCGKGYHLMSFPQSAPHGVVFLHVTYVPAQEKNFTTAPAICHDGKAHFPREGVFVSNGTHWFVTQRNFYEPQIITTDNTFLSGNCDVVIGIVNNTVYDPLQPELDSGGGGSDIIKLLNEQVNKEMQSSNLYMSMSSWCYTHSLDGAGLFLFDHAAEEYEHAKKLIIFLNENNVPVQLTSISAPEHKFEGLTQIFQKAYEHEQHISESINNIVDHAIKSKDHATFNFLQWYVAEQHEEEVLFKDILDKIELIGNENHGLYLADQYVKGIAKSRKS

SEQ ID NO: 9244 - protein, 1315 aa, Artificial Sequence
  SARS-CoV-2/USA/UT-00034/2020__EPI_ISL_417977 spike protein (1-1147)(G889C_L1034C) Ferritin construct
MFVFLVLLPLVSSQCVNLTTRTQLPPAYTNSFTRGVYYPDKVFRSSVLHSTQDLFLPFFSNVTWFHAIHVSGTNGTKRFDNPVLPFNDGVYFASTEKSNIIRGWIFGTTLDSKTQSLLIVNNATNVVIKVCEFQFCNDPFLGVYYYKNNKSWMESEFRVYSSANNCTFEYVSQPFLMDLEGKQGNFKNLREFVFKNIDGYFKIYSKHTPINLVRDLPQGFSALEPLVDLPIGINITRFQTLLALHRSYLTPGDSSSGWTAGAAAYYVGYLQPRTFLLKYNENGTITDAVDCALDPLSETKCTLKSFTVEKGIYQTSNFRVQPTESIVRFPNITNLCPFGEVFNATRFASVYAWNRKRISNCVADYSVLYNSASFSTFKCYGVSPTKLNDLCFTNVYADSFVIRGDEVRQIAPGQTGKIADYNYKLPDDFTGCVIAWNSNNLDSKVGGNYNYLYRLFRKSNLKPFERDISTEIYQAGSTPCNGVEGFNCYFPLQSYGFQPTNGVGYQPYRVVVLSFELLHAPATVCGPKKSTNLVKNKCVNFNFNGLTGTGVLTESNKKFLPFQQFGRDIADTTDAVRDPQTLEILDITPCSFGGVSVITPGTNTSNQVAVLYQGVNCTEVPVAIHADQLTPTWRVYSTGSNVFQTRAGCLIGAEHVNNSYECDIPIGAGICASYQTQTNSPRRARSVASQSIIAYTMSLGAENSVAYSNNSIAIPTNFTISVTTEILPVSMTKTSVDCTMYICGDSTECSNLLLQYGSFCTQLNRALTGIAVEQDKNTQEVFAQVKQIYKTPPIKDFGGFNFSQILPDPSKPSKRSFIEDLLFNKVTLADAGFIKQYGDCLGDIAARDLICAQKFNGLTVLPPLLTDEMIAQYTSALLAGTITSGWTFCAGAALQIPFAMQMAYRFNGIGVTQNVLYENQKLIANQFNSAIGKIQDSLSSTASALGKLQDVVNQNAQALNTLVKQLSSNFGAISSVLNDILSRLDKVEAEVQIDRLITGRLQSLQTYVTQQLIRAAEIRASANLAATKMSECVCGQSKRVDFCGKGYHLMSFPQSAPHGVVFLHVTYVPAQEKNFTTAPAICHDGKAHFPREGVFVSNGTHWFVTQRNFYEPQIITTDNTFVSGNCDVVIGIVNNTVYDPLQPELDSGGGGSDIIKLLNEQVNKEMQSSNLYMSMSSWCYTHSLDGAGLFLFDHAAEEYEHAKKLIIFLNENNVPVQLTSISAPEHKFEGLTQIFQKAYEHEQHISESINNIVDHAIKSKDHATFNFLQWYVAEQHEEEVLFKDILDKIELIGNENHGLYLADQYVKGIAKSRKS

SEQ ID NO: 9245 - protein, 1315 aa, Artificial Sequence
  SARS-CoV-2/USA/UT-00033/2020__EPI_ISL_417976 spike protein (1-1147)(G889C_L1034C) Ferritin construct
MFVFLVLLPLVSSQCVNLTTRTQLPPAYTNSFTRGVYYPDKVFRSSVLHSTQDLFLPFFSNVTWFHAIHVSGTNGTKRFDNPVLPFNDGVYFASTEKSNIIRGWIFGTTLDSKTQSLLIVNNATNVVIKVCEFQFCNDPFLGVYYHKNNKSWMESEFRVYSSANNCTFEYVSQPFLMDLEGKQGNFKNLREFVFKNIDGYFKIYSKHTPINLVRDLPQGFSALEPLVDLPIGINITRFQTLLALHRSYLTPGDSSSGLTAGAAAYYVGYLQPRTFLLKYNENGTITDAVDCALDPLSETKCTLKSFTVEKGIYQTSNFRVQPTESIVRFPNITNLCPFGEVFNATRFASVYAWNRKRISNCVADYSVLYNSASFSTFKCYGVSPTKLNDLCFTNVYADSFVIRGDEVRQIAPGQTGKIADYNYKLPDDFTGCVIAWNSNNLDSKVGGNYNYLYRLFRKSNLKPFERDISTEIYQAGSTPCNGVEGFNCYFPLQSYGFQPTNGVGYQPYRVVVLSFELLHAPATVCGPKKSTNLVKNKCVNFNFNGLTGTGVLTESNKKFLPFQQFGRDIADTTDAVRDPQTLEILDITPCSFGGVSVITPGTNTSNQVAVLYQGVNCTEVPVAIHADQLTPTWRVYSTGSNVFQTRAGCLIGAEHVNNSYECDIPIGAGICASYQTQTNSPRRARSVASQSIIAYTMSLGAENSVAYSNNSIAIPTNFTISVTTEILPVSMTKTSVDCTMYICGDSTECSNLLLQYGSFCTQLNRALTGIAVEQDKNTQEVFAQVKQIYKTPPIKDFGGFNFSQILPDPSKPSKRSFIEDLLFNKVTLADAGFIKQYGDCLGDIAARDLICAQKFNGLTVLPPLLTDEMIAQYTSALLAGTITSGWTFCAGAALQIPFAMQMAYRFNGIGVTQNVLYENQKLIANQFNSAIGKIQDSLSSTASALGKLQDVVNQNAQALNTLVKQLSSNFGAISSVLNDILSRLDKVEAEVQIDRLITGRLQSLQTYVTQQLIRAAEIRASANLAATKMSECVCGQSKRVDFCGKGYHLMSFPQSAPHGVVFLHVTYVPAQEKNFTTAPAICHDGKAHFPREGVFVSNGTHWFVTQRNFYEPQIITTDNTFVSGNCDVVIGIVNNTVYDPLQPELDSGGGGSDIIKLLNEQVNKEMQSSNLYMSMSSWCYTHSLDGAGLFLFDHAAEEYEHAKKLIIFLNENNVPVQLTSISAPEHKFEGLTQIFQKAYEHEQHISESINNIVDHAIKSKDHATFNFLQWYVAEQHEEEVLFKDILDKIELIGNENHGLYLADQYVKGIAKSRKS

SEQ ID NO: 9246 - protein, 1315 aa, Artificial Sequence
  SARS-CoV-2/USA/WI-13/2020__EPI_ISL_417516 spike protein (1-1147)(G889C_L1034C) Ferritin construct
MFVFLVLLPLVSSQCVNLTTRTQLPPAYTNSFTRGVYYPDKVFRSSVLHSTQDLFLPFFSNVTWFHAIHVSGTNGTKRFDNPVLPFNDGVYFASTEKSNIIRGWIFGTTLDSKTQSLLIVNNATNVVIKVCEFQFCNDPFLGVYYHKNNKSWMESEFRVYSSANNCTFEYVSQPFLMDLEGKQGNFKNLREFVFKNIDGYFKIYSKHTPINLVRDLPQGFSALEPLVDLPIGINITRFQTLLALHRSYLTPGDSSSGWTAGAAAYYVGYLQPRTFLLKYNENGTITDAVDCALDPLSETKCTLKSFTVEKGIYQTSNFRVLPTESIVRFPNITNLCPFGEVFNATRFASVYAWNRKRISNCVADYSVLYNSASFSTFKCYGVSPTKLNDLCFTNVYADSFVIRGDEVRQIAPGQTGKIADYNYKLPDDFTGCVIAWNSNNLDSKVGGNYNYLYRLFRKSNLKPFERDISTEIYQAGSTPCNGVEGFNCYFPLQSYGFQPTNGVGYQPYRVVVLSFELLHAPATVCGPKKSTNLVKNKCVNFNFNGLTGTGVLTESNKKFLPFQQFGRDIADTTDAVRDPQTLEILDITPCSFGGVSVITPGTNTSNQVAVLYQGVNCTEVPVAIHADQLTPTWRVYSTGSNVFQTRAGCLIGAEHVNNSYECDIPIGAGICASYQTQTNSPRRARSVASQSIIAYTMSLGAENSVAYSNNSIAIPTNFTISVTTEILPVSMTKTSVDCTMYICGDSTECSNLLLQYGSFCTQLNRALTGIAVEQDKNTQEVFAQVKQIYKTPPIKDFGGFNFSQILPDPSKPSKRSFIEDLLFNKVTLADAGFIKQYGDCLGDIAARDLICAQKFNGLTVLPPLLTDEMIAQYTSALLAGTITSGWTFCAGAALQIPFAMQMAYRFNGIGVTQNVLYENQKLIANQFNSAIGKIQDSLSSTASALGKLQDVVNQNAQALNTLVKQLSSNFGAISSVLNDILSRLDKVEAEVQIDRLITGRLQSLQTYVTQQLIRAAEIRASANLAATKMSECVCGQSKRVDFCGKGYHLMSFPQSAPHGVVFLHVTYVPAQEKNFTTAPAICHDGKAHFPREGVFVSNGTHWFVTQRNFYEPQIITTDNTFVSGNCDVVIGIVNNTVYDPLQPELDSGGGGSDIIKLLNEQVNKEMQSSNLYMSMSSWCYTHSLDGAGLFLFDHAAEEYEHAKKLIIFLNENNVPVQLTSISAPEHKFEGLTQIFQKAYEHEQHISESINNIVDHAIKSKDHATFNFLQWYVAEQHEEEVLFKDILDKIELIGNENHGLYLADQYVKGIAKSRKS

SEQ ID NO: 9247 - protein, 1314 aa, Artificial Sequence
  SARS-CoV-2/India/1-27/2020__EPI_ISL_413522 spike protein (1-1146)(G888C_L1033C) Ferritin construct
MFVFLVLLPLVSSQCVNLTTRTQLPPAYTNSFTRGVYYPDKVFRSSVLHSTQDLFLPFFSNVTWFHAIHVSGTNGTKRFDNPVLPFNDGVYFASTEKSNIIRGWIFGTTLDSKTQSLLIVNNATNVVIKVCEFQFCNDPFLGVYHKNNKSWMESEFRVYSSANNCTFEYVSQPFLMDLEGKQGNFKNLREFVFKNIDGYFKIYSKHTPINLVRDLPQGFSALEPLVDLPIGINITRFQTLLALHRSYLTPGDSSSGWTAGAAAYYVGYLQPRTFLLKYNENGTITDAVDCALDPLSETKCTLKSFTVEKGIYQTSNFRVQPTESIVRFPNITNLCPFGEVFNATRFASVYAWNRKRISNCVADYSVLYNSASFSTFKCYGVSPTKLNDLCFTNVYADSFVIRGDEVIQIAPGQTGKIADYNYKLPDDFTGCVIAWNSNNLDSKVGGNYNYLYRLFRKSNLKPFERDISTEIYQAGSTPCNGVEGFNCYFPLQSYGFQPTNGVGYQPYRVVVLSFELLHAPATVCGPKKSTNLVKNKCVNFNFNGLTGTGVLTESNKKFLPFQQFGRDIADTTDAVRDPQTLEILDITPCSFGGVSVITPGTNTSNQVAVLYQDVNCTEVPVAIHADQLTPTWRVYSTGSNVFQTRAGCLIGAEHVNNSYECDIPIGAGICASYQTQTNSPRRARSVASQSIIAYTMSLGAENSVAYSNNSIAIPTNFTISVTTEILPVSMTKTSVDCTMYICGDSTECSNLLLQYGSFCTQLNRALTGIAVEQDKNTQEVFAQVKQIYKTPPIKDFGGFNFSQILPDPSKPSKRSFIEDLLFNKVTLADAGFIKQYGDCLGDIAARDLICAQKFNGLTVLPPLLTDEMIAQYTSALLAGTITSGWTFCAGAALQIPFAMQMAYRFNGIGVTQNVLYENQKLIANQFNSAIGKIQDSLSSTASALGKLQDVVNQNAQALNTLVKQLSSNFGAISSVLNDILSRLDKVEAEVQIDRLITGRLQSLQTYVTQQLIRAAEIRASANLAATKMSECVCGQSKRVDFCGKGYHLMSFPQSAPHGVVFLHVTYVPAQEKNFTTAPAICHDGKAHFPREGVFVSNGTHWFVTQRNFYEPQIITTDNTFVSGNCDVVIGIVNNTVYDPLQPELDSGGGGSDIIKLLNEQVNKEMQSSNLYMSMSSWCYTHSLDGAGLFLFDHAAEEYEHAKKLIIFLNENNVPVQLTSISAPEHKFEGLTQIFQKAYEHEQHISESINNIVDHAIKSKDHATFNFLQWYVAEQHEEEVLFKDILDKIELIGNENHGLYLADQYVKGIAKSRKS

SEQ ID NO: 9248 - protein, 1309 aa, Artificial Sequence
  SARS-CoV-2/pangolin/Guangxi/P4L/2017__EPI_ISL_410538 spike protein (1-1141)(G883C_L1028C) Ferritin construct
MFVFLFVLPLVSSQCVNLTTRTGIPPGYTNSSTRGVYYPDKVFRSSILHLTQDLFLPFFSNVTWFNTINYQGGFKKFDNPVLPFNDGVYFASTEKSNIIRGWIFGTTLDARTQSLLIVNNATNVVIKVCEFQFCTDPFLGVYYHNNNKTWVENEFRVYSSANNCTFEYISQPFLMDLEGKQGNFKNLREFVFKNVDGYFKIYSKHTPIDLVRDLPRGFAALEPLVDLPIGINITRFQTLLALHRSYLTPGNLESGWTTGAAAYYVGYLQQRTFLLSYNQNGTITDAVDCSLDPLSETKCTLKSLTVEKGIYQTSNFRVQPTISIVRFPNITNLCPFGEVFNASKFASVYAWNRKRISNCVADYSVLYNSTSFSTFKCYGVSPTKLNDLCFTNVYADSFVVKGDEVRQIAPGQTGVIADYNYKLPDDFTGCVIAWNSVKQDALTGGNYGYLYRLFRKSKLKPFERDISTEIYQAGSTPCNGQVGLNCYYPLERYGFHPTTGVNYQPFRVVVLSFELLNGPATVCGPKLSTTLVKDKCVNFNFNGLTGTGVLTTSKKQFLPFQQFGRDISDTTDAVRDPQTLEILDITPCSFGGVSVITPGTNTSNQVAVLYQDVNCTEVPMAIHAEQLTPAWRVYSAGANVFQTRAGCLVGAEHVNNSYECDIPVGAGICASYHSMSSLRSVNQRSIIAYTMSLGAENSVAYSNNSIAIPTNFTISVTTEILPVSMTKTSVDCTMYICGDSIECSNLLLQYGSFCTQLNRALTGIAVEQDKNTQEVFAQVKQIYKTPPIKDFGGFNFSQILPDPSKPSKRSFIEDLLFNKVTLADAGFIKQYGDCLGDIAARDLICAQKFNGLTVLPPLLTDEMIAQYTSALLAGTITSGWTFCAGAALQIPFAMQMAYRFNGIGVTQNVLYENQKLIANQFNSAIGKIQDSLSSTASALGKLQDVVNQNAQALNTLVKQLSSNFGAISSVLNDILSRLDKVEAEVQIDRLITGRLQSLQTYVTQQLIRAAEIRASANLAATKMSECVCGQSKRVDFCGKGYHLMSFPQSAPHGVVFLHVTYVPAQEKNFTTAPAICHEGKAHFPREGVFVSNGTHWFITQRNFYEPQIITTDNTFVSGSCDVVIGIVNNTVYDPLQPELDSGGGGSDIIKLLNEQVNKEMQSSNLYMSMSSWCYTHSLDGAGLFLFDHAAEEYEHAKKLIIFLNENNVPVQLTSISAPEHKFEGLTQIFQKAYEHEQHISESINNIVDHAIKSKDHATFNFLQWYVAEQHEEEVLFKDILDKIELIGNENHGLYLADQYVKGIAKSRKS

SEQ ID NO: 9249 - protein, 1309 aa, Artificial Sequence
  SARS-CoV-2/pangolin/Guangxi/P5L/2017__EPI_ISL_410540 spike protein (1-1141)(G883C_L1028C) Ferritin construct
MFVFLFVLPLVSSQCVNLTTRTGIPPGYTNSSTRGVYYPDKVFRSSILHLTQDLFLPFFSNVTWFNTINYQGGFKKFDNPVLPFNDGVYFASTEKSNIIRGWIFGTTLDARTQSLLIVNNATNVVIKVCEFQFCTDPFLGVYYHNNNKTWVENEFRVYSSANNCTFEYISQPFLMDLEGKQGNFKNLREFVFKNVDGYFKIYSKHTPIDLVRDLPRGFAALEPLVDLPIGINITRFQTLLALHRSYLTPGKLESGWTTGAAAYYVGYLQQRTFLLSYNQNGTITDAVDCSLDPLSETKCTLKSLTVEKGIYQTSNFRVQPTISIVRFPNITNLCPFGEVFNASKFASVYAWNRKRISNCVADYSVLYNSTSFSTFKCYGVSPTKLNDLCFTNVYADSFVVKGDEVRQIAPGQTGVIADYNYKLPDDFTGCVIAWNSVKQDALTGGNYGYLYRLFRKSKLKPFERDISTEIYQAGSTPCNGQVGLNCYYPLERYGFHPTTGVNYQPFRVVVLSFELLNGPATVCGPKLSTTLVKDKCVNFNFNGLTGTGVLTTSKKQFLPFQQFGRDISDTTDAVRDPQTLEILDITPCSFGGVSVITPGTNTSNQVAVLYQDVNCTEVPMAIHAEQLTPAWRVYSAGANVFQTRAGCLVGAEHVNNSYECDIPVGAGICASYHSMSSFRSVNQRSIIAYTMSLGAENSVAYSNNSIAIPTNFTISVTTEILPVSMTKTSVDCTMYICGDSIECSNLLLQYGSFCTQLNRALTGIAVEQDKNTQEVFAQVKQIYKTPPIKDFGGFNFSQILPDPSKPSKRSFIEDLLFNKVTLADAGFIKQYGDCLGDIAARDLICAQKFNGLTVLPPLLTDEMIAQYTSALLAGTITSGWTFCAGAALQIPFAMQMAYRFNGIGVTQNVLYENQKLIANQFNSAIGKIQDSLSSTASALGKLQDVVNQNAQALNTLVKQLSSNFGAISSVLNDILSRLDKVEAEVQIDRLITGRLQSLQTYVTQQLIRAAEIRASANLAATKMSECVCGQSKRVDFCGKGYHLMSFPQSAPHGVVFLHVTYVPAQEKNFTTAPAICHEGKAHFPREGVFVSNGTHWFITQRNFYEPQIITTDNTFVSGSCDVVIGIVNNTVYDPLQPELDSGGGGSDIIKLLNEQVNKEMQSSNLYMSMSSWCYTHSLDGAGLFLFDHAAEEYEHAKKLIIFLNENNVPVQLTSISAPEHKFEGLTQIFQKAYEHEQHISESINNIVDHAIKSKDHATFNFLQWYVAEQHEEEVLFKDILDKIELIGNENHGLYLADQYVKGIAKSRKS

SEQ ID NO: 9250 - protein, 1309 aa, Artificial Sequence
  SARS-CoV-2/pangolin/Guangxi/P5E/2017__EPI_ISL_410541 spike protein (1-1141)(G883C_L1028C) Ferritin construct
MFVFLFVLPLVSSQCVNLTTRTGIPPGYTNSSTRGVYYPDKVFRSSILHLTQDLFLPFFSNVTWFNTITYQGGSKKFDNPVLPFNDGVYFASTEKSNIIRGWIFGTTLDARTQSLLIVNNATNVVIKVCEFQFCTDPFLGVYYHNNNKTWVENEFRVYSSANNCTFEYISQPFLMDLEGKQGNFKNLREFVFKNVDGYFKIYSKHTPIDLVRDLPRGFAALEPLVDLPIGINITRFQTLLALHRSYLTPGKLESGWTTGAAAYYVGYLQQRTFLLSYNQNGTITDAVDCSLDPLSETKCTLKSLTVEKGIYQTSNFRVQPTISIVRFPNITNLCPFGEVFNASKFASVYAWNRKRISNCVADYSVLYNSTSFSTFKCYGVSPTKLNDLCFTNVYADSFVVKGDEVRQIAPGQTGVIADYNYKLPDDFTGCVIAWNSVKQDALTGDNYGYLYRLFRKSKLKPFERDISTEIYQAGSTPCNGQVGLNCYYPLERYGFHPTTGVNYQPFRVVVLSFELLNGPATVCGPKLSTTLVKDKCVNFNFNGLTGTGVLTTSKKQFLPFQQFGRDISDTTDAVRDPQTLEILDITPCSFGGVSVITPGTNTSNQVAVLYQDVNCTEVPMAIHAEQLTPAWRVYSAGANVFQTRAGCLVGAEHVNNSYECDIPVGAGICASYHSMSSFRSVNQRSIIAYTMSLGAENSVAYSNNSIAIPTNFTISVTTEILPVSMTKTSVDCTMYICGDSIECSNLLLQYGSFCTQLNRALTGIAVEQDKNTQEVFAQVKQIYKTPPIKDFGGFNFSQILPDPSKPSKRSFIEDLLFNKVTLADAGFIKQYGDCLGDIAARDLICAQKFNGLTVLPPLLTDEMIAQYTSALLAGTITSGWTFCAGAALQIPFAMQMAYRFNGIGVTQNVLYENQKLIANQFNSAIGKIQDSLSSTASALGKLQDVVNQNAQALNTLVKQLSSNFGAISSVLNDILSRLDKVEAEVQIDRLITGRLQSLQTYVTQQLIRAAEIRASANLAATKMSECVCGQSKRVDFCGKGYHLMSFPQSAPHGVVFLHVTYVPAQEKNFTTAPAICHEGKAHFPREGVFVSNGTHWFITQRNFYEPQIITTDNTFVSGSCDVVIGIVNNTVYDPLQPELDSGGGGSDIIKLLNEQVNKEMQSSNLYMSMSSWCYTHSLDGAGLFLFDHAAEEYEHAKKLIIFLNENNVPVQLTSISAPEHKFEGLTQIFQKAYEHEQHISESINNIVDHAIKSKDHATFNFLQWYVAEQHEEEVLFKDILDKIELIGNENHGLYLADQYVKGIAKSRKS

SEQ ID NO: 9251 - protein, 1307 aa, Artificial Sequence
  SARS-CoV-2/pangolin/Guangxi/P1E/2017__EPI_ISL_410539 spike protein (1-1139)(G881C_L1026C) Ferritin construct
MFVFLFVLPLVSSQCVNLTTRTGIQPGYTNSSTRGVYYPDKVFRSSILHLTQDLFLPFFSNVTWFNTINYQGGFKKFDNPVLPFNDGVYFASTEKSNIIRGWIFGTTLDARTQSLLIVNNATNVVIKVCEFQFCTDPFLGVYYHNNNKTWVENEFRVYSSANNCTFEYISQPFLMDLEGKQGNFKNLREFVFKNVDGYFKIYSKHTPIDLVRDLPRGFAALEPLVDLPIGINITRFQTLLALHRSYLTPGKLESGWTTGAAAYYVGYLQQRTFLLSYNQNGTITDAVDCSLDPLSETKCTLKSLTVEKGIYQTSNFRVQPTISIVRFPNITNLCPFGEVFNASKFASVYAWNRKRISNCVADYSVLYNSTSFSTFKCYGVSPTKLNDLCFTNVYADSFVVKGDEVRQIAPGQTGVIADYNYKLPDDFTGCVIAWNSVKQDALTGGNYLYRLFRKSKLKPFERDISTEIYQAGSTPCNGQVGLNCYYPLERYGFHPTTGVNYQPFRVVVLSFELLNGPATVCGPKLSTTLVKDKCVNFNFNGLTGTGVLTTSKKQFLPFQQFGRDISDTTDAVRDPQTLEILDITPCSFGGVSVITPGTNTSNQVAVLYQDVNCTEVPMAIHAEQLTPAWRVYSAGANVFQTRAGCLVGAEHVNNSYECDIPVGAGICASYHSMSSLRSVNQRSIIAYTMSLGAENSVAYSNNSIAIPTNFTISVTTEILPVSMTKTSVDCTMYICGDSIECSNLLLQYGSFCTQLNRALTGIAVEQDKNTQEVFAQVKQIYKTPPIKDFGGFNFSQILPDPSKPSKRSFIEDLLFNKVTLADAGFIKQYGDCLGDIAARDLICAQKFNGLTVLPPLLTDEMIAQYTSALLAGTITSGWTFCAGAALQIPFAMQMAYRFNGIGVTQNVLYENQKLIANQFNSAIGKIQDSLSSTASALGKLQDVVNQNAQALNTLVKQLSSNFGAISSVLNDILSRLDKVEAEVQIDRLITGRLQSLQTYVTQQLIRAAEIRASANLAATKMSECVCGQSKRVDFCGKGYHLMSFPQSAPHGVVFLHVTYVPAQEKNFTTAPAICHEGKAHFPREGVFVSNGTHWFITQRNFYEPQIITTDNTFVSGSCDVVIGIVNNTVYDPLQPELDSGGGGSDIIKLLNEQVNKEMQSSNLYMSMSSWCYTHSLDGAGLFLFDHAAEEYEHAKKLIIFLNENNVPVQLTSISAPEHKFEGLTQIFQKAYEHEQHISESINNIVDHAIKSKDHATFNFLQWYVAEQHEEEVLFKDILDKIELIGNENHGLYLADQYVKGIAKSRKS

SEQ ID NO: 9252 - protein, 1315 aa, Artificial Sequence
  SARS-CoV-2/Wuhan/WIV05/2019__EPI_ISL_402128 spike protein (1-1147)(I909C_Y1047C) Ferritin construct
MFVFLVLLPLVSSQCVNLTTRTQLPPAYTNSFTRGVYYPDKVFRSSVLHSTQDLFLPFFSNVTWFHAIHVSGTNGTKRFDNPVLPFNDGVYFASTEKSNIIRGWIFGTTLDSKTQSLLIVNNATNVVIKVCEFQFCNDPFLGVYYHKNNKSWMESEFRVYSSANNCTFEYVSQPFLMDLEGKQGNFKNLREFVFKNIDGYFKIYSKHTPINLVRDLPQGFSALEPLVDLPIGINITRFQTLLALHRSYLTPGDSSSGWTAGAAAYYVGYLQPRTFLLKYNENGTITDAVDCALDPLSETKCTLKSFTVEKGIYQTSNFRVQPTESIVRFPNITNLCPFGEVFNATRFASVYAWNRKRISNCVADYSVLYNSASFSTFKCYGVSPTKLNDLCFTNVYADSFVIRGDEVRQIAPGQTGKIADYNYKLPDDFTGCVIAWNSNNLDSKVGGNYNYLYRLFRKSNLKPFERDISTEIYQAGSTPCNGVEGFNCYFPLQSYGFQPTNGVGYQPYRVVVLSFELLHAPATVCGPKKSTNLVKNKCVNFNFNGLTGTGVLTESNKKFLPFQQFGRDIADTTDAVRDPQTLEILDITPCSFGGVSVITPGTNTSNQVAVLYQDVNCTEVPVAIHADQLTPTWRVYSTGSNVFQTRAGCLIGAEHVNNSYECDIPIGAGICASYQTQTNSPRRARSVASQSIIAYTMSLGAENSVAYSNNSIAIPTNFTISVTTEILPVSMTKTSVDCTMYICGDSTECSNLLLQYGSFCTQLNRALTGIAVEQDKNTQEVFAQVKQIYKTPPIKDFGGFNFSQILPDPSKPSKRSFIEDLLFNKVTLADAGFIKQYGDCLGDIAARDLICAQKFNGLTVLPPLLTDEMIAQYTSALLAGTITSGWTFGAGAALQIPFAMQMAYRFNGCGVTQNVLYENQKLIANQFNSAIGKIQDSLSSTASALGKLQDVVNQNAQALNTLVKQLSSNFGAISSVLNDILSRLDKVEAEVQIDRLITGRLQSLQTYVTQQLIRAAEIRASANLAATKMSECVLGQSKRVDFCGKGCHLMSFPQSAPHGVVFLHVTYVPAQEKNFTTAPAICHDGKAHFPREGVFVSNGTHWFVTQRNFYEPQIITTDNTFVSGNCDVVIGIVNNTVYDPLQPELDSGGGGSDIIKLLNEQVNKEMQSSNLYMSMSSWCYTHSLDGAGLFLFDHAAEEYEHAKKLIIFLNENNVPVQLTSISAPEHKFEGLTQIFQKAYEHEQHISESINNIVDHAIKSKDHATFNFLQWYVAEQHEEEVLFKDILDKIELIGNENHGLYLADQYVKGIAKSRKS

SEQ ID NO: 9253 - protein, 1311 aa, Artificial Sequence
  SARS-CoV-2/bat/Yunnan/RaTG13/2013__EPI_ISL_402131 spike protein (1-1143)(I905C_Y1043C) Ferritin construct
MFVFLVLLPLVSSQCVNLTTRTQLPPAYTNSSTRGVYYPDKVFRSSVLHLTQDLFLPFFSNVTWFHAIHVSGTNGIKRFDNPVLPFNDGVYFASTEKSNIIRGWIFGTTLDSKTQSLLIVNNATNVVIKVCEFQFCNDPFLGVYYHKNNKSWMESEFRVYSSANNCTFEYVSQPFLMDLEGKQGNFKNLREFVFKNIDGYFKIYSKHTPINLVRDLPPGFSALEPLVDLPIGINITRFQTLLALHRSYLTPGDSSSGWTAGAAAYYVGYLQPRTFLLKYNENGTITDAVDCALDPLSETKCTLKSFTVEKGIYQTSNFRVQPTDSIVRFPNITNLCPFGEVFNATTFASVYAWNRKRISNCVADYSVLYNSTSFSTFKCYGVSPTKLNDLCFTNVYADSFVITGDEVRQIAPGQTGKIADYNYKLPDDFTGCVIAWNSKHIDAKEGGNFNYLYRLFRKANLKPFERDISTEIYQAGSKPCNGQTGLNCYYPLYRYGFYPTDGVGHQPYRVVVLSFELLNAPATVCGPKKSTNLVKNKCVNFNFNGLTGTGVLTESNKKFLPFQQFGRDIADTTDAVRDPQTLEILDITPCSFGGVSVITPGTNASNQVAVLYQDVNCTEVPVAIHADQLTPTWRVYSTGSNVFQTRAGCLIGAEHVNNSYECDIPIGAGICASYQTQTNSRSVASQSIIAYTMSLGAENSVAYSNNSIAIPTNFTISVTTEILPVSMTKTSVDCTMYICGDSTECSNLLLQYGSFCTQLNRALTGIAVEQDKNTQEVFAQVKQIYKTPPIKDFGGFNFSQILPDPSKPSKRSFIEDLLFNKVTLADAGFIKQYGDCLGDIAARDLICAQKFNGLTVLPPLLTDEMIAQYTSALLAGTITSGWTFGAGAALQIPFAMQMAYRFNGCGVTQNVLYENQKLIANQFNSAIGKIQDSLSSTASALGKLQDVVNQNAQALNTLVKQLSSNFGAISSVLNDILSRLDKVEAEVQIDRLITGRLQSLQTYVTQQLIRAAEIRASANLAATKMSECVLGQSKRVDFCGKGCHLMSFPQSAPHGVVFLHVTYVPAQEKNFTTAPAICHDGKAHFPREGVFVSNGTHWFVTQRNFYEPQIITTDNTFVSGSCDVVIGIVNNTVYDPLQPELDSGGGGSDIIKLLNEQVNKEMQSSNLYMSMSSWCYTHSLDGAGLFLFDHAAEEYEHAKKLIIFLNENNVPVQLTSISAPEHKFEGLTQIFQKAYEHEQHISESINNIVDHAIKSKDHATFNFLQWYVAEQHEEEVLFKDILDKIELIGNENHGLYLADQYVKGIAKSRKS

SEQ ID NO: 9254 - protein, 1315 aa, Artificial Sequence
  SARS-CoV-2/Wuhan/HBCDC-HB-01/2019__EPI_ISL_402132 spike protein (1-1147)(I909C_Y1047C) Ferritin construct
MFVFLVLLPLVSSQCVNLTTRTQLPPAYTNSITRGVYYPDKVFRSSVLHSTQDLFLPFFSNVTWFHAIHVSGTNGTKRFDNPVLPFNDGVYFASTEKSNIIRGWIFGTTLDSKTQSLLIVNNATNVVIKVCEFQFCNDPFLGVYYHKNNKSWMESEFRVYSSANNCTFEYVSQPFLMDLEGKQGNFKNLREFVFKNIDGYFKIYSKHTPINLVRDLPQGFSALEPLVDLPIGINITRFQTLLALHRSYLTPGDSSSGWTAGAAAYYVGYLQPRTFLLKYNENGTITDAVDCALDPLSETKCTLKSFTVEKGIYQTSNFRVQPTESIVRFPNITNLCPFGEVFNATRFASVYAWNRKRISNCVADYSVLYNSASFSTFKCYGVSPTKLNDLCFTNVYADSFVIRGDEVRQIAPGQTGKIADYNYKLPDDFTGCVIAWNSNNLDSKVGGNYNYLYRLFRKSNLKPFERDISTEIYQAGSTPCNGVEGFNCYFPLQSYGFQPTNGVGYQPYRVVVLSFELLHAPATVCGPKKSTNLVKNKCVNFNFNGLTGTGVLTESNKKFLPFQQFGRDIADTTDAVRDPQTLEILDITPCSFGGVSVITPGTNTSNQVAVLYQDVNCTEVPVAIHADQLTPTWRVYSTGSNVFQTRAGCLIGAEHVNNSYECDIPIGAGICASYQTQTNSPRRARSVASQSIIAYTMSLGAENSVAYSNNSIAIPTNFTISVTTEILPVSMTKTSVDCTMYICGDSTECSNLLLQYGSFCTQLNRALTGIAVEQDKNTQEVFAQVKQIYKTPPIKDFGGFNFSQILPDPSKPSKRSFIEDLLFNKVTLADAGFIKQYGDCLGDIAARDLICAQKFNGLTVLPPLLTDEMIAQYTSALLAGTITSGWTFGAGAALQIPFAMQMAYRFNGCGVTQNVLYENQKLIANQFNSAIGKIQDSLSSTASALGKLQDVVNQNAQALNTLVKQLSSNFGAISSVLNDILSRLDKVEAEVQIDRLITGRLQSLQTYVTQQLIRAAEIRASANLAATKMSECVLGQSKRVDFCGKGCHLMSFPQSAPHGVVFLHVTYVPAQEKNFTTAPAICHDGKAHFPREGVFVSNGTHWFVTQRNFYEPQIITTDNTFVSGNCDVVIGIVNNTVYDPLQPELDSGGGGSDIIKLLNEQVNKEMQSSNLYMSMSSWCYTHSLDGAGLFLFDHAAEEYEHAKKLIIFLNENNVPVQLTSISAPEHKFEGLTQIFQKAYEHEQHISESINNIVDHAIKSKDHATFNFLQWYVAEQHEEEVLFKDILDKIELIGNENHGLYLADQYVKGIAKSRKS

SEQ ID NO: 9255 - protein, 1315 aa, Artificial Sequence
  SARS-CoV-2/Guangdong/20SF028/2020__EPI_ISL_403936 spike protein (1-1147)(I909C_Y1047C) Ferritin construct
MFVFLVLLPLVSSQCVNLTTRTQLPPAYTNSFTRGVYYPDKVFRSSVLYSTQDLFLPFFSNVTWFHAIHVSGTNGTKRFDNPVLPFNDGVYFASTEKSNIIRGWIFGTTLDSKTQSLLIVNNATNVVIKVCEFQFCNDPFLGVYYHKNNKSWMESEFRVYSSANNCTFEYVSQPFLMDLEGKQGNFKNLREFVFKNIDGYFKIYSKHTPINLVRDLPQGFSALEPLVDLPIGINITRFQTLLALHRSYLTPGDSSSGWTAGAAAYYVGYLQPRTFLLKYNENGTITDAVDCALDPLSETKCTLKSFTVEKGIYQTSNFRVQPTESIVRFPNITNLCPFGEVFNATRFASVYAWNRKRISNCVADYSVLYNSASFSTFKCYGVSPTKLNDLCFTNVYADSFVIRGDEVRQIAPGQTGKIADYNYKLPDDFTGCVIAWNSNNLDSKVGGNYNYLYRLFRKSNLKPFERDISTEIYQAGSTPCNGVEGFNCYFPLQSYGFQPTNGVGYQPYRVVVLSFELLHAPATVCGPKKSTNLVKNKCVNFNFNGLTGTGVLTESNKKFLPFQQFGRDIADTTDAVRDPQTLEILDITPCSFGGVSVITPGTNTSNQVAVLYQDVNCTEVPVAIHADQLTPTWRVYSTGSNVFQTRAGCLIGAEHVNNSYECDIPIGAGICASYQTQTNSPRRARSVASQSIIAYTMSLGAENSVAYSNNSIAIPTNFTISVTTEILPVSMTKTSVDCTMYICGDSTECSNLLLQYGSFCTQLNRALTGIAVEQDKNTQEVFAQVKQIYKTPPIKDFGGFNFSQILPDPSKPSKRSFIEDLLFNKVTLADAGFIKQYGDCLGDIAARDLICAQKFNGLTVLPPLLTDEMIAQYTSALLAGTITSGWTFGAGAALQIPFAMQMAYRFNGCGVTQNVLYENQKLIANQFNSAIGKIQDSLSSTASALGKLQDVVNQNAQALNTLVKQLSSNFGAISSVLNDILSRLDKVEAEVQIDRLITGRLQSLQTYVTQQLIRAAEIRASANLAATKMSECVLGQSKRVDFCGKGCHLMSFPQSAPHGVVFLHVTYVPAQEKNFTTAPAICHDGKAHFPREGVFVSNGTHWFVTQRNFYEPQIITTDNTFVSGNCDVVIGIVNNTVYDPLQPELDSGGGGSDIIKLLNEQVNKEMQSSNLYMSMSSWCYTHSLDGAGLFLFDHAAEEYEHAKKLIIFLNENNVPVQLTSISAPEHKFEGLTQIFQKAYEHEQHISESINNIVDHAIKSKDHATFNFLQWYVAEQHEEEVLFKDILDKIELIGNENHGLYLADQYVKGIAKSRKS

SEQ ID NO: 9256 - protein, 1315 aa, Artificial Sequence
  SARS-CoV-2/Shenzhen/SZTH-001/2020__EPI_ISL_406592 spike protein (1-1147)(I909C_Y1047C) Ferritin construct
MFVFLVLLPLVSSQCVNLTTRTQLPPAYTNSFTRGVYYPDKVFRSSVLHSTQDLFLPFFSNVTWFHAIHVSGTNGTKRFDNPVLPFNDGVYFASTEKSNIIRGWIFGTTLDSKTQSLLIVNNATNVVIKVCEFQFCNDPFLGVYYHKNNKSWMESEFRVYSSANNCTFEYVSQPFLMDLEGKQGNFKNLREFVFKNIDGYFKIYSKHTPINLVRDLPQGFSALEPLVDLPIGINITRFQTLLALHRSYLTPGDSSSGWTAGAAAYYVGYLQPRTFLLKYNENGTITDAVDCALDPLSETKCTLKSFTVEKGIYQTSNFRVQPTESIVRFPNITNLCPFGEVFNATRFASVYAWNRKRISNCVADYSVLYNSASFSTFKCYGVSPTKLNDLCFTNVYADSFVIRGDEVRQIAPGQTGKIADYNYKLPDDFTGCVIAWNSNNLDSKVGGNYNYLYRLFRKSNLKPFERDISTEIYQAGSTPCNGVEGFNCYFPLQSYGFQPTNGVGYQPYRVVVLSFELLHAPATVCGPKKSTNLVKNKCVNFNFNGLTGTGVLTESNKKFLPFQQFGRDIADTTDAVRDPQTLEILDITPCSFGGVSVITPGTNTSNQVAVLYQDVNCTEVPVAIHADQLTPTWRVYSTGSNVFQTRAGCLIGAEHVNNSYECDIPIGAGICASYQTQTNSPRRARSVASQSIIAYTMSLGAENSVAYSNNSIAIPTNFTISVTTEILPVSMTKTSVDCTMYICGDSTECSNLLLQYGSFCTQLNRALTGIAVEQDKNTQEVFAQVKQIYKTPPIKDFGGFNFSQILPDPSKPSKRSFIEDLLFNKVTLADAGFIKQYGDCLGDIAARDLICAQKFNGLTVLPPLLTDEMIAQYTSALLAGTITSGWTFGAGAALQIPFAMQMAYRFNGCGVTQNVLYENQKLIANQFNSAIGKIQDSLSSTASALGKLQDVVNQNAQALNTLVKQLSSNFGAISSVLNDILSRLDKVEAEVQIDRLITGRLQSLQTYVTQQLIRAAEIRASANLAATKMSECVLGQSKRVDFCGKGCHLMSFPQSAPHGVVFLHVTYVPAQEKNFTTAPAICHDGKAHFPREGVFVSNGTHWFVTQRNFYEPQIITTDNTFVSGNCDVLIGIVNNTVYDPLQPELDSGGGGSDIIKLLNEQVNKEMQSSNLYMSMSSWCYTHSLDGAGLFLFDHAAEEYEHAKKLIIFLNENNVPVQLTSISAPEHKFEGLTQIFQKAYEHEQHISESINNIVDHAIKSKDHATFNFLQWYVAEQHEEEVLFKDILDKIELIGNENHGLYLADQYVKGIAKSRKS

SEQ ID NO: 9257 - protein, 1315 aa, Artificial Sequence
  SARS-CoV-2/Shenzhen/SZTH-004/2020__EPI_ISL_406595 spike protein (1-1147)(I909C_Y1047C) Ferritin construct
MFVFLVLLPLVSSQCVNLTTRTQLPPAYTNSFTRGVYYPDKVFRSSVLHSTQDLFLPFFSNVTWFHAIHVSGTNGTKRFDNPVLPFNDGVYFASTEKSNIIRGWIFGTTLDSKTQSLLIVNNATNVVIKVCEFQFCNDPFLGVYYHKNNKSWMESEFRVYSSANNCTFEYVSQPFLMDLEGKQGNFKNLREFVFKNIDGYFKIYSKHTPINLVRDLPQGFSALEPLVDLPIGINITRFQTLLALHRSYLTPGDSSSGWTAGAAAYYVGYLQPRTFLLKYNENGTITDAVDCALDPLSETKCTLKSFTVEKGIYQTSNFRVQPTESIVRFPNITNLCPFGEVFNATRFASVYAWDRKRISNCVAYYSVLYNSASFSTFKCYGVSPTKLNDLCFTNVYADSFVIRGDEVRQIAPGQTGKIADYNYKLPDDFTGCVIAWNSNNLDSKVGGNYNYLYRLFRKSNLKPFERDISTEIYQAGSTPCNGVEGFNCYFPLQSYGFQPTNGVGYQPYRVVVLSFELLHAPATVCGPKKSTNLVKNKCVNFNFNGLTGTGVLTESNKKFLPFQQFGRDIADTTDAVRDPQTLEILDITPCSFGGVSVITPGTNTSNQVAVLYQDVNCTEVPVAIHADQLTPTWRVYSTGSNVFQTRAGCLIGAEHVNNSYECDIPIGAGICASYQTQTNSPRRARSVASQSIIAYTMSLGAENSVAYSNNSIAIPTNFTISVTTEILPVSMTKTSVDCTMYICGDSTECSNLLLQYGSFCTQLNRALTGIAVEQDKNTQEVFAQVKQIYKTPPIKDFGGFNFSQILPDPSKPSKRSFIEDLLFNKVTLADAGFIKQYGDCLGDIAARDLICAQKFNGLTVLPPLLTDEMIAQYTSALLAGTITSGWTFGAGAALQIPFAMQMAYRFNGCGVTQNVLYENQKLIANQFNSAIGKIQDSLSSTASALGKLQDVVNQNAQALNTLVKQLSSNFGAISSVLNDILSRLDKVEAEVQIDRLITGRLQSLQTYVTQQLIRAAEIRASANLAATKMSECVLGQSKRVDFCGKGCHLMSFPQSAPHGVVFLHVTYVPAQEKNFTTAPAICHDGKAHFPREGVFVSNGTHWFVTQRNFYEPQIITTDNTFVSGNCDVVIGIVNNTVYDPLQPELDSGGGGSDIIKLLNEQVNKEMQSSNLYMSMSSWCYTHSLDGAGLFLFDHAAEEYEHAKKLIIFLNENNVPVQLTSISAPEHKFEGLTQIFQKAYEHEQHISESINNIVDHAIKSKDHATFNFLQWYVAEQHEEEVLFKDILDKIELIGNENHGLYLADQYVKGIAKSRKS

SEQ ID NO: 9258 - protein, 1315 aa, Artificial Sequence
  SARS-CoV-2/France/IDF0372/2020__EPI_ISL_406596 spike protein (1-1147)(I909C_Y1047C) Ferritin construct
MFVFLVLLPLVSSQCVNLTTRTQLPPAYTNSFTRGVYYPDKVFRSSVLHSTQDLFLPFFSNVTWFHAIHVSGTNGTKRFDNPVLPFNDGVYFASTEKSNIIRGWIFGTTLDSKTQSLLIVNNATNVVIKVCEFQFCNDPFLGVYYHKNNKSWMESEFRVYSSANNCTFEYVSQPFLMDLEGKQGNFKNLREFVFKNIDGYFKIYSKHTPINLVRDLPQGFSALEPLVDLPIGINITRFQTLLALHRSYLTPGDSSSGWTAGAAAYYVGYLQPRTFLLKYNENGTITDAVDCALDPLSETKCTLKSFTVEKGIYQTSNFRVQPTESIVRFPNITNLCPFGEVFNATRFASVYAWNRKRISNCVADYSFLYNSASFSTFKCYGVSPTKLNDLCFTNVYADSFVIRGDEVRQIAPGQTGKIADYNYKLPDDFTGCVIAWNSNNLDSKVGGNYNYLYRLFRKSNLKPFERDISTEIYQAGSTPCNGVEGFNCYFPLQSYGFQPTNGVGYQPYRVVVLSFELLHAPATVCGPKKSTNLVKNKCVNFNFNGLTGTGVLTESNKKFLPFQQFGRDIADTTDAVRDPQTLEILDITPCSFGGVSVITPGTNTSNQVAVLYQDVNCTEVPVAIHADQLTPTWRVYSTGSNVFQTRAGCLIGAEHVNNSYECDIPIGAGICASYQTQTNSPRRARSVASQSIIAYTMSLGAENSVAYSNNSIAIPTNFTISVTTEILPVSMTKTSVDCTMYICGDSTECSNLLLQYGSFCTQLNRALTGIAVEQDKNTQEVFAQVKQIYKTPPIKDFGGFNFSQILPDPSKPSKRSFIEDLLFNKVTLADAGFIKQYGDCLGDIAARDLICAQKFNGLTVLPPLLTDEMIAQYTSALLAGTITSGWTFGAGAALQIPFAMQMAYRFNGCGVTQNVLYENQKLIANQFNSAIGKIQDSLSSTASALGKLQDVVNQNAQALNTLVKQLSSNFGAISSVLNDILSRLDKVEAEVQIDRLITGRLQSLQTYVTQQLIRAAEIRASANLAATKMSECVLGQSKRVDFCGKGCHLMSFPQSAPHGVVFLHVTYVPAQEKNFTTAPAICHDGKAHFPREGVFVSNGTHWFVTQRNFYEPQIITTDNTFVSGNCDVVIGIVNNTVYDPLQPELDSGGGGSDIIKLLNEQVNKEMQSSNLYMSMSSWCYTHSLDGAGLFLFDHAAEEYEHAKKLIIFLNENNVPVQLTSISAPEHKFEGLTQIFQKAYEHEQHISESINNIVDHAIKSKDHATFNFLQWYVAEQHEEEVLFKDILDKIELIGNENHGLYLADQYVKGIAKSRKS

SEQ ID NO: 9259 - protein, 1315 aa, Artificial Sequence
  SARS-CoV-2/Australia/VIC01/2020__EPI_ISL_406844 spike protein (1-1147)(I909C_Y1047C) Ferritin construct
MFVFLVLLPLVSSQCVNLTTRTQLPPAYTNSFTRGVYYPDKVFRSSVLHSTQDLFLPFFSNVTWFHAIHVSGTNGTKRFDNPVLPFNDGVYFASTEKSNIIRGWIFGTTLDSKTQSLLIVNNATNVVIKVCEFQFCNDPFLGVYYHKNNKSWMESEFRVYSSANNCTFEYVSQPFLMDLEGKQGNFKNLREFVFKNIDGYFKIYSKHTPINLVRDLPQGFSALEPLVDLPIGINITRFQTLLALHRRYLTPGDSSSGWTAGAAAYYVGYLQPRTFLLKYNENGTITDAVDCALDPLSETKCTLKSFTVEKGIYQTSNFRVQPTESIVRFPNITNLCPFGEVFNATRFASVYAWNRKRISNCVADYSVLYNSASFSTFKCYGVSPTKLNDLCFTNVYADSFVIRGDEVRQIAPGQTGKIADYNYKLPDDFTGCVIAWNSNNLDSKVGGNYNYLYRLFRKSNLKPFERDISTEIYQAGSTPCNGVEGFNCYFPLQSYGFQPTNGVGYQPYRVVVLSFELLHAPATVCGPKKSTNLVKNKCVNFNFNGLTGTGVLTESNKKFLPFQQFGRDIADTTDAVRDPQTLEILDITPCSFGGVSVITPGTNTSNQVAVLYQDVNCTEVPVAIHADQLTPTWRVYSTGSNVFQTRAGCLIGAEHVNNSYECDIPIGAGICASYQTQTNSPRRARSVASQSIIAYTMSLGAENSVAYSNNSIAIPTNFTISVTTEILPVSMTKTSVDCTMYICGDSTECSNLLLQYGSFCTQLNRALTGIAVEQDKNTQEVFAQVKQIYKTPPIKDFGGFNFSQILPDPSKPSKRSFIEDLLFNKVTLADAGFIKQYGDCLGDIAARDLICAQKFNGLTVLPPLLTDEMIAQYTSALLAGTITSGWTFGAGAALQIPFAMQMAYRFNGCGVTQNVLYENQKLIANQFNSAIGKIQDSLSSTASALGKLQDVVNQNAQALNTLVKQLSSNFGAISSVLNDILSRLDKVEAEVQIDRLITGRLQSLQTYVTQQLIRAAEIRASANLAATKMSECVLGQSKRVDFCGKGCHLMSFPQSAPHGVVFLHVTYVPAQEKNFTTAPAICHDGKAHFPREGVFVSNGTHWFVTQRNFYEPQIITTDNTFVSGNCDVVIGIVNNTVYDPLQPELDSGGGGSDIIKLLNEQVNKEMQSSNLYMSMSSWCYTHSLDGAGLFLFDHAAEEYEHAKKLIIFLNENNVPVQLTSISAPEHKFEGLTQIFQKAYEHEQHISESINNIVDHAIKSKDHATFNFLQWYVAEQHEEEVLFKDILDKIELIGNENHGLYLADQYVKGIAKSRKS

SEQ ID NO: 9260 - protein, 1315 aa, Artificial Sequence
  SARS-CoV-2/Germany/BavPat1/2020__EPI_ISL_406862 spike protein (1-1147)(I909C_Y1047C) Ferritin construct
MFVFLVLLPLVSSQCVNLTTRTQLPPAYTNSFTRGVYYPDKVFRSSVLHSTQDLFLPFFSNVTWFHAIHVSGTNGTKRFDNPVLPFNDGVYFASTEKSNIIRGWIFGTTLDSKTQSLLIVNNATNVVIKVCEFQFCNDPFLGVYYHKNNKSWMESEFRVYSSANNCTFEYVSQPFLMDLEGKQGNFKNLREFVFKNIDGYFKIYSKHTPINLVRDLPQGFSALEPLVDLPIGINITRFQTLLALHRSYLTPGDSSSGWTAGAAAYYVGYLQPRTFLLKYNENGTITDAVDCALDPLSETKCTLKSFTVEKGIYQTSNFRVQPTESIVRFPNITNLCPFGEVFNATRFASVYAWNRKRISNCVADYSVLYNSASFSTFKCYGVSPTKLNDLCFTNVYADSFVIRGDEVRQIAPGQTGKIADYNYKLPDDFTGCVIAWNSNNLDSKVGGNYNYLYRLFRKSNLKPFERDISTEIYQAGSTPCNGVEGFNCYFPLQSYGFQPTNGVGYQPYRVVVLSFELLHAPATVCGPKKSTNLVKNKCVNFNFNGLTGTGVLTESNKKFLPFQQFGRDIADTTDAVRDPQTLEILDITPCSFGGVSVITPGTNTSNQVAVLYQGVNCTEVPVAIHADQLTPTWRVYSTGSNVFQTRAGCLIGAEHVNNSYECDIPIGAGICASYQTQTNSPRRARSVASQSIIAYTMSLGAENSVAYSNNSIAIPTNFTISVTTEILPVSMTKTSVDCTMYICGDSTECSNLLLQYGSFCTQLNRALTGIAVEQDKNTQEVFAQVKQIYKTPPIKDFGGFNFSQILPDPSKPSKRSFIEDLLFNKVTLADAGFIKQYGDCLGDIAARDLICAQKFNGLTVLPPLLTDEMIAQYTSALLAGTITSGWTFGAGAALQIPFAMQMAYRFNGCGVTQNVLYENQKLIANQFNSAIGKIQDSLSSTASALGKLQDVVNQNAQALNTLVKQLSSNFGAISSVLNDILSRLDKVEAEVQIDRLITGRLQSLQTYVTQQLIRAAEIRASANLAATKMSECVLGQSKRVDFCGKGCHLMSFPQSAPHGVVFLHVTYVPAQEKNFTTAPAICHDGKAHFPREGVFVSNGTHWFVTQRNFYEPQIITTDNTFVSGNCDVVIGIVNNTVYDPLQPELDSGGGGSDIIKLLNEQVNKEMQSSNLYMSMSSWCYTHSLDGAGLFLFDHAAEEYEHAKKLIIFLNENNVPVQLTSISAPEHKFEGLTQIFQKAYEHEQHISESINNIVDHAIKSKDHATFNFLQWYVAEQHEEEVLFKDILDKIELIGNENHGLYLADQYVKGIAKSRKS

SEQ ID NO: 9261 - protein, 1315 aa, Artificial Sequence
  SARS-CoV-2/Wuhan/HBCDC-HB-02/2020__EPI_ISL_412978 spike protein (1-1147)(I909C_Y1047C) Ferritin construct
MFVFLVLLPLVSSQCVNLTTRTQLPPAYTNSFTRGVYYPDKVFRSSVLHSTQDLFLPFFSNVTWFHAIHVSGTNGTKRFDNPVLPFNDGVYFASTEKSNIIRGWIFGTTLDSKTQSLLIVNNATNVVIKVCEFQFCNDPFLGVYYHKNNKSWMESEFRVYSSANNCTFEYVSQPFLMDLEGKQGNFKNLREFVFKNIDGYFKIYSKHTPINLVRDLPQGFSALEPLVDLPIGINITRFQTLLALHRSYLTPGDSSSGWTAGAAAYYVGYLQPRTFLLKYNENGTITDAVDCALDPLSETKCTLKSFTVEKGIYQTSNFRVQPTESIVRFPNITNLCPFGEVFNATRFASVYAWNRKRISNCVADYSVLYNSASFSTFKCYGVSPTKLNDLCFTNVYADSFVIRGDEVRQIAPGQTGKIADYNYKLPDDFTGCVIAWNSNNLDSKVGGNYNYLYRLFRKSNLKPFERDISTEIYQAGSTPCNGVEGFNCYFPLQSYGFQPTNGVGYQPYRVVVLSFELLHAPATVCGPKKSTNLVKNKCVNFNFNGLTGTGVLTESNKKFLPFQQFGRDIADTTDAVRDPQTLEILDITPCSFGGVSVITPGTNTSNQVAVLYQDVNCTEVPVAIHADQLTPTWRVYSTGSNVFQTRAGCLIGAEHVNNSYECDIPIGAGICASYQTQTNSPRRARSVASQSIIAYTMSLGAENSVAYSNNSIAIPTNFTISVTTEILPVSMTKTSVDCTMYICGDSTECSNFLLQYGSFCTQLNRALTGIAVEQDKNTQEVFAQVKQIYKTPPIKDFGGFNFSQILPDPSKPSKRSFIEDLLFNKVTLADAGFIKQYGDCLGDIAARDLICAQKFNGLTVLPPLLTDEMIAQYTSALLAGTITSGWTFGAGAALQIPFAMQMAYRFNGCGVTQNVLYENQKLIANQFNSAIGKIQDSLSSTASALGKLQDVVNQNAQALNTLVKQLSSNFGAISSVLNDILSRLDKVEAEVQIDRLITGRLQSLQTYVTQQLIRAAEIRASANLAATKMSECVLGQSKRVDFCGKGCHLMSFPQSAPHGVVFLHVTYVPAQEKNFTTAPAICHDGKAHFPREGVFVSNGTHWFVTQRNFYEPQIITTDNTFVSGNCDVVIGIVNNTVYDPLQPELDSGGGGSDIIKLLNEQVNKEMQSSNLYMSMSSWCYTHSLDGAGLFLFDHAAEEYEHAKKLIIFLNENNVPVQLTSISAPEHKFEGLTQIFQKAYEHEQHISESINNIVDHAIKSKDHATFNFLQWYVAEQHEEEVLFKDILDKIELIGNENHGLYLADQYVKGIAKSRKS

SEQ ID NO: 9262 - protein, 1315 aa, Artificial Sequence
  SARS-CoV-2/Australia/QLD02/2020__EPI_ISL_407896 spike protein (1-1147)(I909C_Y1047C) Ferritin construct
MFVFLVLLPLVSSQCVNLTTRTQLPPAYTNSFTRGVYYPDKVFRSSVLHSTQDLFLPFFSNVTWFHAIHVSGTNGTKRFDNPVLPFNDGVYFASTEKSNIIRGWIFGTTLDSKTQSLLIVNNATNVVIKVCEFQFCNDPFLGVYYHKNNKSWMESEFRVYSSANNCTFEYVSQPFLMDLEGKQGNFKNLREFVFKNIDGYFKIYSKHTPINLVRDLPQGFSALEPLVDLPIGINITRFQTLLALHRSYLTPGDSSSGWTAGAAAYYVGYLQPRTFLLKYNENGTITDAVDCALDPLSETKCTLKSFTVEKGIYQTSNFRVQPTESIVRFPNITNLCPFGEVFNATRFASVYAWNRKRISNCVADYSVLYNSASFSTFKCYGVSPTKLNDLCFTNVYADSFVIRGDEVRQIAPGQTGKIADYNYKLPDDFTGCVIAWNSNNLDSKVGGNYNYLYRLFRKSNLKPFERDISTEIYQAGSTPCNGVEGFNCYFPLQSYGFQPTNGVGYQPYRVVVLSFELLHAPATVCGPKKSTNLVKNKCVNFNFNGLTGTGVLTESNKKFLPFQQFGRDIADTTDAVRDPQTLEILDITPCSFGGVSVITPGTNTSNQVAVLYQDVNCTEVPVAIHADQLTPTWRVYSTGSNVFQTRAGCLIGAEHVNNSYECDIPIGAGICASYQTQTNSPRRARSVASQSIIAYTMSLGAENSVAYSNNSIAIPTNFTISVTTEILPVSMTKTSVDCTMYICGDSTECSNLLLQYGSFCTQLNRALTGIAVEQDKNTQEVFAQVKQIYKTPPIKDFGGFNFSQILPDPSKPSKRSFIEDLLFNKVTLADAGFIKQYGDCLGDIAARDLICAQKFNGLTVLPPLLTDEMIAQYTSALLAGTITSGWTFGAGAALQIPFAMQMAYRFNGCGVTQNVLYENQKLIANQFNSAIGKIQDSLSSTASALGKLQDVVNQNAQALNTLVKQLSSNFGAISSVLNDILSRLDKVEAEVQIDRLITGRLQSLQTYVTQQLIRAAEIRASANLAATKMSECVLGQSKRVDFCGKGCHLMSFPQSAPHGVVFLHVTYVPAQEKNFTTAPAICHDGKAHFPREGVFVSNGTHWFVTQRNFYEPQIITTDNTFVSGNCDVVIGIVNNTVYDPLQLELDSGGGGSDIIKLLNEQVNKEMQSSNLYMSMSSWCYTHSLDGAGLFLFDHAAEEYEHAKKLIIFLNENNVPVQLTSISAPEHKFEGLTQIFQKAYEHEQHISESINNIVDHAIKSKDHATFNFLQWYVAEQHEEEVLFKDILDKIELIGNENHGLYLADQYVKGIAKSRKS

SEQ ID NO: 9263 - protein, 1315 aa, Artificial Sequence
  SARS-CoV-2/India/1-31/2020__EPI_ISL_413523 spike protein (1-1147)(I909C_Y1047C) Ferritin construct
MFVFLVLLPLVSSQCVNLTTRTQLPPAYTNSFTRGVYYPDKVFRSSVLHSTQDLFLPFFSNVTWFHAIHVSGTNGTKRFDNPVLPFNDGVYFASTEKSNIIRGWIFGTTLDSKTQSLLIVNNATNVVIKVCEFQFCNDPFLGVYYHKNNKSWMESEFRVYSSANNCTFEYVSQPFLMDLEGKQGNFKNLREFVFKNIDGYFKIYSKHTPINLVRDLPQGFSALEPLVDLPIGINITRFQTLLALHRSYLTPGDSSSGWTAGAAAYYVGYLQPRTFLLKYNENGTITDAVDCALDPLSETKCTLKSFTVEKGIYQTSNFRVQPTESIVRFPNITNLCPFGEVFNATRFASVYAWNRKRISNCVADYSVLYNSASFSTFKCYGVSPTKLNDLCFTNVYADSFVIRGDEVRQIAPGQTGKIADYNYKLPDDFTGCVIAWNSNNLDSKVGGNYNYLYRLFRKSNLKPFERDISTEIYQAGSTPCNGVEGFNCYFPLQSYGFQPTNGVGYQPYRVVVLSFELLHAPATVCGPKKSTNLVKNKCVNFNFNGLTGTGVLTESNKKFLPFQQFGRDIADTTDAVRDPQTLEILDITPCSFGGVSVITPGTNTSNQVAVLYQDVNCTEVPVAIHADQLTPTWRVYSTGSNVFQTRAGCLIGAEHVNNSYECDIPIGAGICASYQTQTNSPRRARSVASQSIIAYTMSLGAENSVAYSNNSIAIPTNFTISVTTEILPVSMTKTSVDCTMYICGDSTECSNLLLQYGSFCTQLNRALTGIAVEQDKNTQEVFAQVKQIYKTPPIKDFGGFNFSQILPDPSKPSKRSFIEDLLFNKVTLADAGFIKQYGDCLGDIAARDLICAQKFNGLTVLPPLLTDEMIAQYTSALLAGTITSGWTFGAGAALQIPFAMQMAYRFNGCGVTQNVLYENQKLIANQFNSVIGKIQDSLSSTASALGKLQDVVNQNAQALNTLVKQLSSNFGAISSVLNDILSRLDKVEAEVQIDRLITGRLQSLQTYVTQQLIRAAEIRASANLAATKMSECVLGQSKRVDFCGKGCHLMSFPQSAPHGVVFLHVTYVPAQEKNFTTAPAICHDGKAHFPREGVFVSNGTHWFVTQRNFYEPQIITTDNTFVSGNCDVVIGIVNNTVYDPLQPELDSGGGGSDIIKLLNEQVNKEMQSSNLYMSMSSWCYTHSLDGAGLFLFDHAAEEYEHAKKLIIFLNENNVPVQLTSISAPEHKFEGLTQIFQKAYEHEQHISESINNIVDHAIKSKDHATFNFLQWYVAEQHEEEVLFKDILDKIELIGNENHGLYLADQYVKGIAKSRKS

SEQ ID NO: 9264 - protein, 1315 aa, Artificial Sequence
  SARS-CoV-2/Guangdong/GD2020087-P0008/2020__EPI_ISL_413863 spike protein (1-1147)(I909C_Y1047C) Ferritin construct
MFVFLVLLPLVSSQCVNLTTRTQLPPAYTNSFTRGVYYPDKVFRSSVLHSTQDLFLPFFSNVTWFHAIHVSGTNGTKRFDNPVLPFNDGVYFASTEKSNIIRGWIFGTTLDSKTQSLLIVNNATNVVIKVCEFQFCNDPFLGVYYHKNNKSWMESEFRVYSSANNCTFEYVSQPFLMDLEGKQGNFKNLREFVFKNIDGYFKIYSKHTPINLVRDLPQGFSALEPLVDLPIGINITRFQTLLALHRSYLTPGDSSSGWTAGAAAYYVGYLQPRTFLLKYNENGTITDAVDCALDPLSETKCTLKSFTVEKGIYQTSNFRVQPTESIVRFPNITNLCPFGEVFNATRFASVYAWNRKRISNCVADYSVLYNSASFSTFKCYGVSPTKLNDLCFTNVYADSFVIRGDEVREIAPGQTGKIADYNYKLPDDFTGCVIAWNSNNLDSKVGGNYNYLYRLFRKSNLKPFERDISTEIYQAGSTPCNGVEGFNCYFPLQSYGFQPTNGVGYQPYRVVVLSFELLHAPATVCGPKKSTNLVKNKCVNFNFNGLTGTGVLTESNKKFLPFQQFGRDIADTTDAVRDPQTLEILDITPCSFGGVSVITPGTNTSNQVAVLYQDVNCTEVPVAIHADQLTPTWRVYSTGSNVFQTRAGCLIGAEHVNNSYECDIPIGAGICASYQTQTNSPRRARSVASQSIIAYTMSLGAENSVAYSNNSIAIPTNFTISVTTEILPVSMTKTSVDCTMYICGDSTECSNLLLQYGSFCTQLNRALTGIAVEQDKNTQEVFAQVKQIYKTPPIKDFGGFNFSQILPDPSKPSKRSFIEDLLFNKVTLADAGFIKQYGDCLGDIAARDLICAQKFNGLTVLPPLLTDEMIAQYTSALLAGTITSGWTFGAGAALQIPFAMQMAYRFNGCGVTQNVLYENQKLIANQFNSAIGKIQDSLSSTASALGKLQDVVNQNAQALNTLVKQLSSNFGAISSVLNDILSRLDKVEAEVQIDRLITGRLQSLQTYVTQQLIRAAEIRASANLAATKMSECVLGQSKRVDFCGKGCHLMSFPQSAPHGVVFLHVTYVPAQEKNFTTAPAICHDGKAHFPREGVFVSNGTHWFVTQRNFYEPQIITTDNTFVSGNCDVVIGIVNNTVYDPLQPELDSGGGGSDIIKLLNEQVNKEMQSSNLYMSMSSWCYTHSLDGAGLFLFDHAAEEYEHAKKLIIFLNENNVPVQLTSISAPEHKFEGLTQIFQKAYEHEQHISESINNIVDHAIKSKDHATFNFLQWYVAEQHEEEVLFKDILDKIELIGNENHGLYLADQYVKGIAKSRKS

SEQ ID NO: 9265 - protein, 1315 aa, Artificial Sequence
  SARS-CoV-2/Sweden/01/2020__EPI_ISL_411951 spike protein (1-1147)(I909C_Y1047C) Ferritin construct
MFVFLVLLPLVSSQCVNLTTRTQLPPAYTNSFTRGVYYPDKVFRSSVLHSTQDLFLPFFSNVTWFHAIHVSGTNGTKRFDNPVLPFNDGVYFASTEKSNIIRGWIFGTTLDSKTQSLLIVNNATNVVIKVCEFQFCNDPFLGVYYHKNNKSWMESEFRVYSSANNCTFEYVSQPFLMDLEGKQGNFKNLREFVFKNIDGYFKIYSKHTPINLVRDLPQGFSALEPLVDLPIGINITRFQTLLALHRSYLTPGDSSSGWTAGAAAYYVGYLQPRTFLLKYNENGTITDAVDCALDPLSETKCTLKSFTVEKGIYQTSNFRVQPTESIVRFPNITNLCPFGEVFNATRFASVYAWNRKRISNCVADYSVLYNSASFSTFKCYGVSPTKLNDLCFTNVYADSFVIRGDEVRQIAPGQTGKIADYNYKLPDDFTGCVIAWNSNNLDSKVGGNYNYLYRLFRKSNLKPFERDISTEIYQAGSTPCNGVEGFNCYFPLQSYGFQPTNGVGYQPYRVVVLSFELLHAPATVCGPKKSTNLVKNKCVNFNFNGLTGTGVLTESNKKFLPFQQFGRDIADTTDAVRDPQTLEILDITPCSFGGVSVITPGTNTSNQVAVLYQDVNCTEVPVAIHADQLTPTWRVYSTGSNVFQTRAGCLIGAEHVNNSYECDIPIGAGICASYQTQTNSPRRARSVASQSIIAYTMSLGAENSVAYSNNSIAIPTNFTISVTTEILPVSMTKTSVDCTMYICGDSTECSNLLLQYGSFCTQLNRALTGIAVEQDKNTQEVFAQVKQIYKTPPIKDCGGFNFSQILPDPSKPSKRSFIEDLLFNKVTLADAGFIKQYGDCLGDIAARDLICAQKFNGLTVLPPLLTDEMIAQYTSALLAGTITSGWTFGAGAALQIPFAMQMAYRFNGCGVTQNVLYENQKLIANQFNSAIGKIQDSLSSTASALGKLQDVVNQNAQALNTLVKQLSSNFGAISSVLNDILSRLDKVEAEVQIDRLITGRLQSLQTYVTQQLIRAAEIRASANLAATKMSECVLGQSKRVDFCGKGCHLMSFPQSAPHGVVFLHVTYVPAQEKNFTTAPAICHDGKAHFPREGVFVSNGTHWFVTQRNFYEPQIITTDNTFVSGNCDVVIGIVNNTVYDPLQPELDSGGGGSDIIKLLNEQVNKEMQSSNLYMSMSSWCYTHSLDGAGLFLFDHAAEEYEHAKKLIIFLNENNVPVQLTSISAPEHKFEGLTQIFQKAYEHEQHISESINNIVDHAIKSKDHATFNFLQWYVAEQHEEEVLFKDILDKIELIGNENHGLYLADQYVKGIAKSRKS

SEQ ID NO: 9266 - protein, 1315 aa, Artificial Sequence
  SARS-CoV-2/Tianmen/HBCDC-HB-07/2020__EPI_ISL_412983 spike protein (1-1147)(I909C_Y1047C) Ferritin construct
MFVFLVLLPLVSSQCVNLTTRTQLPPAYTNSFTRGVYYPDKVFRSSVLHSTQDLFLPFFSNVTWFHAIHVSGTNGTKRFDNPVLPFNDGVYFASTEKSNIIRGWIFGTTLDSKTQSLLIVNNATNVVIKVCEFQFCNDPFLGVYYHKNNKSWMESEFRVYSSANNCTFEYVSQPFLMDLEGKQGNFKNLREFVFKNIDGYFKIYSKHTPINLVRDLPQGFSALEPLVDLPIGINITRFQTLLALHRSYLTPGDSSSGWTAGAAAYYVGYLQPRTFLLKYNENGTITDAVDCALDPLSETKCTLKSFTVEKGIYQTSNFRVQPTESIVRFPNITNLCPFGEVFNATRFASVYAWNRKRISNCVADYSVLYNSASFSTFKCYGVSPTKLNDLCFTNVYADSFVIRGDEVRQIAPGQTGKIADYNYKLPDDFTGCVIAWNSNNLDSKVGGNYNYLYRLFRKSNLKPFERDISTEIYQAGSTPCNGVEGFNCYFPLQSYGFQPTNGVGYQPYRVVVLSFELLHAPATVCGPKKSTNLVKNKCVNFNFNGLTGTGVLTESNKKFLPFQQFGRDIADTTDAVRDPQTLEILDITPCSFGGVSVITPGTNTSNQVAVLYQDLNCTEVPVAIHADQLTPTWRVYSTGSNVFQTRAGCLIGAEHVNNSYECDIPIGAGICASYQTQTNSPRRARSVASQSIIAYTMSLGAENSVAYSNNSIAIPTNFTISVTTEILPVSMTKTSVDCTMYICGDSTECSNLLLQYGSFCTQLNRALTGIAVEQDKNTQEVFAQVKQIYKTPPIKDFGGFNFSQILPDPSKPSKRSFIEDLLFNKVTLADAGFIKQYGDCLGDIAARDLICAQKFNGLTVLPPLLTDEMIAQYTSALLAGTITSGWTFGAGAALQIPFAMQMAYRFNGCGVTQNVLYENQKLIANQFNSAIGKIQDSLSSTASALGKLQDVVNQNAQALNTLVKQLSSNFGAISSVLNDILSRLDKVEAEVQIDRLITGRLQSLQTYVTQQLIRAAEIRASANLAATKMSECVLGQSKRVDFCGKGCHLMSFPQSAPHGVVFLHVTYVPAQEKNFTTAPAICHDGKAHFPREGVFVSNGTHWFVTQRNFYEPQIITTDNTFVSGNCDVVIGIVNNTVYDPLQPELDSGGGGSDIIKLLNEQVNKEMQSSNLYMSMSSWCYTHSLDGAGLFLFDHAAEEYEHAKKLIIFLNENNVPVQLTSISAPEHKFEGLTQIFQKAYEHEQHISESINNIVDHAIKSKDHATFNFLQWYVAEQHEEEVLFKDILDKIELIGNENHGLYLADQYVKGIAKSRKS

SEQ ID NO: 9267 - protein, 1315 aa, Artificial Sequence
  SARS-CoV-2/Hong Kong/case42_VM20002493/2020__EPI_ISL_414527 spike protein (1-1147)(I909C_Y1047C) Ferritin construct
MFVFLVLLPLVSSQCVNLTTRTQLPPAYTNSFTRGVYYPDKVFRSSVLHSTQDLFLPFFSNVTWFHAIHVSGTNGTKRFDNPVLPFNDGVYFASTEKSNIIRGWIFGTTLDSKTQSLLIVNNATNVVIKVCEFQFCNDPFLGVYYHKNNKSWMESEFRVYSSANNCTFEYVSQPFLMDLEGKQGNFKNLREFVFKNIDGYFKIYSKHTPINLVRDLPQGFSALEPLVDLPIGINITRFQTLLALHRSYLTPGDSSSGWTAGAAAYYVGYLQPRTFLLKYNENGTITDAVDCALDPLSETKCTLKSFTVEKGIYQTSNFRVQPTESIVRFPNITNLCPFGEVFNATRFASVYAWNRKRISNCVADYSVLYNSASFSTFKCYGVSPTKLNDLCFTNVYADSFVIRGDEVRQIAPGQTGKIADYNYKLPDDFTGCVIAWNSNNLDSKVGGNYNYLYRLFRKSNLKPFERDISTEIYQAGSTPCNGVEGFNCYFPLQSYGFQPTNGVGYQPYRVVVLSFELLHAPATVCGPKKSTNLVKNKCVNFNFNGLTGTGVLTESNKKFLPFQQFGRDIADTTDAVRDPQTLEILDITPCSFGGVSVITPGTNTSNQVAVLYQDVNCTEVPVAIHADQLTPTWRVYSTGSNVFQTRAGCLIGAEHVNNSYECDIPIGAGICASYQTQTNSPRRARSVASQSIIAYTMSLGAENSVAYSNNSIAIPTNFAISVTTEILPVSMTKTSVDCTMYICGDSTECSNLLLQYGSFCTQLNRALTGIAVEQDKNTQEVFAQVKQIYKTPPIKDFGGFNFSQILPDPSKPSKRSFIEDLLFNKVTLADAGFIKQYGDCLGDIAARDLICAQKFNGLTVLPPLLTDEMIAQYTSALLAGTITSGWTFGAGAALQIPFAMQMAYRFNGCGVTQNVLYENQKLIANQFNSAIGKIQDSLSSTASALGKLQDVVNQNAQALNTLVKQLSSNFGAISSVLNDILSRLDKVEAEVQIDRLITGRLQSLQTYVTQQLIRAAEIRASANLAATKMSECVLGQSKRVDFCGKGCHLMSFPQSAPHGVVFLHVTYVPAQEKNFTTAPAICHDGKAHFPREGVFVSNGTHWFVTQRNFYEPQIITTDNTFVSGNCDVVIGIVNNTVYDPLQPELDSGGGGSDIIKLLNEQVNKEMQSSNLYMSMSSWCYTHSLDGAGLFLFDHAAEEYEHAKKLIIFLNENNVPVQLTSISAPEHKFEGLTQIFQKAYEHEQHISESINNIVDHAIKSKDHATFNFLQWYVAEQHEEEVLFKDILDKIELIGNENHGLYLADQYVKGIAKSRKS

SEQ ID NO: 9268 - protein, 1315 aa, Artificial Sequence
  SARS-CoV-2/USA/CruiseA-23/2020__EPI_ISL_414482 spike protein (1-1147)(I909C_Y1047C) Ferritin construct
MFVFLVLLPLVSSQCVNLTTRTQLPPAYTNSFTRGVYYPDKVFRSSVLHSTQDLFLPFFSNVTWFHAIHVSGTNGTKRFDNPVLPFNDGVYFASTEKSNIIRGWIFGTTLDSKTQSLLIVNNATNVVIKVCEFQFCNDPFLGVYYHKNNKSWMESEFRVYSSANNCTFEYVSQPFLMDLEVKQGNFKNLREFVFKNIDGYFKIYSKHTPINLVRDLPQGFSALEPLVDLPIGINITRFQTLLALHRSYLTPGDSSSGWTAGAAAYYVGYLQPRTFLLKYNENGTITDAVDCALDPLSETKCTLKSFTVEKGIYQTSNFRVQPTESIVRFPNITNLCPFGEVFNATRFASVYAWNRKRISNCVADYSVLYNSASFSTFKCYGVSPTKLNDLCFTNVYADSFVIRGDEVRQIAPGQTGKIADYNYKLPDDFTGCVIAWNSNNLDSKVGGNYNYLYRLFRKSNLKPFERDISTEIYQAGSTPCNGVEGFNCYFPLQSYGFQPTNGVGYQPYRVVVLSFELLHAPATVCGPKKSTNLVKNKCVNFNFNGLTGTGVLTESNKKFLPFQQFGRDIADTTDAVRDPQTLEILDITPCSFGGVSVITPGTNTSNQVAVLYQDVNCTEVPVAIHADQLTPTWRVYSTGSNVFQTRAGCLIGAEHVNNSYECDIPIGAGICASYQTQTNSPRRARSVASQSIIAYTMSLGAENSVAYSNNSIAIPTNFTISVTTEILPVSMTKTSVDCTMYICGDSTECSNLLLQYGSFCTQLNRALTGIAVEQDKNTQEVFAQVKQIYKTPPIKDFGGFNFSQILPDPSKPSKRSFIEDLLFNKVTLADAGFIKQYGDCLGDIAARDLICAQKFNGLTVLPPLLTDEMIAQYTSALLAGTITSGWTFGAGAALQIPFAMQMAYRFNGCGVTQNVLYENQKLIANQFNSAIGKIQDSLSSTASALGKLQDVVNQNAQALNTLVKQLSSNFGAISSVLNDILSRLDKVEAEVQIDRLITGRLQSLQTYVTQQLIRAAEIRASANLAATKMSECVLGQSKRVDFCGKGCHLMSFPQSAPHGVVFLHVTYVPAQEKNFTTAPAICHDGKAHFPREGVFVSNGTHWFVTQRNFYEPQIITTDNTFVSGNCDVVIGIVNNTVYDPLQPELDSGGGGSDIIKLLNEQVNKEMQSSNLYMSMSSWCYTHSLDGAGLFLFDHAAEEYEHAKKLIIFLNENNVPVQLTSISAPEHKFEGLTQIFQKAYEHEQHISESINNIVDHAIKSKDHATFNFLQWYVAEQHEEEVLFKDILDKIELIGNENHGLYLADQYVKGIAKSRKS

SEQ ID NO: 9269 - protein, 1315 aa, Artificial Sequence
  SARS-CoV-2/Hong Kong/case85_VM20002868/2020__EPI_ISL_414519 spike protein (1-1147)(I909C_Y1047C) Ferritin construct
MFVFLVLVPLVSSQCVNLTTRTQLPPAYTNSFTRGVYYPDKVFRSSVLHSTQDLFLPFFSNVTWFHAIHVSGTNGTKRFDNPVLPFNDGVYFASTEKSNIIRGWIFGTTLDSKTQSLLIVNNATNVVIKVCEFQFCNDPFLGVYYHKNNKSWMESEFRVYSSANNCTFEYVSQPFLMDLEGKQGNFKNLREFVFKNIDGYFKIYSKHTPINLVRDLPQGFSALEPLVDLPIGINITRFQTLLALHRSYLTPGDSSSGWTAGAAAYYVGYLQPRTFLLKYNENGTITDAVDCALDPLSETKCTLKSFTVEKGIYQTSNFRVQPTESIVRFPNITNLCPFGEVFNATRFASVYAWNRKRISNCVADYSVLYNSASFSTFKCYGVSPTKLNDLCFTNVYADSFVIRGDEVRQIAPGQTGKIADYNYKLPDDFTGCVIAWNSNNLDSKVGGNYNYLYRLFRKSNLKPFERDISTEIYQAGSTPCNGVEGFNCYFPLQSYGFQPTNGVGYQPYRVVVLSFELLHAPATVCGPKKSTNLVKNKCVNFNFNGLTGTGVLTESNKKFLPFQQFGRDIADTTDAVRDPQTLEILDITPCSFGGVSVITPGTNTSNQVAVLYQDVNCTEVPVAIHADQLTPTWRVYSTGSNVFQTRAGCLIGAEHVNNSYECDIPIGAGICASYQTQTNSPRRARSVASQSIIAYTMSLGAENSVAYSNNSIAIPTNFTISVTTEILPVSMTKTSVDCTMYICGDSTECSNLLLQYGSFCTQLNRALTGIAVEQDKNTQEVFAQVKQIYKTPPIKDFGGFNFSQILPDPSKPSKRSFIEDLLFNKVTLADAGFIKQYGDCLGDIAARDLICAQKFNGLTVLPPLLTDEMIAQYTSALLAGTITSGWTFGAGAALQIPFAMQMAYRFNGCGVTQNVLYENQKLIANQFNSAIGKIQDSLSSTASALGKLQDVVNQNAQALNTLVKQLSSNFGAISSVLNDILSRLDKVEAEVQIDRLITGRLQSLQTYVTQQLIRAAEIRASANLAATKMSECVLGQSKRVDFCGKGCHLMSFPQSAPHGVVFLHVTYVPAQEKNFTTAPAICHDGKAHFPREGVFVSNGTHWFVTQRNFYEPQIITTDNTFVSGNCDVVIGIVNNTVYDPLQPELDSGGGGSDIIKLLNEQVNKEMQSSNLYMSMSSWCYTHSLDGAGLFLFDHAAEEYEHAKKLIIFLNENNVPVQLTSISAPEHKFEGLTQIFQKAYEHEQHISESINNIVDHAIKSKDHATFNFLQWYVAEQHEEEVLFKDILDKIELIGNENHGLYLADQYVKGIAKSRKS

SEQ ID NO: 9270 - protein, 1315 aa, Artificial Sequence; identical to SEQ ID NO: 9260
  SARS-CoV-2/England/200990660/2020__EPI_ISL_414523 spike protein (1-1147)(I909C_Y1047C) Ferritin construct

SEQ ID NO: 9271 - protein, 1315 aa, Artificial Sequence
  SARS-CoV-2/Australia/NSW09/2020__EPI_ISL_413595 spike protein (1-1147)(I909C_Y1047C) Ferritin construct
MFVFLVLLPLVSSQCVNLTTRTQLPPAYTNSFTRGVYYPDKVFRSSVLHSTQDLFLPFFSNVTWFHAIHVSGTNGTKRFDNPVLPFNDGVYFASTEKSNIIRGWIFGTTLDSKTQSLLIVNNATNVVIKVCEFQFCNDPFLGVYYHKNNKSWMESEFRVYSSANNCTFEYVSQPFLMDLEGKQGNFKNLREFVFKNIDGYFKIYSKHTPINLVRDLPQGFSALEPLVDLPIGINITRFQTLLALHRSYLTPGDSSSGWTAGAAAYYVGYLQPRTFLLKYNENGTITDAVDCALDPLSETKCTLKSFTVEKGIYQTSNFRVQPTESIVRFPNITNLCPFGEVFNATRFASVYAWNRKRISNCVADYSVLYNSASFSTFKCYGVSPTKLNDLCFTNVYADSFVIRGDEVRQIAPGQTGKIADYNYKLPDDFTGCVIAWNSNNLDSKVGGNYNYLYRLFRKSNLKPFERDISTEIYQAGSTPCNGVEGFNCYFPLQSYGFQPTNGVGYQPYRVVVLSFELLHAPATVCGPKKSTNLVKNKCVNFNFNGLTGTGVLTESNKKFLPFQQFGRDIADTTDAVRDPQTLEILDITPCSFGGVSVITPGTNTSNQVAVLYQDVNCTEVPVAIHADQLTPTWRVYSTGSNVFQTRAGCLIGAEHVNNSYECDIPIGAGICASYQTQTNSPRRARSVASQSIIAYTMSLGAENSVAYSNNSIAIPTNFTISVTTEILPVSMTKTSVDCTMYICGDSTECSNLLLQYGSFCTQLNRALTGIAVEQDKNTQEVFAQVKQIYKTPPIKDFGGFNFSQILPDPSKPSKRSFIEDLLFNKVTLADAGFIKQYGDCLGDIAARDLICAQKFNGLTVLPPLLTDEMIAQYTSALLAGTITSGWTFGAGAALQIPFAMQMAYRFNGCGVTQNVLYENQKLIANQFNSAIGKIQDSLSFTASALGKLQDVVNQNAQALNTLVKQLSSNFGAISSVLNDILSRLDKVEAEVQIDRLITGRLQSLQTYVTQQLIRAAEIRASANLAATKMSECVLGQSKRVDFCGKGCHLMSFPQSAPHGVVFLHVTYVPAQEKNFTTAPAICHDGKAHFPREGVFVSNGTHWFVTQRNFYEPQIITTDNTFVSGNCDVVIGIVNNTVYDPLQPELDSGGGGSDIIKLLNEQVNKEMQSSNLYMSMSSWCYTHSLDGAGLFLFDHAAEEYEHAKKLIIFLNENNVPVQLTSISAPEHKFEGLTQIFQKAYEHEQHISESINNIVDHAIKSKDHATFNFLQWYVAEQHEEEVLFKDILDKIELIGNENHGLYLADQYVKGIAKSRKS

SEQ ID NO: 9272 - protein, 1315 aa, Artificial Sequence; identical to SEQ ID NO: 9252
  SARS-CoV-2/Australia/NSW10/2020__EPI_ISL_413596 spike protein (1-1147)(I909C_Y1047C) Ferritin construct

SEQ ID NO: 9273 - protein, 1315 aa, Artificial Sequence
  SARS-CoV-2/Switzerland/1000477797/2020__EPI_ISL_413023 spike protein (1-1147)(I909C_Y1047C) Ferritin construct
MFVFLVLLPLVSSQCVNLTTRTQLPPAYTNSFTRGVYYPDKVFRSSVLHSTQDLFLPFFSNVTWFHAIHVSGTNGTKRFDNPVLPFNDGVYFASTEKSNIIRGWIFGTTLDSKTQSLLIVNNATNVVIKVCEFQFCNDPFLGVYYHKNNKSWMESEFRVYSSANNCTFEYVSQPFLMDLEGKQGNFKNLREFVFKNIDGYFNIYSKHTPINLVRDLPQGFSALEPLVDLPIGINITRFQTLLALHRSYLTPGDSSSGWTAGAAAYYVGYLQPRTFLLKYNENGTITDAVDCALDPLSETKCTLKSFTVEKGIYQTSNFRVQPTESIVRFPNITNLCPFGEVFNATRFASVYAWNRKRISNCVADYSVLYNSASFSTFKCYGVSPTKLNDLCFTNVYADSFVIRGDEVRQIAPGQTGKIADYNYKLPDDFTGCVIAWNSNNLDSKVGGNYNYLYRLFRKSNLKPFERDISTEIYQAGSTPCNGVEGFNCYFPLQSYGFQPTNGVGYQPYRVVVLSFELLHAPATVCGPKKSTNLVKNKCVNFNFNGLTGTGVLTESNKKFLPFQQFGRDIADTTDAVRDPQTLEILDITPCSFGGVSVITPGTNTSNQVAVLYQGVNCTEVPVAIHADQLTPTWRVYSTGSNVFQTRAGCLIGAEHVNNSYECDIPIGAGICASYQTQTNSPRRARSVASQSIIAYTMSLGAENSVAYSNNSIAIPTNFTISVTTEILPVSMTKTSVDCTMYICGDSTECSNLLLQYGSFCTQLNRALTGIAVEQDKNTQEVFAQVKQIYKTPPIKDFGGFNFSQILPDPSKPSKRSFIEDLLFNKVTLADAGFIKQYGDCLGDIAARDLICAQKFNGLTVLPPLLTDEMIAQYTSALLAGTITSGWTFGAGAALQIPFAMQMAYRFNGCGVTQNVLYENQKLIANQFNSAIGKIQDSLSSTASALGKLQDVVNQNAQALNTLVKQLSSNFGAISSVLNDILSRLDKVEAEVQIDRLITGRLQSLQTYVTQQLIRAAEIRASANLAATKMSECVLGQSKRVDFCGKGCHLMSFPQSAPHGVVFLHVTYVPAQEKNFTTAPAICHDGKAHFPREGVFVSNGTHWFVTQRNFYEPQIITTDNTFVSGNCDVVIGIVNNTVYDPLQPELDSGGGGSDIIKLLNEQVNKEMQSSNLYMSMSSWCYTHSLDGAGLFLFDHAAEEYEHAKKLIIFLNENNVPVQLTSISAPEHKFEGLTQIFQKAYEHEQHISESINNIVDHAIKSKDHATFNFLQWYVAEQHEEEVLFKDILDKIELIGNENHGLYLADQYVKGIAKSRKS

SEQ ID NO: 9274 - protein, 1315 aa, Artificial Sequence
  SARS-CoV-2/Belgium/BA-02291/2020__EPI_ISL_415159 spike protein (1-1147)(I909C_Y1047C) Ferritin construct
MFVFLVLLPLVSSQCVNLTTRTQLPPAYTNSFTRGVYYPDKVFRSSVLHSTQDLFLPFFSNVTWFHAIHVSGTNGTKRFDNPVLPFNDGVYFASTEKSNIIRGWIFGTTLDSKTQSLLIVNNATNVVIKVCEFQFCNDPFLGVYYHKNNKSWMESEFRVYSSANNCTFEYVSQPFLMDLEGKQGNFKNLREFVFKNIDGYFKIYSKHTPINLVRDLPQGFSALEPLVDLPIGINITRFQTLLALHRSYLTPGDSSSGWTAGAAAYYVGYLQPRTFLLKYNENGTITDAVDCALDPLSETKCTLKSFTVEKGIYQTSNFRVQPTESIVRFPNITNLCPFGEVFNATRFASVYAWNRKRISNCVADYSVLYNSASFSTFKCYGVSPTKLNDLCFTNVYADSFVIRGDEVRQIAPGQTGKIADYNYKLPDDFTGCVIAWNSNNLDSKVGGNYNYLYRLFRRSNLKPFERDISTEIYQAGSTPCNGVEGFNCYFPLQSYGFQPTNGVGYQPYRVVVLSFELLPAPATVCGPKKSTNLVKNKCVNFNFNGLTGTGVLTESNKKFLPFQQFGRDIADTTDAVRDPQTLEILDITPCSFGGVSVITPGTNTSNQVAVLYQGVNCTEVPVAIHADQLTPTWRVYSTGSNVFQTRAGCLIGAEHVNNSYECDIPIGAGICASYQTQTNSPRRARSVASQSIIAYTMSLGAENSVAYSNNSIAIPTNFTISVTTEILPVSMTKTSVDCTMYICGDSTECSNLLLQYGSFCTQLNRALTGIAVEQDKNTQEVFAQVKQIYKTPPIKDFGGFNFSQILPDPSKPSKRSFIEDLLFNKVTLADAGFIKQYGDCLGDIAARDLICAQKFNGLTVLPPLLTDEMIAQYTSALLAGTITSGWTFGAGAALQIPFAMQMAYRFNGCGVTQNVLYENQKLIANQFNSAIGKIQDSLSSAAPALGKLQDVVNQNAQALNTLVKQLSSNFGAISSVLNDILSRLDKVEAEVQIDRLITGRLQSLQTYVTQQLIRAAEIRASANLAATKMSECVLGQSKRVDFCGKGCHLMSFPQSAPHGVVFLHVTYVPAQEKNFTTAPAICHDGKAHFPREGVFVSNGTHWFVTQRNFYEPQIITTDNTFVSGNCDVVIGIVNNTVYDPLQPELDSGGGGSDIIKLLNEQVNKEMQSSNLYMSMSSWCYTHSLDGAGLFLFDHAAEEYEHAKKLIIFLNENNVPVQLTSISAPEHKFEGLTQIFQKAYEHEQHISESINNIVDHAIKSKDHATFNFLQWYVAEQHEEEVLFKDILDKIELIGNENHGLYLADQYVKGIAKSRKS

SEQ ID NO: 9275 - protein, 1315 aa, Artificial Sequence
  SARS-CoV-2/USA/WA8-UW5/2020__EPI_ISL_413486 spike protein (1-1147)(I909C_Y1047C) Ferritin construct
MFVFLVLLPLVSSQCVNLTTRTQLPPAYTNSFTRGVYYPDKVFRSSVLHSTQDLFLPFFSNVTWFHAIHVSGTNGTKRFDNPVLPFNDGVYFASTEKSNIIRGWIFGTTLDSKTQSLLIVNNATNVVIKVCEFQFCNDPFLGVYYHKNNKSWMESEFRVYSSANNCTFEYVSQPFLMDLEGKQGNFKNLREFVFKNIDGYFKIYSKHTPINLVRDLPQGFSALEPLVDLPIGINITRFQTLLALHRSYLTPGDSSSGWTAGAAAYYVGYLQPRTFLLKYNENGTITDAVDCALDPLSETKCTLKSFTVEKGIYQTSNFRVQPTESIVRFPNITNLCPFGEVFNATRFASVYAWNRKRISNCVADYSVLYNSASFSTFKCYGVSPTKLNDLCFTNVYADSFVIRGDEVRQIAPGQTGKIADYNYKLPDDFTGCVIAWNSNNLDSKVGGNYNYLYRLFRKSNLKPFERDISTEIYQAGSTPCNGVEGFNCYFPLQSYGFQPTNGVGYQPYRVVVLSFELLHAPATVCGPKKSTNLVKNKCVNFNFNGLTGTGVLTESNKKFLPFQQFGRDIADTTDAVRDPQTLEILDITPCSFGGVSVITPGTNTSNQVAVLYQDVNCTEVPVAIHADQLTPTWRVYSTGSNVFQTRAGCLIGAEYVNNSYECDIPIGAGICASYQTQTNSPRRARSVASQSIIAYTMSLGAENSVAYSNNSIAIPTNFTISVTTEILPVSMTKTSVDCTMYICGDSTECSNLLLQYGSFCTQLNRALTGIAVEQDKNTQEVFAQVKQIYKTPPIKDFGGFNFSQILPDPSKPSKRSFIEDLLFNKVTLADAGFIKQYGDCLGDIAARDLICAQKFNGLTVLPPLLTDEMIAQYTSALLAGTITSGWTFGAGAALQIPFAMQMAYRFNGCGVTQNVLYENQKLIANQFNSAIGKIQDSLSSTASALGKLQDVVNQNAQALNTLVKQLSSNFGAISSVLNDILSRLDKVEAEVQIDRLITGRLQSLQTYVTQQLIRAAEIRASANLAATKMSECVLGQSKRVDFCGKGCHLMSFPQSAPHGVVFLHVTYVPAQEKNFTTAPAICHDGKAHFPREGVFVSNGTHWFVTQRNFYEPQIITTDNTFVSGNCDVVIGIVNNTVYDPLQPELDSGGGGSDIIKLLNEQVNKEMQSSNLYMSMSSWCYTHSLDGAGLFLFDHAAEEYEHAKKLIIFLNENNVPVQLTSISAPEHKFEGLTQIFQKAYEHEQHISESINNIVDHAIKSKDHATFNFLQWYVAEQHEEEVLFKDILDKIELIGNENHGLYLADQYVKGIAKSRKS

SEQ ID NO: 9276 - protein, 1315 aa, Artificial Sequence
  SARS-CoV-2/England/20102000506/2020__EPI_ISL_415147 spike protein (1-1147)(I909C_Y1047C) Ferritin construct
MFVFLVLLPLVSSQCVNLTTRTQLPPAYTNSFTRGVYYPDKVFRSSVLHSTQDLFLPFFSNVTWFHAIHVSGTNGTKRFDNPVLPFNDGVYFASTEKSNIIRGWIFGTTLDSKTQSLLIVNNATNVVIKVCEFQFCNDPFLGVYYHKNNKSWMESEFRVYSSANNCTFEYVSQPFLMDLEGKQGNFKNLREFVFKNIDGYFKIYSKHTPINLVRDLPQGFSALEPLVDLPIGINITRFQTLLALHRSYLTPGDSSSGWTAGAAAYYVGYLQPRTFLLKYNENGTITDAVDCALDPLSETKCTLKSFTVEKGIYQTSNFRVQPTESIVRFPNITNLCPFGEVFNATRFASVYAWNRKRISNCVADYSVLYNSASFSTFKCYGVSPTKLNDLCFTNVYADSFVIRGDEVRQIAPGQTGKIADYNYKLPDDFTGCVIAWNSNNLDSKVGGNYNYLYRLFRKSNLKPFERDISTEIYQAGSTPCNGVEGFNCYFPLQSYGFQPTNGVGYQPYRVVVLSFELLHAPATVCGPKKSTNLVKNKCVNFNFNGLTGTGVLTESNKKFLPFQQFGRDIADTTDAVRDPQTLEILDITPCSFGGVSVITPGTNTSNQVAVLYQGVNCTEVPVAIHADQLTPTWRVYSTGSNVFQTRAGCLIGAEHVNNSYECDIPIGAGICASYQTQTNSPRRARSVASQSIIAYTMSLGAENSVAYSNNSIAIPTNFTISVTTEILPVSMTKTSVDCTMYICGDSTECSNLLLQYGSFCTQLNRALTGIAVEQDKNTQEVFAQVKQIYKTPPIKDFGGFNFSQILPDPSKPSKRSFIEDLLFNKVTLADAGFIKQYGYCLGDIAARDLICAQKFNGLTVLPPLLTDEMIAQYTSALLAGTITSGWTFGAGAALQIPFAMQMAYRFNGCGVTQNVLYENQKLIANQFNSAIGKIQDSLSSTASALGKLQDVVNQNAQALNTLVKQLSSNFGAISSVLNDILSRLDKVEAEVQIDRLITGRLQSLQTYVTQQLIRAAEIRASANLAATKMSECVLGQSKRVDFCGKGCHLMSFPQSAPHGVVFLHVTYVPAQEKNFTTAPAICHDGKAHFPREGVFVSNGTHWFVTQRNFYEPQIITTDNTFVSGNCDVVIGIVNNTVYDPLQPELDSGGGGSDIIKLLNEQVNKEMQSSNLYMSMSSWCYTHSLDGAGLFLFDHAAEEYEHAKKLIIFLNENNVPVQLTSISAPEHKFEGLTQIFQKAYEHEQHISESINNIVDHAIKSKDHATFNFLQWYVAEQHEEEVLFKDILDKIELIGNENHGLYLADQYVKGIAKSRKS

SEQ ID NO: 9277 - protein, 1315 aa, Artificial Sequence
  SARS-CoV-2/Belgium/VAG-03013/2020__EPI_ISL_415155 spike protein (1-1147)(I909C_Y1047C) Ferritin construct
MFVFLVLLPLVSSQCVNLTTRTQLPPAYTNSFTRGVYYPDKVFRSSVLHSTQDLFLPFFSNVTWFHAIHVSGTNGTKRFDNPVLPFNDGVYFASTEKSNIIRGWIFGTTLDSKTQSLLIVNNATNVVIKVCEFQFCNDPFLGVYYHKNNKSWMESEFRVYSSANNCTFEYVSQPFLMDLEGKQGNFKNLREFVFKNIDGYFKIYSKHTPINLVRDLPQGFSALEPLVDLPIGINITRFQTLLALHRSYLTPGDSSSGWTAGAAAYYVGYLQPRTFLLKYNENGTITDAVDCALDPLSETKCTLKSFTVEKGIYQTSNFRVQPTESIVRFPNITNLCPFGEVFNATRFASVYAWNRKRISNCVADYSVLYNSASFSTFKCYGVSPTKLNDLCFTNVYADSFVIRGDEVRQIAPGQTGKIADYNYKLPDDFTGCVIAWNSNNLDSKVGGNYNYLYRLFRKSNLKPFERDISTEIYQAGSTPCNGVEGFNCYFPLQSYGFQPTNGVGYQPYRVVVLSFELLHAPATVCGPKKSTNLVKNKCVNFNFNGLTGTGVLTESNKKFLPFQQFGRDIADTTDAVRDPQTLEILDITPCSFGGVSVITPGTNTSNQVAVLYQGVNCTEVPVAIHADQLTPTWRVYSTGSNVFQTRAGCLIGAEHVNNSYECDIPIGAGICASYQTQTNSPRRARSVASQSIIAYTMSLGAENSVAYSNNSIAIPTNFTISVTTEILPVSMTKTSVDCTMYICGDSTECSNLLLQYGSFCTQLNRALTGIAVEQDKNTQEVFAQVKQIYKTPPIKDFGGFNFSQILPDPSKPSKRSFIEDLLFNKVTLADAGFIKQYGDCLGDIAARDLICAQKFNGLTVLPPLLTDEMIAQYTSALLAGTITSGWTFGAGAALQIPFAMQMAYRFNGCGVTQNVLYENQKLIANQFNSAIGKIQDSLSSTATALGKLQDVVNQNAQALNTLVKQLSSNFGAISSVLNDILSRLDKVEAEVQIDRLITGRLQSLQTYVTQQLIRAAEIRASANLAATKMSECVLGQSKRVDFCGKGCHLMSFPQSAPHGVVFLHVTYVPAQEKNFTTAPAICHDGKAHFPREGVFVSNGTHWFVTQRNFYEPQIITTDNTFVSGNCDVVIGIVNNTVYDPLQPELDSGGGGSDIIKLLNEQVNKEMQSSNLYMSMSSWCYTHSLDGAGLFLFDHAAEEYEHAKKLIIFLNENNVPVQLTSISAPEHKFEGLTQIFQKAYEHEQHISESINNIVDHAIKSKDHATFNFLQWYVAEQHEEEVLFKDILDKIELIGNENHGLYLADQYVKGIAKSRKS

SEQ ID NO: 9278 - protein, 1315 aa, Artificial Sequence
  SARS-CoV-2/Belgium/BC-03016/2020__EPI_ISL_415157 spike protein (1-1147)(I909C_Y1047C) Ferritin construct
MFVFLVLLPLVSSQCVNLTTRTQLPPAYTNSFTRGVYYPDKVFRSSVLHSTQDLFLPFFSNVTWFHAIHVSGTNGTKRFDNPVLPFNDGVYFASTEKSNIIRGWIFGTTLDSKTQSLLIVNNATNVVIKVCEFQFCNDPFLGVYYHKNNKSWMESEFRVYSSANNCTFEYVSQPFLMDLEGKQGNFKNLREFVFKNIDGYFKIYSKHTPINLVRDLPQGFSALEPLVDLPIGINITRFQTLLALHRSYLTPGDSSSGWTAGAAAYYVGYLQPRTFLLKYNENGTITDAVDCALDPLSETKCTLKSFTVEKGIYQTSNFRVQPTESIVRFPNITNLCPFGEVFNATRFASVYAWNRKRISNCVADYSVLYNSASFSTFKCYGVSPTKLNDLCFTNVYADSFVIRGDEVRQIAPGQTGKIADYNYKLPDDFTGCVIAWNSNNLDSKVGGNYNYLYRLFRKSNLKPFERDISTEIYQAGSTPCNGVEGFNCYFPLQSYGFQPTNGVGYQPYRVVVLSFELLHAPATVCGPKKSTNLVKNKCVNFNFNGLTGTGVLTESNKKFLPFQQFGRDIADTTDAVRDPQTLEILDITPCSFGGVSVITPGTNTSNQVAVLYQGVNCTEVPVAIHADQLTPTWRVYSTGSNVFQTRAGCLIGAEHVNNSYECDIPIGAGICASYQTQTNSPRRARSVASQSIIAYTMSLGAENSVAYSNNSIAIPTNFTISVTTEILPVSMTKTSVDCTMYICGDSTECSNLLLQYGSFCTQLNRALTGIAVEQDKNTQEVFAQVKQIYKTPPIKDFGGFNFSQILPDPSKPSKRSFIEDLLFNKVTLADAGFIKQYGDCLGDIAARDLICAQKFNGLTVLPPLLTDEMIAQYTSALLAGTITSGWTFGAGAALQIPFAMQMAYRFNGCGVTQNVLYENQKLIANQFNSAIGKIQDSLSSTAPALGKLQDVVNQNAQALNTLVKQLSSNFGAISSVLNDILSRLDKVEAEVQIDRLITGRLQSLQTYVTQQLIRAAEIRASANLAATKMSECVLGQSKRVDFCGKGCHLMSFPQSAPHGVVFLHVTYVPAQEKNFTTAPAICHDGKAHFPREGVFVSNGTHWFVTQRNFYEPQIITTDNTFVSGNCDVVIGIVNNTVYDPLQPELDSGGGGSDIIKLLNEQVNKEMQSSNLYMSMSSWCYTHSLDGAGLFLFDHAAEEYEHAKKLIIFLNENNVPVQLTSISAPEHKFEGLTQIFQKAYEHEQHISESINNIVDHAIKSKDHATFNFLQWYVAEQHEEEVLFKDILDKIELIGNENHGLYLADQYVKGIAKSRKS

SEQ ID NO: 9279 - protein, 1315 aa, Artificial Sequence
  SARS-CoV-2/Germany/BavPat3/2020__EPI_ISL_414521 spike protein (1-1147)(I909C_Y1047C) Ferritin construct
MFVFLVLLPLVSSQCVNLTTRTQLPPAYTNSFTRGVYYPDKVFRSSVLHSTQDLFLPFFSNVTWFHAIHVSGTNGTKRFDNPVLPFNDGVYFASTEKSNIIRGWIFGTTLDSKTQSLLIVNNATNVVIKVCEFQFCNDPFLGVYYHKNNKSWMESEFRVYSSANNCTFEYVSQPFLMDLEGKQGNFKNLREFVFKNIDGYFKIYSKHTPINLVRDLPQGFSALEPLVDLPIGINITRFQTLLALHRSYLTPGDSSSGWTAGAAAYYVGYLQPRTFLLKYNENGTITDAVDCALDPLSETKCTLKSFTVEKGIYQTSNFRVQPTESIVRFPNITNLCPFGEVFNATRFASVYAWNRKRISNCVADYSVLYNSASFSTFKCYGVSPTKLNDLCFTNVYADSFVIRGDEVRQIAPGQTGKIADYNYKLPDDFTGCVIAWNSNNLDSKVGGNYNYLYRLFRKSNLKPFERDISTEIYQAGSTPCNGVEGFNCYFPLQSYGFQPTNGVGYQPYRVVVLSFELLHAPATVCGPKKSTNLVKNKCVNFNFNGLTGTGVLTESNKKFLPFQQFGRDIADTTDAVRDPQTLEILDITPCSFGGVSVITPGTNTSNQVAVLYQDVNCTEVPVAIHADQLTPTWRVYSTGSNVFQTRAGCLIGAEHVNNSYECDIPIGAGICASYQTQTNSPRRARSVASQSIIAYTMSLGAENSVAYSNNSIAIPTNFTISVTTEILPVSMTKTSVDCTMYICGDSTECSNLLLQYGSFCTQLNRALTGIAVEQDKNTQQVFAQVKQIYKTPPIKDFGGFNFSQILPDPSKPSKRSFIEDLLFNKVTLADAGFIKQYGDCLGDIAARDLICAQKFNGLTVLPPLLTDEMIAQYTSALLAGTITSGWTFGAGAALQIPFAMQMAYRFNGCGVTQNVLYENQKLIANQFNSAIGKIQDSLSSTASALGKLQDVVNQNAQALNTLVKQLSSNFGAISSVLNDILSRLDKVEAEVQIDRLITGRLQSLQTYVTQQLIRAAEIRASANLAATKMSECVLGQSKRVDFCGKGCHLMSFPQSAPHGVVFLHVTYVPAQEKNFTTAPAICHDGKAHFPREGVFVSNGTHWFVTQRNFYEPQIITTDNTFVSGNCDVVIGIVNNTVYDPLQPELDSGGGGSDIIKLLNEQVNKEMQSSNLYMSMSSWCYTHSLDGAGLFLFDHAAEEYEHAKKLIIFLNENNVPVQLTSISAPEHKFEGLTQIFQKAYEHEQHISESINNIVDHAIKSKDHATFNFLQWYVAEQHEEEVLFKDILDKIELIGNENHGLYLADQYVKGIAKSRKS

SEQ ID NO: 9280 - protein, 1315 aa, Artificial Sequence
  SARS-CoV-2/France/HF1805/2020__EPI_ISL_414628 spike protein (1-1147)(I909C_Y1047C) Ferritin construct
MFVFLVLLPLVSSQCVNLTTRTQLPPAYTNSFTRGVYYPDKVFRSSVLHSTQDLFLPFFSNVTWFHAIHVSGTNGTKRFDNPVLPFNDGVYFASTEKSNIIRGWIFGTTLDSKTQSLLIVNNATNVVIKVCEFQFCNDPFLGVYYHKNNKSWMESEFRVYSSANNCTFEYVSQPFLMDLEGKQGNFKNLREFVFKNIDGYFKIYSKHTPINLVRDLPQGFSALEPLVDLPIGINITRFQTLLALHRSYLTPGDSSSGWTAGAAAYYVGYLQPRTFLLKYNENGTITDAVDCALDPLSETKCTLKSFTVEKGIYQTSNFRVQPTESIVRFPNITNLCPFGEVFNATRFASVYAWNRKRISNCVADYSVLYNSASFSTFKCYGVSPTKLNDLCFTNVYADSFVIRGDEVRQIAPGQTGKIADYNYKLPDDFTGCVIAWNSNNLDSKVGGNYNYLYRLFRKSNLKPFERDISTEIYQAGSTPCNGVEGFNCYFPLQSYGFQPTNGVGYQPYRVVVLSFELLHAPATVCGPKKSTNLVKNKCVNFNFNGLTGTGVLTESNKKFLPFQQFGRDIADTTDAVRDPQTLEILDITPCSFGGVSVITPGTNTSNQVAVLYQGVNCTEVPVAIHADQLTPTWRVYSTGSNVFQTRAGCLIGAEHVNNSYECDIPIGAGICASYQTQTNSPRRARSVASQSIIAYTMSLGAENSVAYSNNSIAIPTNFTISVTTEILPVSMTKTSVDCTMYICGDSTECSNLLLQYGSFCTQLNRALTGIAVEQDKNTQEVFAQVKQIYKTPPIKDFGGFNFSQILPDPSKPSKRSFIEDLLFNKVTLADAGFIKQYGDCLGDIAARDLICAQKFNGLTVLPPLLTDEMIAQYTSALLAGTITSGWTFGAGAALQIPFAMQMAYRFNGCGVTQNVLYENQKLIANQFNSAIGKIQDSLSSTASALGKLQDVVNQNAQALNTLVKQLSSNFGAISSVLNDILSRLDKVEAEVQIDRLITGRLQSLQTYVTQQLIRAAEIRASANLAATKMSECVLGQSKRVDFCGKGCHLMSFPQSAPHGVVFLHVTYVPAQEKNFTTAPAICHDGKAHFPREGVFVSNGTHWFVTQRNFYEPQIITTDNTFVSGNCDVVIGVVNNTVYDPLQPELDSGGGGSDIIKLLNEQVNKEMQSSNLYMSMSSWCYTHSLDGAGLFLFDHAAEEYEHAKKLIIFLNENNVPVQLTSISAPEHKFEGLTQIFQKAYEHEQHISESINNIVDHAIKSKDHATFNFLQWYVAEQHEEEVLFKDILDKIELIGNENHGLYLADQYVKGIAKSRKS

SEQ ID NO: 9281 - protein, 1315 aa, Artificial Sequence
  SARS-CoV-2/Netherlands/ZuidHolland_9/2020__EPI_ISL_414445 spike protein (1-1147)(I909C_Y1047C) Ferritin construct
MFVFLVLLPLVSSQCVNLTTRTQLPPAYTNSFTRGVYYPDKVFRSSVLHSTQDLFLPFFSNVTWFHAIHVSGTNGTKRFDNPVLPFNDGVYFASTEKSNIIRGWIFGTTLDSKTQSLLIVNNATNVVIKVCEFQFCNDPFLGVYYHKNNKSWMESEFRVYSSANNCTFEYVSQPFLMDLEGKQGNFKNLREFVFKNIDGYFKIYSKHTPINLVRDLPQGFSALEPLVDLPIGINITRFQTLLALHRSYLTPGDSSSGWTAGAAAYYVGYLQPRTFLLKYNENGTITDAVDCALDPLSETKCTLKSFTVEKGIYQTSNFRVQPTESIVRFPNITNLCPFGEVFNATRFASVYAWNRKRISNCVADYSVLYNSASFSTFKCYGVSPTKLNDLCFTNVYADSFVIRGDEVRQIAPGQTGKIADYNYKLPDDFTGCVIAWNSNNLDSKVGGNYNYLYRLFRKSNLKPFERDISTEIYQAGSTPCNGVEGFNCYFPLQSYGFQPTNGVGYQPYRVVVLSFELLHAPATVCGPKKSTNLVKNKCVNFNFNGLTGTGVLTESNKKFLPFQQFGRDIADTTDAVRDPQTLEILDITPCSFGGVSVITPGTNTSNQVAVLYQGVNCTEVPVAIHADQLTPTWRVYSTGSNVFQTRAGCLIGAEHVNNSYECDIPIGAGICASYQTQTNSPRRARSVASQSIIAYTMSLGAENSVAYSNNSIAIPTNFTISVTTEILPVSMTKTSVDCTMYICGDSTECSNLLLQYGSFCTQLNRALTGIAVEQDKNTQEVFAQVKQIYKTPPIKDFGGFNFSQILPDPSKPSKRSFIEDLLFNKVTLADAGFIKQYGDCLGDIAARDLICVQKFNGLTVLPPLLTDEMIAQYTSALLAGTITSGWTFGAGAALQIPFAMQMAYRFNGCGVTQNVLYENQKLIANQFNSAIGKIQDSLSSTASALGKLQDVVNQNAQALNTLVKQLSSNFGAISSVLNDILSRLDKVEAEVQIDRLITGRLQSLQTYVTQQLIRAAEIRASANLAATKMSECVLGQSKRVDFCGKGCHLMSFPQSAPHGVVFLHVTYVPAQEKNFTTAPAICHDGKAHFPREGVFVSNGTHWFVTQRNFYEPQIITTDNTFVSGNCDVVIGIVNNTVYDPLQPELDSGGGGSDIIKLLNEQVNKEMQSSNLYMSMSSWCYTHSLDGAGLFLFDHAAEEYEHAKKLIIFLNENNVPVQLTSISAPEHKFEGLTQIFQKAYEHEQHISESINNIVDHAIKSKDHATFNFLQWYVAEQHEEEVLFKDILDKIELIGNENHGLYLADQYVKGIAKSRKS

SEQ ID NO: 9282 - protein, 1315 aa, Artificial Sequence
  SARS-CoV-2/Finland/FIN03032020A/2020__EPI_ISL_413602 spike protein (1-1147)(I909C_Y1047C) Ferritin construct
MFVFLVLLPLVSSQCVNLTTRTQLPPAYTNSFTRGVYYPDKVFRSSVLHSTQDLFLPFFSNVTWFHAIHVSGTNGTKRFDNPVLPFNDGVYFASTEKSNIIRGWIFGTTLDSKTQSLLIVNNATNVVIKVCEFQFCNDPFLGVYYHKNNKSWMESEFRVYSSANNCTFEYVSQPFLMDLEGKQGNFKNLREFVFKNIDGYFKIYSKHTPINLVRDLPQGFSALEPLVDLPIGINITRFQTLLALHRSYLTPGDSSSGWTAGAAAYYVGYLQPRTFLLKYNENGTITDAVDCALDPLSETKCTLKSFTVEKGIYQTSNFRVQPTESIVRFPNITNLCPFGEVFNATRFASVYAWNRKRISNCVADYSVLYNSASFSTFKCYGVSPTKLNDLCFTNVYADSFVIRGDEVRQIAPGQTGKIADYNYKLPDDFTGCVISWNSNNLDSKVGGNYNYLYRLFRKSNLKPFERDISTEIYQAGSTPCNGVEGFNCYFPLQSYGFQPTNGVGYQPYRVVVLSFELLHAPATVCGPKKSTNLVKNKCVNFNFNGLTGTGVLTESNKKFLPFQQFGRDIADTTDAVRDPQTLEILDITPCSFGGVSVITPGTNTSNQVAVLYQGVNCTEVPVAIHADQLTPTWRVYSTGSNVFQTRAGCLIGAEHVNNSYECDIPIGAGICASYQTQTNSPRRARSVASQSIIAYTMSLGAENSVAYSNNSIAIPTNFTISVTTEILPVSMTKTSVDCTMYICGDSTECSNLLLQYGSFCTQLNRALTGIAVEQDKNTQEVFAQVKQIYKTPPIKDFGGFNFSQILPDPSKPSKRSFIEDLLFNKVTLADAGFIKQYGDCLGDIAARDLICAQKFNGLTVLPPLLTDEMIAQYTSALLAGTITSGWTFGAGAALQIPFAMQMAYRFNGCGVTQNVLYENQKLIANQFNSAIGKIQDSLSSTASALGKLQDVVNQNAQALNTLVKQLSSNFGAISSVLNDILSRLDKVEAEVQIDRLITGRLQSLQTYVTQQLIRAAEIRASANLAATKMSECVLGQSKRVDFCGKGCHLMSFPQSAPHGVVFLHVTYVPAQEKNFTTAPAICHDGKAHFPREGVFVSNGTHWFVTQRNFYEPQIITTDNTFVSGNCDVVIGIVNNTVYDPLQPELDSGGGGSDIIKLLNEQVNKEMQSSNLYMSMSSWCYTHSLDGAGLFLFDHAAEEYEHAKKLIIFLNENNVPVQLTSISAPEHKFEGLTQIFQKAYEHEQHISESINNIVDHAIKSKDHATFNFLQWYVAEQHEEEVLFKDILDKIELIGNENHGLYLADQYVKGIAKSRKS

SEQ ID NO: 9283 - protein, 1315 aa, Artificial Sequence
  SARS-CoV-2/France/GE1977/2020__EPI_ISL_414632 spike protein (1-1147)(I909C_Y1047C) Ferritin construct
MFVFLVLLPLVSSQCVNLTTRTQLPPAYTNSFTRGVYYPDKVFRSSVLHSTQDLFLPFFSNVTWFHAIHVSGTNGTKRFDNPVLPFNDGVYFASTEKSNIIRGWIFGTTLDSKTQSLLIVNNATNVVIKVCEFQFCNDPFLGVYYHKNNKSWMESEFRVYSSANNCTFEYVSQPFLMDLEGKQGNFKNLREFVFKNIDGYFKIYSKHTPINLVRDLPQGFSALEPLVDLPIGINITRFQTLLALHRSYLTPGDSSSGWTAGAAAYYVGYLQPRTFLLKYNENGTITDAVDCALDPLSETKCTLKSFTVEKGIYQTSNFRVQPTESIVRFPNITNLCPFGEVFNATRFASVYAWNRKRISNCVADYSVLYNSASFSTFKCYGVSPTKLNDLCFTNVYADSFVIRGDEVRQIAPGQTGKIADYNYKLPDDFTGCVIAWNSNNLDSKVGGNYNYLYRLFRKSNLKPFERDISTEIYQAGSTPCNGVEGFNCYFPLQSYGFQPTNGVGYQPYRVVVLSFELLHAPATVCGPKKSTNLVKNKCVNFNFNGLTGTGVLTESNKKFLPFQQFGRDIADTTDAVRDPQTLEILDITPCSFGGVSVITPGTNTSNQVAVLYQGVNCTEVPVAIHADQLTPTWRVYSTGSNVFQTRAGCLIGAEHVNNSYECDIPIGAGICASYQTQTNSPRRARSVASQSIIAYTMSLGAENSVAYSNNSIAIPTNFTISVTTEILPVSMTKTSVDCTMYICGDSTECSNLLLQYGSFCTQLNRALTGIAVEQDKNTQEVFAQVKQIYKTPPIKDFGGFNFSQILPDPSKPSKRSFIEDLLFNKVTLADAGFIKQYGDCLGDIAARDLICAQKFNGLTVLPPLLTDEMIAQYTSALLAGTITSGWTFGAGAALQIPFAMQMAYRFNGCGVTQNVLYENQKLIANQFNSAIGKIQDSLFSTASALGKLQDVVNQNAQALNTLVKQLSSNFGAISSVLNDILSRLDKVEAEVQIDRLITGRLQSLQTYVTQQLIRAAEIRASANLAATKMSECVLGQSKRVDFCGKGCHLMSFPQSAPHGVVFLHVTYVPAQEKNFTTAPAICHDGKAHFPREGVFVSNGTHWFVTQRNFYEPQIITTDNTFVSGNCDVVIGIVNNTVYDPLQPELDSGGGGSDIIKLLNEQVNKEMQSSNLYMSMSSWCYTHSLDGAGLFLFDHAAEEYEHAKKLIIFLNENNVPVQLTSISAPEHKFEGLTQIFQKAYEHEQHISESINNIVDHAIKSKDHATFNFLQWYVAEQHEEEVLFKDILDKIELIGNENHGLYLADQYVKGIAKSRKS

SEQ ID NO: 9284 - protein, 1315 aa, Artificial Sequence
  SARS-CoV-2/Finland/FIN-313/2020__EPI_ISL_414641 spike protein (1-1147)(I909C_Y1047C) Ferritin construct
MFVFLVLLPLVSSQCVNLTTRTQLPPAYTNSFTRGVYYPDKVFRSSVLHSTQDLFLPFFSNVTWFHAIHVSGTNGTKRFDNPVLPFNDGVYFASTEKSNIIRGWIFGTTLDSKTQSLLIVNNATNVVIKVCEFQFCNDPFLGVYYHKNNKSWMESEFRVYSSANNCTFEYVSQPFLMDLEGKQGNFKNLREFVFKNIDGYFKIYSKHTPINLVRDLPQGFSALEPLVDLPIGINITRFKTLLALHRSYLTPGDSSSGWTAGAAAYYVGYLQPRTFLLKYNENGTITDAVDCALDPLSETKCTLKSFTVEKGIYQTSNFRVQPTESIVRFPNITNLCPFGEVFNATRFASVYAWNRKRISNCVADYSVLYNSASFSTFKCYGVSPTKLNDLCFTNVYADSFVIRGDEVRQIAPGQTGKIADYNYKLPDDFTGCVIAWNSNNLDSKVGGNYNYLYRLFRKSNLKPFERDISTEIYQAGSTPCNGVEGFNCYFPLQSYGFQPTNGVGYQPYRVVVLSFELLHAPATVCGPKKSTNLVKNKCVNFNFNGLTGTGVLTESNKKFLPFQQFGRDIADTTDAVRDPQTLEILDITPCSFGGVSVITPGTNTSNQVAVLYQGVNCTEVPVAIHADQLTPTWRVYSTGSNVFQTRAGCLIGAEHVNNSYECDIPIGAGICASYQTQTNSPRRARSVASQSIIAYTMSLGAENSVAYSNNSIAIPTNFTISVTTEILPVSMTKTSVDCTMYICGDSTECSNLLLQYGSFCTQLNRALTGIAVEQDKNTQEVFAQVKQIYKTPPIKDFGGFNFSQILPDPSKPSKRSFIEDLLFNKVTLADAGFIKQYGDCLGDIAARDLICAQKFNGLTVLPPLLTDEMIAQYTSALLAGTITSGWTFGAGAALQIPFAMQMAYRFNGCGVTQNVLYENQKLIANQFNSAIGKIQDSLSSTASALGKLQDVVNQNAQALNTLVKQLSSNFGAISSVLNDILSRLDKVEAEVQIDRLITGRLQSLQTYVTQQLIRAAEIRASANLAATKMSECVLGQSKRVDFCGKGCHLMSFPQSAPHGVVFLHVTYVPAQEKNFTTAPAICHDGKAHFPREGVFVSNGTHWFVTQRNFYEPQIITTDNTFVSGNCDVVIGIVNNTVYDPLQPELDSGGGGSDIIKLLNEQVNKEMQSSNLYMSMSSWCYTHSLDGAGLFLFDHAAEEYEHAKKLIIFLNENNVPVQLTSISAPEHKFEGLTQIFQKAYEHEQHISESINNIVDHAIKSKDHATFNFLQWYVAEQHEEEVLFKDILDKIELIGNENHGLYLADQYVKGIAKSRKS

SEQ ID NO: 9285 - protein, 1315 aa, Artificial Sequence
  SARS-CoV-2/Netherlands/ZuidHolland_2/2020__EPI_ISL_414556 spike protein (1-1147)(I909C_Y1047C) Ferritin construct
MFVFLVLLPLVSSQCVNLTTRTQLPPAYTNSFTRGVYYPDKVFRSSVLHSTQDLFLPFFSNVTWFHAIHVSGTNGTKRFDNPVLPFNDGVYFASTEKSNIIRGWIFGTTLDSKTQSLLIVNNATNVVIKVCEFQFCNDPFLGVYYHKNNKSWMESEFRVYSSANNCTFEYVSQPFLMDLEGKQGNFKNLREFVFKNIDGYFKIYSKHTPINLVRDLPQGFSALEPLVDLPIGINITRFQTLLALHRSYLTPGDSSSGWTAGAAAYYVGYLQPRTFLLKYNENGTITDAVDCALDPLSETKCTLKSFTVEKGIYQTSNFRVQPTESIVRFPNITNLCPFGEVFNATRFASVYAWNRKRISNCVADYSVLYNSASFSTFKCYGVSPTKLNDLCFTNVYADSFVIRGDEVRQIAPGQTGKIADYNYKLPDDFTGCVIAWNSNNLDSKVGGNYNYLYRLFRKSNLKPFERDISTEIYQAGSTPCNGVEGFNCYFPLQSYGFQPTNGVGYQPYRVVVLSFELLHAPATVCGPKKSTNLVKNKCVNFNFNGLTGTGVLTESNKKFLPFQQFGRDIADTTDAVRDPQTLEILDITPCSFGGVSVITPGTNTSNQVAVLYQGVNCTEVPVAIHADQLTPTWRVYSTGSNVFQTRAGCLIGAEHVNNSYECDIPIGAGICASYQTQTNSPRRARSVASQSIIAYTMSLGAENSVAYSNNSIAIPTNFTISVTTEILPVSMTKTSVDCTMYICGDSTECSNLLLQYGSFCTQLNRALTGIALEQDKNTQEVFAQVKQIYKTPPIKDFGGFNFSQILPDPSKPSKRSFIEDLLFNKVTLADAGFIKQYGDCLGDIAARDLICAQKFNGLTVLPPLLTDEMIAQYTSALLAGTITSGWTFGAGAALQIPFAMQMAYRFNGCGVTQNVLYENQKLIANQFNSAIGKIQDSLSSTASALGKLQDVVNQNAQALNTLVKQLSSNFGAISSVLNDILSRLDKVEAEVQIDRLITGRLQSLQTYVTQQLIRAAEIRASANLAATKMSECVLGQSKRVDFCGKGCHLMSFPQSAPHGVVFLHVTYVPAQEKNFTTAPAICHDGKAHFPREGVFVSNGTHWFVTQRNFYEPQIITTDNTFVSGNCDVVIGIVNNTVYDPLQPELDSGGGGSDIIKLLNEQVNKEMQSSNLYMSMSSWCYTHSLDGAGLFLFDHAAEEYEHAKKLIIFLNENNVPVQLTSISAPEHKFEGLTQIFQKAYEHEQHISESINNIVDHAIKSKDHATFNFLQWYVAEQHEEEVLFKDILDKIELIGNENHGLYLADQYVKGIAKSRKS

SEQ ID NO: 9286 - protein, 1315 aa, Artificial Sequence
  SARS-CoV-2/USA/WA-UW31/2020__EPI_ISL_414618 spike protein (1-1147)(I909C_Y1047C) Ferritin construct
MFVFLVLLPLVSSQCVNLTTRTQLPPAYTNSFTRGVYYPDKVFRSSVLHSTQDLFLPFFSNVTWFHAIHVSGTNGTKRFDNPVLPFNDGVYFASTEKSNIIRGWIFGTTLDSKTQSLLIVNNATNVVIKVCEFQFCNDPFLGVYYHKNNKSWMESEFRVYSSANNCTFEYVSQPFLMDLEGKQGNFKNLREFVFKNIDGYFKIYSKHTPINLVRDLPQGFSALEPLVDLPIGINITRFQTLLALHRSYLTPGDSSSGWTAGAAAYYVGYLQPRTFLLKYNENGTITDAVDCALDPLSETKCTLKSFTVEKGIYQTSNFRVQPTESIVRFPNITNLCPFGEVFNATRFASVYAWNRKRISNCVADYSVLYNSASFSTFKCYGVSPTKLNDLCFTNVYADSFVIRGDEVRQIAPGQTGKIADYNYKLPDDFTGCVIAWNSNNLDSKVGGNYNYLYRLFRKSNLKPFERDISTEIYQAGSTPCNGAEGFNCYFPLQSYGFQPTNGVGYQPYRVVVLSFELLHAPATVCGPKKSTNLVKNKCVNFNFNGLTGTGVLTESNKKFLPFQQFGRDIADTTDAVRDPQTLEILDITPCSFGGVSVITPGTNTSNQVAVLYQDVNCTEVPVAIHADQLTPTWRVYSTGSNVFQTRAGCLIGAEHVNNSYECDIPIGAGICASYQTQTNSPRRARSVASQSIIAYTMSLGAENSVAYSNNSIAIPTNFTISVTTEILPVSMTKTSVDCTMYICGDSTECSNLLLQYGSFCTQLNRALTGIAVEQDKNTQEVFAQVKQIYKTPPIKDFGGFNFSQILPDPSKPSKRSFIEDLLFNKVTLADAGFIKQYGDCLGDIAARDLICAQKFNGLTVLPPLLTDEMIAQYTSALLAGTITSGWTFGAGAALQIPFAMQMAYRFNGCGVTQNVLYENQKLIANQFNSAIGKIQDSLSSTASALGKLQDVVNQNAQALNTLVKQLSSNFGAISSVLNDILSRLDKVEAEVQIDRLITGRLQSLQTYVTQQLIRAAEIRASANLAATKMSECVLGQSKRVDFCGKGCHLMSFPQSAPHGVVFLHVTYVPAQEKNFTTAPAICHDGKAHFPREGVFVSNGTHWFVTQRNFYEPQIITTDNTFVSGNCDVVIGIVNNTVYDPLQPELDSGGGGSDIIKLLNEQVNKEMQSSNLYMSMSSWCYTHSLDGAGLFLFDHAAEEYEHAKKLIIFLNENNVPVQLTSISAPEHKFEGLTQIFQKAYEHEQHISESINNIVDHAIKSKDHATFNFLQWYVAEQHEEEVLFKDILDKIELIGNENHGLYLADQYVKGIAKSRKS

SEQ ID NO: 9287 - protein, 1315 aa, Artificial Sequence
  SARS-CoV-2/South Korea/SNU01/2020__EPI_ISL_411929 spike protein (1-1147)(I909C_Y1047C) Ferritin construct
MFVFLVLLPLVSSQCVNLTTRTQLPPAYTNSFTRGVYYPDKVFRSSVLHSTQDLFLPFFSNVTWFHAIHVSGTNGTKRFDNPVLPFNDGVYFASTEKSNIIRGWIFGTTLDSKTQSLLIVNNATNVVIKVCEFQFCNDPFLGVYYHKNNKSWMESEFRVYSSANNCTFEYVSQPFLMDLEGKQGNFKNLREFVFKNIDGYFKIYSKHTPINLVRDLPQGFWALEPLVDLPIGINITRFQTLLALHRSYLTPGDSSSGWTAGAAAYYVGYLQPRTFLLKYNENGTITDAVDCALDPLSETKCTLKSFTVEKGIYQTSNFRVQPTESIVRFPNITNLCPFGEVFNATRFASVYAWNRKRISNCVADYSVLYNSASFSTFKCYGVSPTKLNDLCFTNVYADSFVIRGDEVRQIAPGQTGKIADYNYKLPDDFTGCVIAWNSNNLDSKVGGNYNYLYRLFRKSNLKPFERDISTEIYQAGSTPCNGVEGFNCYFPLQSYGFQPTNGVGYQPYRVVVLSFELLHAPATVCGPKKSTNLVKNKCVNFNFNGLTGTGVLTESNKKFLPFQQFGRDIADTTDAVRDPQTLEILDITPCSFGGVSVITPGTNTSNQVAVLYQDVNCTEVPVAIHADQLTPTWRVYSTGSNVFQTRAGCLIGAEHVNNSYECDIPIGAGICASYQTQTNSPRRARSVASQSIIAYTMSLGAENSVAYSNNSIAIPTNFTISVTTEILPVSMTKTSVDCTMYICGDSTECSNLLLQYGSFCTQLNRALTGIAVEQDKNTQEVFAQVKQIYKTPPIKDFGGFNFSQILPDPSKPSKRSFIEDLLFNKVTLADAGFIKQYGDCLGDIAARDLICAQKFNGLTVLPPLLTDEMIAQYTSALLAGTITSGWTFGAGAALQIPFAMQMAYRFNGCGVTQNVLYENQKLIANQFNSAIGKIQDSLSSTASALGKLQDVVNQNAQALNTLVKQLSSNFGAISSVLNDILSRLDKVEAEVQIDRLITGRLQSLQTYVTQQLIRAAEIRASANLAATKMSECVLGQSKRVDFCGKGCHLMSFPQSAPHGVVFLHVTYVPAQEKNFTTAPAICHDGKAHFPREGVFVSNGTHWFVTQRNFYEPQIITTDNTFVSGNCDVVIGIVNNTVYDPLQPELDSGGGGSDIIKLLNEQVNKEMQSSNLYMSMSSWCYTHSLDGAGLFLFDHAAEEYEHAKKLIIFLNENNVPVQLTSISAPEHKFEGLTQIFQKAYEHEQHISESINNIVDHAIKSKDHATFNFLQWYVAEQHEEEVLFKDILDKIELIGNENHGLYLADQYVKGIAKSRKS

SEQ ID NO: 9288 - protein, 1315 aa, Artificial Sequence
  SARS-CoV-2/China/WF0004/2020__EPI_ISL_413694 spike protein (1-1147)(I909C_Y1047C) Ferritin construct
MFVFLVLLPLVSSQCVNLTTRTQLPPAYTNSFTRGVYYPDKVFRSSVLHSTQDLFLPFFSNVTWFHAIHVSGTNGTKRFDNPVLPFNDGVYFASTEKSNIIRGWIFGTTLDSKTQSLLIVNNATNVVIKVCEFQFCNDPFLGVYYHKNNKSWTESEFRVYSSANNCTFEYVSQPFLMDLEGKQGNFKNLREFVFKNIDGYFKIYSKHTPINLVRDLPQGFSALEPLVDLPIGINITRFQTLLALHRSYLTPGDSSSGWTAGAAAYYVGYLQPRTFLLKYNENGTITDAVDCALDPLSETKCTLKSFTVEKGIYQTSNFRVQPTESIVRFPNITNLCPFGEVFNATRFASVYAWNRKRISNCVADYSVLYNSASFSTFKCYGVSPTKLNDLCFTNVYADSFVIRGDEVRQIAPGQTGKIADYNYKLPDDFTGCVIAWNSNNLDSKVGGNYNYLYRLFRKSNLKPFERDISTEIYQAGSTPCNGVEGFNCYFPLQSYGFQPTNGVGYQPYRVVVLSFELLHAPATVCGPKKSTNLVKNKCVNFNFNGLTGTGVLTESNKKFLPFQQFGRDIADTTDAVRDPQTLEILDITPCSFGGVSVITPGTNTSNQVAVLYQDVNCTEVPVAIHADQLTPTWRVYSTGSNVFQTRAGCLIGAEHVNNSYECDIPIGAGICASYQTQTNSPRRARSVASQSIIAYTMSLGAENSVAYSNNSIAIPTNFTISVTTEILPVSMTKTSVDCTMYICGDSTECSNLLLQYGSFCTQLNRALTGIAVEQDKNTQEVFAQVKQIYKTPPIKDFGGFNFSQILPDPSKPSKRSFIEDLLFNKVTLADAGFIKQYGDCLGDIAARDLICAQKFNGLTVLPPLLTDEMIAQYTSALLAGTITSGWTFGAGAALQIPFAMQMAYRFNGCGVTQNVLYENQKLIANQFNSAIGKIQDSLSSTASALGKLQDVVNQNAQALNTLVKQLSSNFGAISSVLNDILSRLDKVEAEVQIDRLITGRLQSLQTYVTQQLIRAAEIRASANLAATKMSECVLGQSKRFDFCGKGCHLMSFPQSAPHGVVFLHVTYVPAQEKNFTTAPAICHDGKAHFPREGVFVSNGTHWFVTQRNFYEPQIITTDNTFVSGNCDVVIGIVNNTVYDPLQPELDSGGGGSDIIKLLNEQVNKEMQSSNLYMSMSSWCYTHSLDGAGLFLFDHAAEEYEHAKKLIIFLNENNVPVQLTSISAPEHKFEGLTQIFQKAYEHEQHISESINNIVDHAIKSKDHATFNFLQWYVAEQHEEEVLFKDILDKIELIGNENHGLYLADQYVKGIAKSRKS

SEQ ID NO: 9289 - protein, 1315 aa, Artificial Sequence
  SARS-CoV-2/China/WF0028/2020__EPI_ISL_413791 spike protein (1-1147)(I909C_Y1047C) Ferritin construct
MFVFLVLLPLVSSQCVNLTTRTQLPPAYTNSFTRGVYYPDKVFRSSVLHSTQDLFLPFFSNVTWFHAIHVSGTNGTKRFDNPVLPFNDGVYFASTEKSNIIRGWIFGTTLDSKTQSLLIVNNATNVVIKVCEFQFCNDPFLGVYYHKNNKSWMESEFRVYSSANNCTFEYVSQPFLMDLEGKQGNFKNLREFVFKNIDGYFKIYSKHTPINLVRDLPQGFSALEPLVDLPIGINITRFQTLLALHRSYLTPGDSSSGWTAGAAAYYVGYLQPRTFLLKYNENGTITDAVDCALDPLSETKCTLKSFTVEKGIYQTSNFRVQPTESIVRFPNITNLCPFGEVFNATRFASVYAWNRKRISNCVADYSVLYNSASFSTFKCYGVSPTKLNDLCFTNVYADSFVIRGDEVRQIAPGQTGKIADYNYKLPDDFTGCVIAWNSNNLDSKVGGNYNYLYRLFRKSNLKPFERDISTEIYQAGSTPCNGVEGFNCYFPLQSYGFQPTNGVGYQPYRVVVLSFELLHAPATVCGPKKSTNLVKNKCVNFNFNGLTGTGVLTESNKKFLPFQQFGRDIADTTDAVRDPQTLEILDITPCSFGGVSVITPGTNTSNQVAVLYQDVNCTEVPVAIHADQLTPTWRVYSTGSNVFQTRAGCLIGAEHVNNSYECDIPIGAGICASYQTQTNSPRRARSVASQSIIAYTMSLGAENSVAYSNNSIAIPTNFTISVTTEILPVSMTKTSVDCTMYICGDSTECSNLLLQYGSFCTQLNRALTGIAVEQDKNTQEVFAQVKQIYKTPPIKDFGGFNFSQILPDPSKPSKRSFIEDLLFNKVTLADAGFIKQYGDCLGDIAARDLICAQKFNGLTVLPPLLTDEMIAQYTSALLAGTITSGWTFGAGAALQIPFAMQMAYRFNGCGVTQNVLYENQKLIANQFNSAIGKIQDSLSSTASALGKLQDVVNQNAQALNTLVKQLSSNFGAISSVLNDILSRLDKVEAEVQIDRLITGRLQSLQTYVTQQLIRAAEIRASANLAATKMSECVLGQSKRVDFCGKGCHLMSFPQSAPHGVVFLHVTYVPAQEKNFTTAPAICHDGKAHFPREGVFVSNGTHWFVTQRNFYEPQIITTDNTFVSGNCDVVIGIVNNTVYDPLQPELESGGGGSDIIKLLNEQVNKEMQSSNLYMSMSSWCYTHSLDGAGLFLFDHAAEEYEHAKKLIIFLNENNVPVQLTSISAPEHKFEGLTQIFQKAYEHEQHISESINNIVDHAIKSKDHATFNFLQWYVAEQHEEEVLFKDILDKIELIGNENHGLYLADQYVKGIAKSRKS

SEQ ID NO: 9290 - protein, 1315 aa, Artificial Sequence
  SARS-CoV-2/2019-nCoV/USA-CruiseA-18/2020__MT159716.1 spike protein (1-1147)(I909C_Y1047C) Ferritin construct
MFVFLVLLPLVSSQCVNLTTRTQLPPAYTNSFTRGVYYPDKVFRSSVLHSTQDLFLPFFSNVTWFHAIHVSGTNGTKRFDNPVLPFNDGVYFASTEKSNIIRGWIFGTTLDSKTQSLLIVNNATNVVIKVCEFQFCNDPFLGVYYHKNNKSWMESELRVYSSANNCTFEYVSQPFLMDLEGKQGNFKNLREFVFKNIDGYFKIYSKHTPINLVRDLPQGFSALEPLVDLPIGINITRFQTLLALHRSYLTPGDSSSGWTAGAAAYYVGYLQPRTFLLKYNENGTITDAVDCALDPLSETKCTLKSFTVEKGIYQTSNFRVQPTESIVRFPNITNLCPFGEVFNATRFASVYAWNRKRISNCVADYSVLYNSASFSTFKCYGVSPTKLNDLCFTNVYADSFVIRGDEVRQIAPGQTGKIADYNYKLPDDFTGCVIAWNSNNLDSKVGGNYNYLYRLFRKSNLKPFERDISTEIYQAGSTPCNGVEGFNCYFPLQSYGFQPTNGVGYQPYRVVVLSFELLHAPATVCGPKKSTNLVKNKCVNFNFNGLTGTGVLTESNKKFLPFQQFGRDIADTTDAVRDPQTLEILDITPCSFGGVSVITPGTNTSNQVAVLYQDVNCTEVPVAIHADQLTPTWRVYSTGSNVFQTRAGCLIGAEHVNNSYECDIPIGAGICASYQTQTNSPRRARSVASQSIIAYTMSLGAENSVAYSNNSIAIPTNFTISVTTEILPVSMTKTSVDCTMYICGDSTECSNLLLQYGSFCTQLNRALTGIAVEQDKNTQEVFAQVKQIYKTPPIKDFGGFNFSQILPDPSKPSKRSFIEDLLFNKVTLADAGFIKQYGDCLGDIAARDLICAQKFNGLTVLPPLLTDEMIAQYTSALLAGTITSGWTFGAGAALQIPFAMQMAYRFNGCGVTQNVLYENQKLIANQFNSAIGKIQDSLSSTASALGKLQDVVNQNAQALNTLVKQLSSNFGAISSVLNDILSRLDKVEAEVQIDRLITGRLQSLQTYVTQQLIRAAEIRASANLAATKMSECVLGQSKRVDFCGKGCHLMSFPQSAPHGVVFLHVTYVPAQEKNFTTAPAICHDGKAHFPREGVFVSNGTHWFVTQRNFYEPQIITTDNTFVSGNCDVVIGIVNNTVYDPLQPELDSGGGGSDIIKLLNEQVNKEMQSSNLYMSMSSWCYTHSLDGAGLFLFDHAAEEYEHAKKLIIFLNENNVPVQLTSISAPEHKFEGLTQIFQKAYEHEQHISESINNIVDHAIKSKDHATFNFLQWYVAEQHEEEVLFKDILDKIELIGNENHGLYLADQYVKGIAKSRKS

SEQ ID NO: 9291 - protein, 1315 aa, Artificial Sequence
  SARS-CoV-2/SARS-CoV-2/Yunnan-01/human/2020/CHN__MT049951.1 spike protein (1-1147)(I909C_Y1047C) Ferritin construct
MFVFLVLLPLVSSQCVNLTTRTQLPPANTNSFTRGVYYPDKVFRSSVLHSTQDLFLPFFSNVTWFHAIHVSGTNGTKRFDNPVLPFNDGVYFASTEKSNIIRGWIFGTTLDSKTQSLLIVNNATNVVIKVCEFQFCNDPFLGVYYHKNNKSWMESEFRVYSSANNCTFEYVSQPFLMDLEGKQGNFKNLREFVFKNIDGYFKIYSKHTPINLVRDLPQGFSALEPLVDLPIGINITRFQTLLALHRSYLTPGDSSSGWTAGAAAYYVGYLQPRTFLLKYNENGTITDAVDCALDPLSETKCTLKSFTVEKGIYQTSNFRVQPTESIVRFPNITNLCPFGEVFNATRFASVYAWNRKRISNCVADYSVLYNSASFSTFKCYGVSPTKLNDLCFTNVYADSFVIRGDEVRQIAPGQTGKIADYNYKLPDDFTGCVIAWNSNNLDSKVGGNYNYLYRLFRKSNLKPFERDISTEIYQAGSTPCNGVEGFNCYFPLQSYGFQPTNGVGYQPYRVVVLSFELLHAPATVCGPKKSTNLVKNKCVNFNFNGLTGTGVLTESNKKFLPFQQFGRDIADTTDAVRDPQTLEILDITPCSFGGVSVITPGTNTSNQVAVLYQDVNCTEVPVAIHADQLTPTWRVYSTGSNVFQTRAGCLIGAEHVNNSYECDIPIGAGICASYQTQTNSPRRARSVASQSIIAYTMSLGAENSVAYSNNSIAIPTNFTISVTTEILPVSMTKTSVDCTMYICGDSTECSNLLLQYGSFCTQLNRALTGIAVEQDKNTQEVFAQVKQIYKTPPIKDFGGFNFSQILPDPSKPSKRSFIEDLLFNKVTLADAGFIKQYGDCLGDIAARDLICAQKFNGLTVLPPLLTDEMIAQYTSALLAGTITSGWTFGAGAALQIPFAMQMAYRFNGCGVTQNVLYENQKLIANQFNSAIGKIQDSLSSTASALGKLQDVVNQNAQALNTLVKQLSSNFGAISSVLNDILSRLDKVEAEVQIDRLITGRLQSLQTYVTQQLIRAAEIRASANLAATKMSECVLGQSKRVDFCGKGCHLMSFPQSAPHGVVFLHVTYVPAQEKNFTTAPAICHDGKAHFPREGVFVSNGTHWFVTQRNFYEPQIITTDNTFVSGNCDVVIGIVNNTVYDPLQPELDSGGGGSDIIKLLNEQVNKEMQSSNLYMSMSSWCYTHSLDGAGLFLFDHAAEEYEHAKKLIIFLNENNVPVQLTSISAPEHKFEGLTQIFQKAYEHEQHISESINNIVDHAIKSKDHATFNFLQWYVAEQHEEEVLFKDILDKIELIGNENHGLYLADQYVKGIAKSRKS

SEQ ID NO: 9292 - protein, 1315 aa, Artificial Sequence
  SARS-CoV-2/USA/WA-UW292/2020__EPI_ISL_418077 spike protein (1-1147)(I909C_Y1047C) Ferritin construct
MFVFLVLLPLVSSQCVNLTTRTQLPPAYTNSFTRGVYYPDKVFRSSVLHSTQDLFLPFFSNVTWFHAIHVSGTNGTKRFDNPVLPFNDGVYFASTEKSNIIRGWIFGTTLDSKTQSLLIVNNATNVVIKVCEFQFCNDPFLGVYYHKNNKSWMESEFRVYSSANNCTFEYVSQPFLMDLEGKQGNFKNLREFVFKNIDGYFKIYSKHTPINLVRDLPQGFSALEPLVDLPIGINITRFQTLLALHRSYLTPGDSSSGWTAGAAAYYVGYLQPRTFLLKYNENGTITDAVDCALDPLSETKCTLKSFTVEKGIYQTSNFRVQPTESIVRFPNITNLCPFGEVFNATRFASVYAWNRKRISNCVADYSVLYNSASFSTFKCYGVSPTKLNDLCFTNVYADSFVIRGDEVRQIAPGQTGKIADYNYKLPDDFTGCVIAWNSNNLDSKVGGNYNYLYRLFRKSNLKPFERDISTEIYQASSTPCNGVEGFNCYFPLQSYGFQPTNGVGYQPYRVVVLSFELLHAPATVCGPKKSTNLVKNKCVNFNFNGLTGTGVLTESNKKFLPFQQFGRDIADTTDAVRDPQTLEILDITPCSFGGVSVITPGTNTSNQVAVLYQDVNCTEVPVAIHADQLTPTWRVYSTGSNVFQTRAGCLIGAEHVNNSYECDIPIGAGICASYQTQTNSPRRARSVASQSIIAYTMSLGAENSVAYSNNSIAIPTNFTISVTTEILPVSMTKTSVDCTMYICGDSTECSNLLLQYGSFCTQLNRALTGIAVEQDKNTQEVFAQVKQIYKTPPIKDFGGFNFSQILPDPSKPSKRSFIEDLLFNKVTLADAGFIKQYGDCLGDIAARDLICAQKFNGLTVLPPLLTDEMIAQYTSALLAGTITSGWTFGAGAALQIPFAMQMAYRFNGCGVTQNVLYENQKLIANQFNSAIGKIQDSLSSTASALGKLQDVVNQNAQALNTLVKQLSSNFGAISSVLNDILSRLDKVEAEVQIDRLITGRLQSLQTYVTQQLIRAAEIRASANLAATKMSECVLGQSKRVDFCGKGCHLMSFPQSAPHGVVFLHVTYVPAQEKNFTTAPAICHDGKAHFPREGVFVSNGTHWFVTQRNFYEPQIITTDNTFVSGNCDVVIGIVNNTVYDPLQPELDSGGGGSDIIKLLNEQVNKEMQSSNLYMSMSSWCYTHSLDGAGLFLFDHAAEEYEHAKKLIIFLNENNVPVQLTSISAPEHKFEGLTQIFQKAYEHEQHISESINNIVDHAIKSKDHATFNFLQWYVAEQHEEEVLFKDILDKIELIGNENHGLYLADQYVKGIAKSRKS

SEQ ID NO: 9293 - protein, 1315 aa, Artificial Sequence
  SARS-CoV-2/Iceland/192/2020__EPI_ISL_417819 spike protein (1-1147)(I909C_Y1047C) Ferritin construct
MFVFFVLLPLVSSQCVNLTTRTQLPPAYTNSFTRGVYYPDKVFRSSVLHSTQDLFLPFFSNVTWFHAIHVSGTNGTKRFDNPVLPFNDGVYFASTEKSNIIRGWIFGTTLDSKTQSLLIVNNATNVVIKVCEFQFCNDPFLGVYYHKNNKSWMESEFRVYSSANNCTFEYVSQPFLMDLEGKQGNFKNLREFVFKNIDGYFKIYSKHTPINLVRDLPQGFSALEPLVDLPIGINITRFQTLLALHRSYLTPGDSSSGWTAGAAAYYVGYLQPRTFLLKYNENGTITDAVDCALDPLSETKCTLKSFTVEKGIYQTSNFRVQPTESIVRFPNITNLCPFGEVFNATRFASVYAWNRKRISNCVADYSVLYNSASFSTFKCYGVSPTKLNDLCFTNVYADSFVIRGDEVRQIAPGQTGKIADYNYKLPDDFTGCVIAWNSNNLDSKVGGNYNYLYRLFRKSNLKPFERDISTEIYQAGSTPCNGVEGFNCYFPLQSYGFQPTNGVGYQPYRVVVLSFELLHAPATVCGPKKSTNLVKNKCVNFNFNGLTGTGVLTESNKKFLPFQQFGRDIADTTDAVRDPQTLEILDITPCSFGGVSVITPGTNTSNQVAVLYQGVNCTEVPVAIHADQLTPTWRVYSTGSNVFQTRAGCLIGAEHVNNSYECDIPIGAGICASYQTQTNSPRRARSVASQSIIAYTMSLGAENSVAYSNNSIAIPTNFTISVTTEILPVSMTKTSVDCTMYICGDSTECSNLLLQYGSFCTQLNRALTGIAVEQDKNTQEVFAQVKQIYKTPPIKDFGGFNFSQILPDPSKPSKRSFIEDLLFNKVTLADAGFIKQYGDCLGDIAARDLICAQKFNGLTVLPPLLTDEMIAQYTSALLAGTITSGWTFGAGAALQIPFAMQMAYRFNGCGVTQNVLYENQKLIANQFNSAIGKIQDSLSSTASALGKLQDVVNQNAQALNTLVKQLSSNFGAISSVLNDILSRLDKVEAEVQIDRLITGRLQSLQTYVTQQLIRAAEIRASANLAATKMSECVLGQSKRVDFCGKGCHLMSFPQSAPHGVVFLHVTYVPAQEKNFTTAPAICHDGKAHFPREGVFVSNGTHWFVTQRNFYEPQIITTDNTFVSGNCDVVIGIVNNTVYDPLQPELDSGGGGSDIIKLLNEQVNKEMQSSNLYMSMSSWCYTHSLDGAGLFLFDHAAEEYEHAKKLIIFLNENNVPVQLTSISAPEHKFEGLTQIFQKAYEHEQHISESINNIVDHAIKSKDHATFNFLQWYVAEQHEEEVLFKDILDKIELIGNENHGLYLADQYVKGIAKSRKS

SEQ ID NO: 9294 - protein, 1315 aa, Artificial Sequence
  SARS-CoV-2/Belgium/ULG-6939/2020__EPI_ISL_417020 spike protein (1-1147)(I909C_Y1047C) Ferritin construct
MFVFLVLLPLVSSQCVNLTTRTQLPPAYTNSFTRGVYYPDKVFRSSVLHSTQDLFLPFFSNVTWFHAIHVSGTNGTKRFDNPVLPFNDGVYFASTEKSNIIRGWIFGTTLDSKTQSLLIVNNATNVVIKVCEFQFCNDPFLGVYYHKNNKSWMESEFRVYSSANNCTFEYVSQPFLMDLEGKQGNFKNLREFVFKNIDGYFKIYSKHTPINLVRDLPQGFSALEPLVDLPIGINITRFQTLLALHRSYLTPGDSSSGWTAGAAAYYVGYLQPRTFLLKYNENGTITDAVDCALDPLSETKCTLKSFTVEKGIYQTSNFRVQPTESIVRFPNITNLCPFGEVFNATRFASVYAWNRKRISNCVADYSVLYNSASFSTFKCYGVSPTKLNDLCFTNVYADSFVIRGDEVRQIAPGQTGKIADYNYKLPDDFTGCVIAWNSNNLDSKVGGNYNYLYRLFRKSNLKPFERDISTEIYQAGSTPCNGVEGFNCYFPLQSYGFQPTNGVGYQPYRVVVLSFELLHAPATVCGPKKSTNLVKNKCVNFNFNGLTGTGVLTESNKKFLPFQQFGRDIADTTDAVRDPQTLEILDITPCSFGGVSVITPGTNTSNQVAVLYQGVNCTEVPVAIHADQLTPTWRVYSTGSNVFQTRAGCLIGAEHVNNSYECDIPIGAGICASYQTQTNSPRRARSVASQSIIAYTMSLGAENSVVYSNNSIAIPTNFTISVTTEILPVSMTKTSVDCTMYICGDSTECSNLLLQYGSFCTQLNRALTGIAVEQDKNTQEVFAQVKQIYKTPPIKDFGGFNFSQILPDPSKPSKRSFIEDLLFNKVTLADAGFIKQYGDCLGDIAARDLICAQKFNGLTVLPPLLTDEMIAQYTSALLAGTITSGWTFGAGAALQIPFAMQMAYRFNGCGVTQNVLYENQKLIANQFNSAIGKIQDSLSSTASALGKLQDVVNQNAQALNTLVKQLSSNFGAISSVLNDILSRLDKVEAEVQIDRLITGRLQSLQTYVTQQLIRAAEIRASANLAATKMSECVLGQSKRVDFCGKGCHLMSFPQSAPHGVVFLHVTYVPAQEKNFTTAPAICHDGKAHFPREGVFVSNGTHWFVTQRNFYEPQIITTDNTFVSGNCDVVIGIVNNTVYDPLQPELDSGGGGSDIIKLLNEQVNKEMQSSNLYMSMSSWCYTHSLDGAGLFLFDHAAEEYEHAKKLIIFLNENNVPVQLTSISAPEHKFEGLTQIFQKAYEHEQHISESINNIVDHAIKSKDHATFNFLQWYVAEQHEEEVLFKDILDKIELIGNENHGLYLADQYVKGIAKSRKS

SEQ ID NO: 9295 - protein, 1315 aa, Artificial Sequence
  SARS-CoV-2/France/HF2496/2020__EPI_ISL_418231 spike protein (1-1147)(I909C_Y1047C) Ferritin construct
MFVFLVLLPLVSSQCVNLTTRTQLPPAYTNSFTRGVYYPDKVFRSSVLHSTQDLFLPFFSNVTWFHAIHVSGTNGTKRFDNPVLPFNDGVYFASTEKSNIIRGWIFGTTLDSKTQSLLIVNNATNVVIKVCEFQFCNDPFLGVYYHKNNKSWMESEFRVYSSANNCTFEYVSQPFLMDLEGKQGNFKNLREFVFKNIDGYFKIYSKHTPINLVRDLPQGFSALEPLVDLPIGINITRFQTLLALHRSYLTPGDSSSGWTAGAAAYYVGYLQPRTFLLKYNENGTITDAVDCALDPLSETKCTLKSFTVEKGIYQTSNFRVQPTESIVRFPNITNLCPFGEVFNATRFASVYAWNRKRISNCVADYSVLYNSASFSTFKCYGVSPTKLNDLCFTNVYADSFVIRGDEVRQIAPGQTGKIADYNYKLPDDFTGCVIAWNSNNLDSKVGGNYNYLYRLFRKSNLKPFERDISTEIYQAGSTPCNGVEGFNCYFPLQSYGFQPTNGVGYQPYRVVVLSFELLHAPATVCGPKKSTNLVKNKCVNFNFNGLTGTGVLTESNKKFLPFQQFGRDIADTTDAVRDPQTLEILDITPCSFGGVSVITPGTNTSNQVAVLYQGVNCTEVPVAIHADQLTPTWRVYSTGSNVFQTRAGCLIGAEHVNNSYECDIPIGAGICASYQTQTNSPRRARSVASQSIIAYTMSLGAENSVAYSNNSIAIPTNFTISVTTEILPVSMTKTSVDCTMYICGDSTECSNLLLQYGSFCTQLNRALTGIAVEQDKNTQEVFAQVKQIYKTPPIKDFGGFNFSQILPDPSKPSKRSFIEDLLFNKVTLADAGFIKQYGDCLGDIVARDLICAQKFNGLTVLPPLLTDEMIAQYTSALLAGTITSGWTFGAGAALQIPFAMQMAYRFNGCGVTQNVLYENQKLIANQFNSAIGKIQDSLSSTASALGKLQDVVNQNAQALNTLVKQLSSNFGAISSVLNDILSRLDKVEAEVQIDRLITGRLQSLQTYVTQQLIRAAEIRASANLAATKMSECVLGQSKRVDFCGKGCHLMSFPQSAPHGVVFLHVTYVPAQEKNFTTAPAICHDGKAHFPREGVFVSNGTHWFVTQRNFYEPQIITTDNTFVSGNCDVVIGIVNNTVYDPLQPELDSGGGGSDIIKLLNEQVNKEMQSSNLYMSMSSWCYTHSLDGAGLFLFDHAAEEYEHAKKLIIFLNENNVPVQLTSISAPEHKFEGLTQIFQKAYEHEQHISESINNIVDHAIKSKDHATFNFLQWYVAEQHEEEVLFKDILDKIELIGNENHGLYLADQYVKGIAKSRKS

SEQ ID NO: 9296 - protein, 1315 aa, Artificial Sequence
  SARS-CoV-2/USA/WA-UW291/2020__EPI_ISL_418076 spike protein (1-1147)(I909C_Y1047C) Ferritin construct
MFVFLVLLPLVSSQCVNLTTRTQLPPAYTNSFTRGVYYPDKVFRSSVLHSTQDLFLPFFSNVTWFHAIHVSGTNGTKRFDNPVLPFNDGVYFASTEKSNIIRGWIFGTTLDSKTQSLLIVNNATNVVIKVCEFQFCNDPFLGVYYHKNNKSWMESEFRVYSSANNCTFEYVSQPFLMDLEGKQGNFKNLREFVFKNIDGYFKIYSKHTPINLVRDLPQGFSALEPLVDLPIGINITRFQTLLALHRSYLTPGDSSSGWTAGAAAYYVGYLQPRTFLLKYNENGTITDAVDCALDPLSETKCTLKSFTVEKGIYQTSNFRVQPTESIVRFPNITNLCPFGEVFNATRFASVYAWNRKRISNCVADYSVLYNSASFSTFKCYGVSPTKLNDLCFTNVYADSFVIRGDEVRQIAPGQTGKIADYNYKLPDDFTGCVIAWNSNNLDSKVGGNYNYLYRLFRKSNLKPFERDISTEIYQAGSTPCNGVEGFNCYFPLQSYGFQPTNGVGYQPYRVVVLSFELLHAPATVCGPKKSTNLVKNKCVNFNFNGLTGTGVLTESNKKFLPFQQFGRDIADTTDAVRDPQTLEILDITPCSFGGVSVITPGTNTSNQVAVLYQGVNCTEVPVAIHADQLTPTWRVYSTGSNVFQTRAGCLIGAEHVNNSYECDIPIGAGICASYQTQTNSPRRARSVASQSIIAYTMSLGAENSVAYSNNSIAIPTNFTISVTTEILPVSMTKTSVDCTMYICGDSTECSNLLLQYGSFCTQLNRALTGIAVEQDKNTQEVFAQVKQIYKTPPIKDFGGFNFSQILPDPSKPSKRSFIEDLLFNKVTLADAGFIKQYGDCLGDIAARDLICAQKFNGLTVLPPLLTDEMIAQYTSALLAGTITSGWTFGAGAALQIPFAMQMAYRFNGCGVTQNVLYENQKLIANQFNSAIGKIQYSLSSTASALGKLQDVVNQNAQALNTLVKQLSSNFGAISSVLNDILSRLDKVEAEVQIDRLITGRLQSLQTYVTQQLIRAAEIRASANLAATKMSECVLGQSKRVDFCGKGCHLMSFPQSAPHGVVFLHVTYVPAQEKNFTTAPAICHDGKAHFPREGVFVSNGTHWFVTQRNFYEPQIITTDNTFVSGNCDVVIGIVNNTVYDPLQPELDSGGGGSDIIKLLNEQVNKEMQSSNLYMSMSSWCYTHSLDGAGLFLFDHAAEEYEHAKKLIIFLNENNVPVQLTSISAPEHKFEGLTQIFQKAYEHEQHISESINNIVDHAIKSKDHATFNFLQWYVAEQHEEEVLFKDILDKIELIGNENHGLYLADQYVKGIAKSRKS

SEQ ID NO: 9297 - protein, 1315 aa, Artificial Sequence; identical to SEQ ID NO: 9260
  SARS-CoV-2/Portugal/PT0034/2020__EPI_ISL_418019 spike protein (1-1147)(I909C_Y1047C) Ferritin construct

SEQ ID NO: 9298 - protein, 1315 aa, Artificial Sequence; identical to SEQ ID NO: 9252
  SARS-CoV-2/Iceland/202/2020__EPI_ISL_417750 spike protein (1-1147)(I909C_Y1047C) Ferritin construct

SEQ ID NO: 9299 - protein, 1315 aa, Artificial Sequence
  SARS-CoV-2/USA/WA-UW261/2020__EPI_ISL_418046 spike protein (1-1147)(I909C_Y1047C) Ferritin construct
MFVFLVLLPLVSSQCVNLTTRTQLPPAYTNSFTRGVYYPDKVFRSSVLHSTQDLFLPFFSNVTWFHAIHVSGTNGTKRFDNPVLPFNDGVYFASTEKSNIIRGWIFGTTLDSKTQSLLIVNNATNVVIKVCEFQFCNDPFLGVYYHKNNKSWMESEFRVYSSANNCTFEYVSQPFLMDLEGKQGNFKNLREFVFKNIDGYFKIYSKHTPINLVRDLPQGFSALEPLVDLPIGINITRFQTLLALHRSYLTPGDSSSGWTAGAAAYYVGYLQPRTFLLKYNENGTITDAVDCALDPLSETKCTLKSFTVEKGIYQTSNFRVQPTESIVRFPNITNLCPFGEVFNATRFTSVYAWNRKRISNCVADYSVLYNSASFSTFKCYGVSPTKLNDLCFTNVYADSFVIRGDEVRQIAPGQTGKIADYNYKLPDDFTGCVIAWNSNNLDSKVGGNYNYLYRLFRKSNLKPFERDISTEIYQAGSTPCNGVEGFNCYFPLQSYGFQPTNGVGYQPYRVVVLSFELLHAPATVCGPKKSTNLVKNKCVNFNFNGLTGTGVLTESNKKFLPFQQFGRDIADTTDAVRDPQTLEILDITPCSFGGVSVITPGTNTSNQVAVLYQDVNCTEVPVAIHADQLTPTWRVYSTGSNVFQTRAGCLIGAEHVNNSYECDIPIGAGICASYQTQTNSPRRARSVASQSIIAYTMSLGAENSVAYSNNSIAIPTNFTISVTTEILPVSMTKTSVDCTMYICGDSTECSNLLLQYGSFCTQLNRALTGIAVEQDKNTQEVFAQVKQIYKTPPIKDFGGFNFSQILPDPSKPSKRSFIEDLLFNKVTLADAGFIKQYGDCLGDIAARDLICAQKFNGLTVLPPLLTDEMIAQYTSALLAGTITSGWTFGAGAALQIPFAMQMAYRFNGCGVTQNVLYENQKLIANQFNSAIGKIQDSLSSTASALGKLQDVVNQNAQALNTLVKQLSSNFGAISSVLNDILSRLDKVEAEVQIDRLITGRLQSLQTYVTQQLIRAAEIRASANLAATKMSECVLGQSKRVDFCGKGCHLMSFPQSAPHGVVFLHVTYVPAQEKNFTTAPAICHDGKAHFPREGVFVSNGTHWFVTQRNFYEPQIITTDNTFVSGNCDVVIGIVNNTVYDPLQPELDSGGGGSDIIKLLNEQVNKEMQSSNLYMSMSSWCYTHSLDGAGLFLFDHAAEEYEHAKKLIIFLNENNVPVQLTSISAPEHKFEGLTQIFQKAYEHEQHISESINNIVDHAIKSKDHATFNFLQWYVAEQHEEEVLFKDILDKIELIGNENHGLYLADQYVKGIAKSRKS

SEQ ID NO: 9300 - protein, 1315 aa, Artificial Sequence
  SARS-CoV-2/Portugal/PT0035/2020__EPI_ISL_418020 spike protein (1-1147)(I909C_Y1047C) Ferritin construct
MFVFLVLLPLVSSQCVNLTTRTQLPPAYTNSFTRGVYYPDKVFRSSVLHSTQDLFLPFFSNVTWFHAIHVSGTNGTKRFDNPVLPFNDGVYFASTEKSNIIRGWIFGTTLDSKTQSLLIVNNATNVVIKVCEFQFCNDPFLGVYYHKNNKSWMESEFRVYSSANNCTFEYVSQPFLMDLEGKQGNFKNLREFVFKNIDGYFKIYSKHTPINLVRDLPQGFSALEPLVDLPIGINITRFQTLLALHRSYLTPGDSSSGWTAGAAAYYVGYLQPRTFLLKYNENGTITDAVDCALDPLSETKCTLKSFTVEKGIYQTSNFRVQPTESIVRFPNITNLCPFGEVFNATRFASVYAWNRKRISNCVADYSVLYNSASFSTFKCYGVSPTKLNDLCFTNVYADSFVIRGDEVRQIAPGQTGKIADYNYKLPDDFTGCVIAWNSNNLDSKVGGNYNYLYRLFRKSNLKPFERDISTEIYQAGSTPCNGVEGFNCYFPLQSYGFQPTNGVGYQPYRVVVLSFELLHAPATVCGPKKSTNLVKNKCVNFNFNGLTGTGVLTESNKKFLPFQQFGRDIADTTDAVRDPQTLEILDITPCSFGGVSVITPGTNTSNQVAVLYQDVNCTEVPVAIHADQLTPTWRVYSTGSNVFQTRAGCLIGAEHVNNSYECDIPIGAGICASYQTQTNSPRRARSVASQSIIAYTMSLGAENSVAYSNNSIAIPTNFTISVTTEILPVSMTKTSVDCTMYICGDSTECSNLLLQYGSFCTQLNRALTGIAVEQDKNTQEVFAQVKQIYKTPPIKDFGGFNFSQILPDPSKPSKRSFIEDLLFNKVTLADAGFIKQYGDCLGDISARDLICAQKFNGLTVLPPLLTDEMIAQYTSALLAGTITSGWTFGAGAALQIPFAMQMAYRFNGCGVTQNVLYENQKLIANQFNSAIGKIQDSLSSTASALGKLQDVVNQNAQALNTLVKQLSSNFGAISSVLNDILSRLDKVEAEVQIDRLITGRLQSLQTYVTQQLIRAAEIRASANLAATKMSECVLGQSKRVDFCGKGCHLMSFPQSAPHGVVFLHVTYVPAQEKNFTTAPAICHDGKAHFPREGVFVSNGTHWFVTQRNFYEPQIITTDNTFVSGNCDVVIGIVNNTVYDPLQPELDSGGGGSDIIKLLNEQVNKEMQSSNLYMSMSSWCYTHSLDGAGLFLFDHAAEEYEHAKKLIIFLNENNVPVQLTSISAPEHKFEGLTQIFQKAYEHEQHISESINNIVDHAIKSKDHATFNFLQWYVAEQHEEEVLFKDILDKIELIGNENHGLYLADQYVKGIAKSRKS

SEQ ID NO: 9301 - protein, 1315 aa, Artificial Sequence
  SARS-CoV-2/USA/NY-NYUMC7/2020__EPI_ISL_418192 spike protein (1-1147)(I909C_Y1047C) Ferritin construct
MFVFLVLLPLVSSQCVNLTTRTQLPPAYTNSFTRGVYYPDKVFRSSVLHSTQDLFLPFFSNVTWFHAIHVSGTNGTKRFDNPVLPFNDGVYFASTEKSNIIRGWIFGTTLDSKTQSLLIVNNATNVVIKVCEFQFCNDPFLGVYHHKNNKSWMESEFRVYSSANNCTFEYVSQPFLMDLEGKQGNFKNLREFVFKNIDGYFKIYSKHTPINLVRDLPQGFSALEPLVDLPIGINITRFQTLLALHRSYLTPGDSSSGWTAGAAAYYVGYLQPRTFLLKYNENGTITDAVDCALDPLSETKCTLKSFTVEKGIYQTSNFRVQPTESIVRFPNITNLCPFGEVFNATRFASVYAWNRKRISNCVADYSVLYNSASFSTFKCYGVSPTKLNDLCFTNVYADSFVIRGDEVRQIAPGQTGKIADYNYKLPDDFTGCVIAWNSNNLDSKVGGNYNYLYRLFRKSNLKPFERDISTEIYQAGSTPCNGVEGFNCYFPLQSYGFQPTNGVGYQPYRVVVLSFELLHAPATVCGPKKSTNLVKNKCVNFNFNGLTGTGVLTESNKKFLPFQQFGRDIADTTDAVRDPQTLEILDITPCSFGGVSVITPGTNTSNQVAVLYQGVNCTEVPVAIHADQLTPTWRVYSTGSNVFQTRAGCLIGAEHVNNSYECDIPIGAGICASYQTQTNSPRRARSVASQSIIAYTMSLGAENSVAYSNNSIAIPTNFTISVTTEILPVSMTKTSVDCTMYICGDSTECSNLLLQYGSFCTQLNRALTGIAVEQDKNTQEVFAQVKQIYKTPPIKDFGGFNFSQILPDPSKPSKRSFIEDLLFNKVTLADAGFIKQYGDCLGDIAARDLICAQKFNGLTVLPPLLTDEMIAQYTSALLAGTITSGWTFGAGAALQIPFAMQMAYRFNGCGVTQNVLYENQKLIANQFNSAIGKIQDSLSSTASALGKLQDVVNQNAQALNTLVKQLSSNFGAISSVLNDILSRLDKVEAEVQIDRLITGRLQSLQTYVTQQLIRAAEIRASANLAATKMSECVLGQSKRVDFCGKGCHLMSFPQSAPHGVVFLHVTYVPAQEKNFTTAPAICHDGKAHFPREGVFVSNGTHWFVTQRNFYEPQIITTDNTFVSGNCDVVIGIVNNTVYDPLQPELDSGGGGSDIIKLLNEQVNKEMQSSNLYMSMSSWCYTHSLDGAGLFLFDHAAEEYEHAKKLIIFLNENNVPVQLTSISAPEHKFEGLTQIFQKAYEHEQHISESINNIVDHAIKSKDHATFNFLQWYVAEQHEEEVLFKDILDKIELIGNENHGLYLADQYVKGIAKSRKS

SEQ ID NO: 9302 - protein, 1315 aa, Artificial Sequence
  SARS-CoV-2/Iceland/189/2020__EPI_ISL_417709 spike protein (1-1147)(I909C_Y1047C) Ferritin construct
MFVFLVLLPLVSSQCVNLTTRTQLPPAYTNSFTRGVYYPDKVFRSSVLHSTQDLFLPFFSNVTWFHAIHVSGTNGTKRFDNPVLPFNDGVYFASTEKSNIIRGWIFGTTLDSKTQSLLIVNNATNVVIKVCEFQFCNDPFLGVYYHKNNKSWMESEFRVYSSANNCTFEYVSQPFLMDLEGKQGNFKNLREFVFKNIDGYFKIYSKHTPINLVRDLPQGFSALEPLVDLPIGINITRFQTLLALHRSYLTPGDSSSGWTAGAAAYYVGYLQPRTFLLKYNENGTITDAVDCALDPLSETKCTLKSFTVEKGIYQTSNFRVQPTESIVRFPNITNLCPFGEVFNATRFASVYAWNRKRISNCVADYSVLYNSASFSTFKCYGVSPTKLNDLCFTNVYADSFVIRGDEVRQIAPGQTGKIADYNYKLPDDFTGCVIAWNSNNLDSKVGGNYNYLYRLFRKSNLKPFERDISTEIYQAGSTPCNGVEGFNCYFPLQSYGFQPTNGVGYQPYRVVVLSFELLHAPATVCGPKKSTNLVKNKCVNFNFNGLTGTGVLTESNKKFLPFQQFGRDIADTTDAVRDPQTLEILDITPCSFGGVSVITPGTNTSNQVAVLYQGVNCTEVPVAIHADQLTPTWRVYSTGSNVFQTRAGCLIGAEHVNNSYECDIPIGAGICASYQTQTNSPRRARSVASQSIIAYTMSLGAENSVAYSNNSIAIPTNFTISVTTEILPVSMTKTSVDCTMYICGDSTECSNLLLQYGSFCTQLNRALTGIAVEQDKNTQEVFAQVKQIYKTPPIKDFGGFNFSQILPDPSKPSKRSFIEDLLFNKVTLADAGFTKQYGDCLGDIAARDLICAQKFNGLTVLPPLLTDEMIAQYTSALLAGTITSGWTFGAGAALQIPFAMQMAYRFNGCGVTQNVLYENQKLIANQFNSAIGKIQDSLSSTASALGKLQDVVNQNAQALNTLVKQLSSNFGAISSVLNDILSRLDKVEAEVQIDRLITGRLQSLQTYVTQQLIRAAEIRASANLAATKMSECVLGQSKRVDFCGKGCHLMSFPQSAPHGVVFLHVTYVPAQEKNFTTAPAICHDGKAHFPREGVFVSNGTHWFVTQRNFYEPQIITTDNTFVSGNCDVVIGIVNNTVYDPLQPELDSGGGGSDIIKLLNEQVNKEMQSSNLYMSMSSWCYTHSLDGAGLFLFDHAAEEYEHAKKLIIFLNENNVPVQLTSISAPEHKFEGLTQIFQKAYEHEQHISESINNIVDHAIKSKDHATFNFLQWYVAEQHEEEVLFKDILDKIELIGNENHGLYLADQYVKGIAKSRKS

SEQ ID NO: 9303 - protein, 1315 aa, Artificial Sequence
  SARS-CoV-2/Australia/NSW56/2020__EPI_ISL_417408 spike protein (1-1147)(I909C_Y1047C) Ferritin construct
MFVFLVLLPLVSSQCVNLTTRTQLPPAYTNSFTRGVYYPDKVFRSSVLHSTQDLFLPFFSNVTWFHAIHVSGTNGTKRFDNPVLPFNDGVYFASTEKSNIIRGWIFGTTLDSKTQSLLIVNNATNVVIKVCEFQFCNDPFLGVYYHKNNKSWMESEFRVYSSANNCTFEYVSQPFLMDLEGKQGNFKNLREFVFKNIDGYFKIYSKHTPINLVRDLPQGFSALEPLVDLPIGINITRFQTLLALHRSYLTPGDSSSGWTAGAAAYYVGYLQPRTFLLKYNENGTITDAVDCALDPLSETKCTLKSFTVEKGIYQTSNFRVQPTESIVRFPNITNLCPFGEVFNATRFASVYAWNRKRISNCVADYSVLYNSASFSTFKCYGVSPTKLNDLCFTNVYADSFVIRGDEVRQIAPGQTGKIADYNYKLPDDFTGCVIAWNSNNLDSKVGGNYNYLYRLFRKSNLKPFERDISTEIYQAGSTPCNGVEGFNCYFPLQSYGFQPTNGVGYQPYRVVVLSFELLHAPATVCGPKKSTNLVKNKCVNFNFNGLTGTGVLTESNKKFLPFQQFGRDIADTTDAVRDPQTLEILDITPCSFGGVSVITPGTNTSNQVAVLYQDVNCTEVPVAIHADQLTPTWRVYSTGSNVFQTRAGCLIGAEHVNNSYECDIPIGAGICASYQTQTNSPRRARSVASQSIIAYTMSLGAENSVAYSNNSIAIPTNFTISVTTEILPVSMTKTSVDCTMYICGDSTECSNLLLQYGSFCTQLNRALTGIAVEQDKNTQEVFAQVKQIYKTPPIKDFGGFNFSQILPDSSKPSKRSFIEDLLFNKVTLADAGFIKQYGDCLGDIAARDLICAQKFNGLTVLPPLLTDEMIAQYTSALLAGTITSGWTFGAGAALQIPFAMQMAYRFNGCGVTQNVLYENQKLIANQFNSAIGKIQDSLSSTASALGKLQDVVNQNAQALNTLVKQLSSNFGAISSVLNDILSRLDKVEAEVQIDRLITGRLQSLQTYVTQQLIRAAEIRASANLAATKMSECVLGQSKRVDFCGKGCHLMSFPQSAPHGVVFLHVTYVPAQEKNFTTAPAICHDGKAHFPREGVFVSNGTHWFVTQRNFYEPQIITTDNTFVSGNCDVVIGIVNNTVYDPLQPELDSGGGGSDIIKLLNEQVNKEMQSSNLYMSMSSWCYTHSLDGAGLFLFDHAAEEYEHAKKLIIFLNENNVPVQLTSISAPEHKFEGLTQIFQKAYEHEQHISESINNIVDHAIKSKDHATFNFLQWYVAEQHEEEVLFKDILDKIELIGNENHGLYLADQYVKGIAKSRKS

SEQ ID NO: 9304 - protein, 1315 aa, Artificial Sequence
  SARS-CoV-2/Iceland/280/2020__EPI_ISL_417608 spike protein (1-1147)(I909C_Y1047C) Ferritin construct
MFVFLVLLPLVSSQCVNLTTRTQLPPAYTNSFTRGVYYPDKVFRSSVLHSTQDLFLPFFSNVTWFHAIHVSGTNGTKRFDNPVLPFNDGVYFASTEKSNIIRGWIFGTTLDSKTQSLLIVNNATNVVIKVCEFQFCNDPFLGVYYHKNNKSWMESEFRVYSSANNCTFEYVSQPFLMDLEGKQGNFKNLREFVFKNIDGYFKIYSKHTPINLVRDLPQGFSALEPLVDLPIGINITRFQTLLALHRSYLTPGDSSSGWTAGAAAYYVGYLQPRTFLLKYNENGTITDAVDCALDPLSETKCTLKSFTVEKGIYQTSNFRVQPTESIVRFPNITNLCPFGEVFNATRFASVYAWNRKRISNCVADYSVLYNSASFSTFKCYGVSPTKLNDLCFTNVYADSFVIRGDEVRQIAPGQTGKIADYNYKLPDDFTGCVIAWNSNNLDSKVGGNYNYLYRLFRKSNLKPFERDISTEIYQAGSTPCNGVEGFNCYFPLQSYGFQPTNGVGYQPYRVVVLSFELLHAPATVCGPKKSTNLVKNKCVNFNFNGLTGTGVLTESNKKFLPFQQFGRDIADTTDAVRDPQTLEILDITPCSFGGVSVITPGTNTSNQVAVLYQGVNCTEVPVAIHADQLTPTWRVYSTGSNVFQTRAGCLIGAEHVNNSYECDIPIGAGICASYHTQTNSPRRARSVASQSIIAYTMSLGAENSVAYSNNSIAIPTNFTISVTTEILPVSMTKTSVDCTMYICGDSTECSNLLLQYGSFCTQLNRALTGIAVEQDKNTQEVFAQVKQIYKTPPIKDFGGFNFSQILPDPSKPSKRSFIEDLLFNKVTLADAGFIKQYGDCLGDIAARDLICAQKFNGLTVLPPLLTDEMIAQYTSALLAGTITSGWTFGAGAALQIPFAMQMAYRFNGCGVTQNVLYENQKLIANQFNSAIGKIQDSLSSTASALGKLQDVVNQNAQALNTLVKQLSSNFGAISSVLNDILSRLDKVEAEVQIDRLITGRLQSLQTYVTQQLIRAAEIRASANLAATKMSECVLGQSKRVDFCGKGCHLMSFPQSAPHGVVFLHVTYVPAQEKNFTTAPAICHDGKAHFPREGVFVSNGTHWFVTQRNFYEPQIITTDNTFVSGNCDVVIGIVNNTVYDPLQPELDSGGGGSDIIKLLNEQVNKEMQSSNLYMSMSSWCYTHSLDGAGLFLFDHAAEEYEHAKKLIIFLNENNVPVQLTSISAPEHKFEGLTQIFQKAYEHEQHISESINNIVDHAIKSKDHATFNFLQWYVAEQHEEEVLFKDILDKIELIGNENHGLYLADQYVKGIAKSRKS

SEQ ID NO: 9305 - protein, 1315 aa, Artificial Sequence; identical to SEQ ID NO: 9260
  SARS-CoV-2/Iceland/247/2020__EPI_ISL_417575 spike protein (1-1147)(I909C_Y1047C) Ferritin construct

SEQ ID NO: 9306 - protein, 1315 aa, Artificial Sequence
  SARS-CoV-2/Iceland/238/2020__EPI_ISL_417566 spike protein (1-1147)(I909C_Y1047C) Ferritin construct
MFVFLVLLPLVSSQCVNLTTRTQLPPAYTNSFTRGVYYPDKVFRSSVLHSTQDLFLPFFSNVTWFHAIHVSGTNGTKRFDNPVLPFNDGVYFASTEKSNIIRGWIFGTTLDSKTQSLLIVNNATNVVIKVCEFQFCNDPFLGVYYHKNNKSWMESEFRVYSSANNCTFEYVSQPFLMDLEGKQGNFKNLREFVFKNIDGYFKIYSKHTPINLVRDLPQGFSALEPLVDLPIGINITRFQTLLALHRSYLTPGDSSSGWTAGAAAYYVGYLQPRTFLLKYNENGTITDAVDCALDPLSETKCTLKSFTVEKGIYQTSNFRVQPTESIVRFPNITNLCPFGEVFNATRFASVYAWNRKRISNCVADYSVLYNSASFSTFKCYGVSPTKLNDLCFTNVYADSFVIRGDEVRQIAPGQTGKIADYNYKLPDDFTGCVIAWNSNNLDSKVGGNYNYLYRLFRKSNLKPFERDISTEIYQAGSTPCNGVEGFNCYFPLQSYGFQPTNGVGYQPYRVVVLSFELLHAPATVCGPKKSTNLVKNKCVNFNFNGLTGTGVLTESNKKFLPFQQFGRDIADTTDAVRDPQTLEILDITPCSFGGVSVITPGTNTSNQVAVLYQGVNCTEVPVAIHADQLTPTWRVYSTGSNVFQTRAGCLIGAEHVNNSYECDIPIGAGICASYQTQTNSPRRARSVASQSIIAYTMSLGAENSVAYSNNSIAIPTNFTISVTTEILPVSMTKTSVDCTMYICGDSTECSNLLLQYGSFCTQLNRALTGIAVEQDKNTQEVFAQVKQIYKTPPIKDFGGFNFSQILPDPSKPSKRSFIEDLLFNKVTLADVGFIKQYGDCLGDIAARDLICAQKFNGLTVLPPLLTDEMIAQYTSALLAGTITSGWTFGAGAALQIPFAMQMAYRFNGCGVTQNVLYENQKLIANQFNSAIGKIQDSLSSTASALGKLQDVVNQNAQALNTLVKQLSSNFGAISSVLNDILSRLDKVEAEVQIDRLITGRLQSLQTYVTQQLIRAAEIRASANLAATKMSECVLGQSKRVDFCGKGCHLMSFPQSAPHGVVFLHVTYVPAQEKNFTTAPAICHDGKAHFPREGVFVSNGTHWFVTQRNFYEPQIITTDNTFVSGNCDVVIGIVNNTVYDPLQPELDSGGGGSDIIKLLNEQVNKEMQSSNLYMSMSSWCYTHSLDGAGLFLFDHAAEEYEHAKKLIIFLNENNVPVQLTSISAPEHKFEGLTQIFQKAYEHEQHISESINNIVDHAIKSKDHATFNFLQWYVAEQHEEEVLFKDILDKIELIGNENHGLYLADQYVKGIAKSRKS

SEQ ID NO: 9307 - protein, 1315 aa, Artificial Sequence
  SARS-CoV-2/Greece/16/2020__EPI_ISL_418265 spike protein (1-1147)(I909C_Y1047C) Ferritin construct
MFVFLVLLPLVSSQCVNLTTRTQLPPAYTNSFTRGVYYPDKVFRSSVLHSTQDLFLPFFSNVTWFHAIHVSGTNGTKRFDNPVLPFNDGVYFASTEKSNIIRGWIFGTTLDSKTQSLLIVNNATNVVIKVCEFQFCNDPFLGVYYHKNNKSWMESEFRVYSSANNCTFEYVSQPFLMDLEGKQGNFKNLREFVFKNVDGYFKIYSKHTPINLVRDLPQGFSALEPLVDLPIGINITRFQTLLALHRSYLTPGDSSSGWTAGAAAYYVGYLQPRTFLLKYNENGTITDAVDCALDPLSETKCTLKSFTVEKGIYQTSNFRVQPTESIVRFPNITNLCPFGEVFNATRFASVYAWNRKRISNCVADYSVLYNSASFSTFKCYGVSPTKLNDLCFTNVYADSFVIRGDEVRQIAPGQTGKIADYNYKLPDDFTGCVIAWNSNNLDSKVGGNYNYLYRLFRKSNLKPFERDISTEIYQAGSTPCNGVEGFNCYFPLQSYGFQPTNGVGYQPYRVVVLSFELLHAPATVCGPKKSTNLVKNKCVNFNFNGLTGTGVLTESNKKFLPFQQFGRDIADTTDAVRDPQTLEILDITPCSFGGVSVITPGTNTSNQVAVLYQDVNCTEVPVAIHADQLTPTWRVYSTGSNVFQTRAGCLIGAEHVNNSYECDIPIGAGICASYQTQTNSPRRARSVASQSIIAYTMSLGAENSVAYSNNSIAIPTNFTISVTTEILPVSMTKTSVDCTMYICGDSTECSNLLLQYGSFCTQLNRALTGIAVEQDKNTQEVFAQVKQIYKTPPIKDFGGFNFSQILPDPSKPSKRSFIEDLLFNKVTLADAGFIKQYGDCLGDIAARDLICAQKFNGLTVLPPLLTDEMIAQYTSALLAGTITSGWTFGAGAALQIPFAMQMAYRFNGCGVTQNVLYENQKLIANQFNSAIGKIQDSLSSTASALGKLQDVVNQNAQALNTLVKQLSSNFGAISSVLNDILSRLDKVEAEVQIDRLITGRLQSLQTYVTQQLIRAAEIRASANLAATKMSECVLGQSKRVDFCGKGCHLMSFPQSAPHGVVFLHVTYVPAQEKNFTTAPAICHDGKAHFPREGVFVSNGTHWFVTQRNFYEPQIITTDNTFVSGNCDVVIGIVNNTVYDPLQPELDSGGGGSDIIKLLNEQVNKEMQSSNLYMSMSSWCYTHSLDGAGLFLFDHAAEEYEHAKKLIIFLNENNVPVQLTSISAPEHKFEGLTQIFQKAYEHEQHISESINNIVDHAIKSKDHATFNFLQWYVAEQHEEEVLFKDILDKIELIGNENHGLYLADQYVKGIAKSRKS

SEQ ID NO: 9308 - protein, 1315 aa, Artificial Sequence
  SARS-CoV-2/Iceland/319/2020__EPI_ISL_417648 spike protein (1-1147)(I909C_Y1047C) Ferritin construct
MFVFLVLLPLVSSQCVNLTTRTQLPPAYTNSFTRGVYYPDKVFRSSVLHSTQDLFLPFFSNVTWFHAIHVSGTNGTKRFDNPVLPFNDGVYFASTEKSNIIRGWIFGTTLDSKTQSLLIVNNATNVVIKVCEFQFCNDPFLGVYYHKNNKSWMESEFRVYSSANNCTFEYVSQPFLIDLEGKQGNFKNLREFVFKNIDGYFKIYSKHTPINLVRDLPQGFSALEPLVDLPIGINITRFQTLLALHRSYLTPGDSSSGWTAGAAAYYVGYLQPRTFLLKYNENGTITDAVDCALDPLSETKCTLKSFTVEKGIYQTSNFRVQPTESIVRFPNITNLCPFGEVFNATRFASVYAWNRKRISNCVADYSVLYNSASFSTFKCYGVSPTKLNDLCFTNVYADSFVIRGDEVRQIAPGQTGKIADYNYKLPDDFTGCVIAWNSNNLDSKVGGNYNYLYRLFRKSNLKPFERDISTEIYQAGSTPCNGVEGFNCYFPLQSYGFQPTNGVGYQPYRVVVLSFELLHAPATVCGPKKSTNLVKNKCVNFNFNGLTGTGVLTESNKKFLPFQQFGRDIADTTDAVRDPQTLEILDITPCSFGGVSVITPGTNTSNQVAVLYQGVNCTEVPVAIHADQLTPTWRVYSTGSNVFQTRAGCLIGAEHVNNSYECDIPIGAGICASYQTQTNSPRRARSVASQSIIAYTMSLGAENSVAYSNNSIAIPTNFTISVTTEILPVSMTKTSVDCTMYICGDSTECSNLLLQYGSFCTQLNRALTGIAVEQDKNTQEVFAQVKQIYKTPPIKDFGGFNFSQILPDPSKPSKRSFIEDLLFNKVTLADAGFIKQYGDCLGDIAARDLICAQKFNGLTVLPPLLTDEMIAQYTSALLAGTITSGWTFGAGAALQIPFAMQMAYRFNGCGVTQNVLYENQKLIANQFNSAIGKIQDSLSSTASALGKLQDVVNQNAQALNTLVKQLSSNFGAISSVLNDILSRLDKVEAEVQIDRLITGRLQSLQTYVTQQLIRAAEIRASANLAATKMSECVLGQSKRVDFCGKGCHLMSFPQSAPHGVVFLHVTYVPAQEKNFTTAPAICHDGKAHFPREGVFVSNGTHWFVTQRNFYEPQIITTDNTFVSGNCDVVIGIVNNTVYDPLQPELDSGGGGSDIIKLLNEQVNKEMQSSNLYMSMSSWCYTHSLDGAGLFLFDHAAEEYEHAKKLIIFLNENNVPVQLTSISAPEHKFEGLTQIFQKAYEHEQHISESINNIVDHAIKSKDHATFNFLQWYVAEQHEEEVLFKDILDKIELIGNENHGLYLADQYVKGIAKSRKS

SEQ ID NO: 9309 - protein, 1315 aa, Artificial Sequence
  SARS-CoV-2/Congo/94/2020__EPI_ISL_417947 spike protein (1-1147)(I909C_Y1047C) Ferritin construct
MFVFLVLLPLVSSQCVNLTTRTQLPPAYTNSFTRGVYYPDKVFRSSVLHSTQDLFLPFFSNVTWFHAIHVSGTNGTKRFDNPVLPFNDGVYFASTEKSNIIRGWIFGTTLDSKTQSLLIVNNATNVVIKVCEFQFCNDPFLGVYYHKNNKSWMESEFRVYSSANNCTFEYVSQPFLMDLEGKQGNFKNLREFVFKNIDGYFKIYSKHTPINLVRDLPQGFSALEPLVDLPIGINITRFQTLLALHRSYLTPGDSSSGWTAGAAAYYVGYLQPRTFLLKYNENGTITDAVDCALDPLSETKCTLKSFTVEKGIYQTSNFRVQPTESIVRFPNITNLCPFGEVFNATRFASVYAWNRKRISNCVADYSVLYNSASFSTFKCYGVSPTKLNDLCFTNVYADSFVIRGDEVRQIAPGQTGKIADYNYKLPDDFTGCVIAWNSNNLDSKVGGNYNYLYRLFRKSNLKPFERDISTEIYQAGSTPCNGVEGFNCYFPLQSYGFQPTNGVGYQPYRVVVLSFELLHAPATVCGPKKSTNLVKNKCVNFNFNGLTGTGVLTESNKKFLPFQQFGRDIADTTDAVRDPQTLEILDITPCSFGGVSVITPGTNTSNQVAVLYQGVNCTEVPVAIHADQLTPTWRVYSTGSNVFQTRAGCLIGAEHVNNSYECDIPIGAGICASYQTQTNSPRRARSVASQSIIAYTMSLGAENSVAYSNNSIAIPTNFTISVTTEILPVSMTKTSVDCTMYICGDSTECSNLLLQYGSFCTQLNRALTGIAVEQDKNTQEVFAQVKQIYKTPPIKDFGGFNFSQILPDPSKPSKRSFIEDILFNKVTLADAGFIKQYGDCLGDIAARDLICAQKFNGLTVLPPLLTDEMIAQYTSALLAGTITSGWTFGAGAALQIPFAMQMAYRFNGCGVTQNVLYENQKLIANQFNSAIGKIQDSLSSTASALGKLQDVVNQNAQALNTLVKQLSSNFGAISSVLNDILSRLDKVEAEVQIDRLITGRLQSLQTYVTQQLIRAAEIRASANLAATKMSECVLGQSKRVDFCGKGCHLMSFPQSAPHGVVFLHVTYVPAQEKNFTTAPAICHDGKAHFPREGVFVSNGTHWFVTQRNFYEPQIITTDNTFVSGNCDVVIGIVNNTVYDPLQPELDSGGGGSDIIKLLNEQVNKEMQSSNLYMSMSSWCYTHSLDGAGLFLFDHAAEEYEHAKKLIIFLNENNVPVQLTSISAPEHKFEGLTQIFQKAYEHEQHISESINNIVDHAIKSKDHATFNFLQWYVAEQHEEEVLFKDILDKIELIGNENHGLYLADQYVKGIAKSRKS

SEQ ID NO: 9310 - protein, 1315 aa, Artificial Sequence
  SARS-CoV-2/Congo/158/2020__EPI_ISL_417950 spike protein (1-1147)(I909C_Y1047C) Ferritin construct
MFVFLVLLPLVSSQCVNLTTRTQLPPAYTNSFTRGVYYPDKVFRSSVLHSTQDLFLPFFSNVTWFHAIHVSGTNGTKRFDNPVLPFNDGVYFASTEKSNIIRGWIFGTTLDSKTQSLLIVNNATNVVIKVCEFQFCNDPFLGVYYHKNNKSWMESEFRVYSSANNCTFEYVSQPFLMDLEGKQGNFKNLREFVFKNIDGYFKIYSKHTPINLVRDLPQGFSALEPLVDLPIGINITRFQTLLALHRSYLTPGDSSSGWTAGAAAYYVGYLQPRTFLLKYNENGTITDAVDCALDPLSETKCTLKSFTVEKGIYQTSNFRVQPTESIVRFPNITNLCPFGEVFNATRFASVYAWNRKRISNCVADYSVLYNSASFSTFKCYGVSPTKLNDLCFTNVYADSFVIRGDEVRQIAPGQTGKIADYNYKLPDDFTGCVIAWNSNNLDSKVGGNYNYLYRLFRKSNLKPFERDISTEIYQAGSTPCNGVEGFNCYFPLQSYGFQPTNGVGYQPYRVVVLSFELLHAPATVCGPKKSTNLVKNKCVNFNFNGLTGTGVLTESNKKFLPFQQFGRDIADTTDAVRDPQTLEILDITPCSFGGVSVITPGTNTSNQVAVLYQDVNCTEVPVAIHADQLTPTWRVYSTGSNVFQTRAGCLIGAEHVNNSYECDIPIGAGICASYQTQTNSPRRARSVASQSIIAYTMSLGAENSVAYSNNSIAIPTNFTISVTTEILPVSMTKTSVDCTMYICGDSTECSNLLLQYGSFCTQLNRALTGIAVEQDKNTQEVFAQVKQIYKTPPIKDFGGFNFSQILPDPSKPSKRSFIEDLLFNKVTLADAGFIKQYGDCLGDIAARDLICAQKFNGLTVLPPLLTDEMIAQYTSALLAGTITSGWTFGAGAALQIPFAMQMAYRFNGCGVTQNVLYENQKLIANQFNSAIGKIQDSLSSTASALGKLQDVVNQNAQALNTLVKQLSSNFGAISSVLNDILSRLDKVEAEVQIDRLITGRLQSLQTYVTQQLIRAAEIRASANLAATKMSECVLGQSKRVDFCGKGCHLMSFPQSAPHGVVFLHVTYVPAQEKNFTTAPAICHDGKAHFPREGVFVSNGTHWFVTQRNFYEPQIITTDNTFLSGNCDVVIGIVNNTVYDPLQPELDSGGGGSDIIKLLNEQVNKEMQSSNLYMSMSSWCYTHSLDGAGLFLFDHAAEEYEHAKKLIIFLNENNVPVQLTSISAPEHKFEGLTQIFQKAYEHEQHISESINNIVDHAIKSKDHATFNFLQWYVAEQHEEEVLFKDILDKIELIGNENHGLYLADQYVKGIAKSRKS

SEQ ID NO: 9311 - protein, 1315 aa, Artificial Sequence
  SARS-CoV-2/USA/UT-00034/2020__EPI_ISL_417977 spike protein (1-1147)(I909C_Y1047C) Ferritin construct
MFVFLVLLPLVSSQCVNLTTRTQLPPAYTNSFTRGVYYPDKVFRSSVLHSTQDLFLPFFSNVTWFHAIHVSGTNGTKRFDNPVLPFNDGVYFASTEKSNIIRGWIFGTTLDSKTQSLLIVNNATNVVIKVCEFQFCNDPFLGVYYYKNNKSWMESEFRVYSSANNCTFEYVSQPFLMDLEGKQGNFKNLREFVFKNIDGYFKIYSKHTPINLVRDLPQGFSALEPLVDLPIGINITRFQTLLALHRSYLTPGDSSSGWTAGAAAYYVGYLQPRTFLLKYNENGTITDAVDCALDPLSETKCTLKSFTVEKGIYQTSNFRVQPTESIVRFPNITNLCPFGEVFNATRFASVYAWNRKRISNCVADYSVLYNSASFSTFKCYGVSPTKLNDLCFTNVYADSFVIRGDEVRQIAPGQTGKIADYNYKLPDDFTGCVIAWNSNNLDSKVGGNYNYLYRLFRKSNLKPFERDISTEIYQAGSTPCNGVEGFNCYFPLQSYGFQPTNGVGYQPYRVVVLSFELLHAPATVCGPKKSTNLVKNKCVNFNFNGLTGTGVLTESNKKFLPFQQFGRDIADTTDAVRDPQTLEILDITPCSFGGVSVITPGTNTSNQVAVLYQGVNCTEVPVAIHADQLTPTWRVYSTGSNVFQTRAGCLIGAEHVNNSYECDIPIGAGICASYQTQTNSPRRARSVASQSIIAYTMSLGAENSVAYSNNSIAIPTNFTISVTTEILPVSMTKTSVDCTMYICGDSTECSNLLLQYGSFCTQLNRALTGIAVEQDKNTQEVFAQVKQIYKTPPIKDFGGFNFSQILPDPSKPSKRSFIEDLLFNKVTLADAGFIKQYGDCLGDIAARDLICAQKFNGLTVLPPLLTDEMIAQYTSALLAGTITSGWTFGAGAALQIPFAMQMAYRFNGCGVTQNVLYENQKLIANQFNSAIGKIQDSLSSTASALGKLQDVVNQNAQALNTLVKQLSSNFGAISSVLNDILSRLDKVEAEVQIDRLITGRLQSLQTYVTQQLIRAAEIRASANLAATKMSECVLGQSKRVDFCGKGCHLMSFPQSAPHGVVFLHVTYVPAQEKNFTTAPAICHDGKAHFPREGVFVSNGTHWFVTQRNFYEPQIITTDNTFVSGNCDVVIGIVNNTVYDPLQPELDSGGGGSDIIKLLNEQVNKEMQSSNLYMSMSSWCYTHSLDGAGLFLFDHAAEEYEHAKKLIIFLNENNVPVQLTSISAPEHKFEGLTQIFQKAYEHEQHISESINNIVDHAIKSKDHATFNFLQWYVAEQHEEEVLFKDILDKIELIGNENHGLYLADQYVKGIAKSRKS

SEQ ID NO: 9312 - protein, 1315 aa, Artificial Sequence
  SARS-CoV-2/USA/UT-00033/2020__EPI_ISL_417976 spike protein (1-1147)(I909C_Y1047C) Ferritin construct
MFVFLVLLPLVSSQCVNLTTRTQLPPAYTNSFTRGVYYPDKVFRSSVLHSTQDLFLPFFSNVTWFHAIHVSGTNGTKRFDNPVLPFNDGVYFASTEKSNIIRGWIFGTTLDSKTQSLLIVNNATNVVIKVCEFQFCNDPFLGVYYHKNNKSWMESEFRVYSSANNCTFEYVSQPFLMDLEGKQGNFKNLREFVFKNIDGYFKIYSKHTPINLVRDLPQGFSALEPLVDLPIGINITRFQTLLALHRSYLTPGDSSSGLTAGAAAYYVGYLQPRTFLLKYNENGTITDAVDCALDPLSETKCTLKSFTVEKGIYQTSNFRVQPTESIVRFPNITNLCPFGEVFNATRFASVYAWNRKRISNCVADYSVLYNSASFSTFKCYGVSPTKLNDLCFTNVYADSFVIRGDEVRQIAPGQTGKIADYNYKLPDDFTGCVIAWNSNNLDSKVGGNYNYLYRLFRKSNLKPFERDISTEIYQAGSTPCNGVEGFNCYFPLQSYGFQPTNGVGYQPYRVVVLSFELLHAPATVCGPKKSTNLVKNKCVNFNFNGLTGTGVLTESNKKFLPFQQFGRDIADTTDAVRDPQTLEILDITPCSFGGVSVITPGTNTSNQVAVLYQGVNCTEVPVAIHADQLTPTWRVYSTGSNVFQTRAGCLIGAEHVNNSYECDIPIGAGICASYQTQTNSPRRARSVASQSIIAYTMSLGAENSVAYSNNSIAIPTNFTISVTTEILPVSMTKTSVDCTMYICGDSTECSNLLLQYGSFCTQLNRALTGIAVEQDKNTQEVFAQVKQIYKTPPIKDFGGFNFSQILPDPSKPSKRSFIEDLLFNKVTLADAGFIKQYGDCLGDIAARDLICAQKFNGLTVLPPLLTDEMIAQYTSALLAGTITSGWTFGAGAALQIPFAMQMAYRFNGCGVTQNVLYENQKLIANQFNSAIGKIQDSLSSTASALGKLQDVVNQNAQALNTLVKQLSSNFGAISSVLNDILSRLDKVEAEVQIDRLITGRLQSLQTYVTQQLIRAAEIRASANLAATKMSECVLGQSKRVDFCGKGCHLMSFPQSAPHGVVFLHVTYVPAQEKNFTTAPAICHDGKAHFPREGVFVSNGTHWFVTQRNFYEPQIITTDNTFVSGNCDVVIGIVNNTVYDPLQPELDSGGGGSDIIKLLNEQVNKEMQSSNLYMSMSSWCYTHSLDGAGLFLFDHAAEEYEHAKKLIIFLNENNVPVQLTSISAPEHKFEGLTQIFQKAYEHEQHISESINNIVDHAIKSKDHATFNFLQWYVAEQHEEEVLFKDILDKIELIGNENHGLYLADQYVKGIAKSRKS

SEQ ID NO: 9313 - protein, 1315 aa, Artificial Sequence
  SARS-CoV-2/USA/WI-13/2020__EPI_ISL_417516 spike protein (1-1147)(I909C_Y1047C) Ferritin construct
MFVFLVLLPLVSSQCVNLTTRTQLPPAYTNSFTRGVYYPDKVFRSSVLHSTQDLFLPFFSNVTWFHAIHVSGTNGTKRFDNPVLPFNDGVYFASTEKSNIIRGWIFGTTLDSKTQSLLIVNNATNVVIKVCEFQFCNDPFLGVYYHKNNKSWMESEFRVYSSANNCTFEYVSQPFLMDLEGKQGNFKNLREFVFKNIDGYFKIYSKHTPINLVRDLPQGFSALEPLVDLPIGINITRFQTLLALHRSYLTPGDSSSGWTAGAAAYYVGYLQPRTFLLKYNENGTITDAVDCALDPLSETKCTLKSFTVEKGIYQTSNFRVLPTESIVRFPNITNLCPFGEVFNATRFASVYAWNRKRISNCVADYSVLYNSASFSTFKCYGVSPTKLNDLCFTNVYADSFVIRGDEVRQIAPGQTGKIADYNYKLPDDFTGCVIAWNSNNLDSKVGGNYNYLYRLFRKSNLKPFERDISTEIYQAGSTPCNGVEGFNCYFPLQSYGFQPTNGVGYQPYRVVVLSFELLHAPATVCGPKKSTNLVKNKCVNFNFNGLTGTGVLTESNKKFLPFQQFGRDIADTTDAVRDPQTLEILDITPCSFGGVSVITPGTNTSNQVAVLYQGVNCTEVPVAIHADQLTPTWRVYSTGSNVFQTRAGCLIGAEHVNNSYECDIPIGAGICASYQTQTNSPRRARSVASQSIIAYTMSLGAENSVAYSNNSIAIPTNFTISVTTEILPVSMTKTSVDCTMYICGDSTECSNLLLQYGSFCTQLNRALTGIAVEQDKNTQEVFAQVKQIYKTPPIKDFGGFNFSQILPDPSKPSKRSFIEDLLFNKVTLADAGFIKQYGDCLGDIAARDLICAQKFNGLTVLPPLLTDEMIAQYTSALLAGTITSGWTFGAGAALQIPFAMQMAYRFNGCGVTQNVLYENQKLIANQFNSAIGKIQDSLSSTASALGKLQDVVNQNAQALNTLVKQLSSNFGAISSVLNDILSRLDKVEAEVQIDRLITGRLQSLQTYVTQQLIRAAEIRASANLAATKMSECVLGQSKRVDFCGKGCHLMSFPQSAPHGVVFLHVTYVPAQEKNFTTAPAICHDGKAHFPREGVFVSNGTHWFVTQRNFYEPQIITTDNTFVSGNCDVVIGIVNNTVYDPLQPELDSGGGGSDIIKLLNEQVNKEMQSSNLYMSMSSWCYTHSLDGAGLFLFDHAAEEYEHAKKLIIFLNENNVPVQLTSISAPEHKFEGLTQIFQKAYEHEQHISESINNIVDHAIKSKDHATFNFLQWYVAEQHEEEVLFKDILDKIELIGNENHGLYLADQYVKGIAKSRKS

SEQ ID NO: 9314 - protein, 1314 aa, Artificial Sequence
  SARS-CoV-2/India/1-27/2020__EPI_ISL_413522 spike protein (1-1146)(I908C_Y1046C) Ferritin construct
MFVFLVLLPLVSSQCVNLTTRTQLPPAYTNSFTRGVYYPDKVFRSSVLHSTQDLFLPFFSNVTWFHAIHVSGTNGTKRFDNPVLPFNDGVYFASTEKSNIIRGWIFGTTLDSKTQSLLIVNNATNVVIKVCEFQFCNDPFLGVYHKNNKSWMESEFRVYSSANNCTFEYVSQPFLMDLEGKQGNFKNLREFVFKNIDGYFKIYSKHTPINLVRDLPQGFSALEPLVDLPIGINITRFQTLLALHRSYLTPGDSSSGWTAGAAAYYVGYLQPRTFLLKYNENGTITDAVDCALDPLSETKCTLKSFTVEKGIYQTSNFRVQPTESIVRFPNITNLCPFGEVFNATRFASVYAWNRKRISNCVADYSVLYNSASFSTFKCYGVSPTKLNDLCFTNVYADSFVIRGDEVIQIAPGQTGKIADYNYKLPDDFTGCVIAWNSNNLDSKVGGNYNYLYRLFRKSNLKPFERDISTEIYQAGSTPCNGVEGFNCYFPLQSYGFQPTNGVGYQPYRVVVLSFELLHAPATVCGPKKSTNLVKNKCVNFNFNGLTGTGVLTESNKKFLPFQQFGRDIADTTDAVRDPQTLEILDITPCSFGGVSVITPGTNTSNQVAVLYQDVNCTEVPVAIHADQLTPTWRVYSTGSNVFQTRAGCLIGAEHVNNSYECDIPIGAGICASYQTQTNSPRRARSVASQSIIAYTMSLGAENSVAYSNNSIAIPTNFTISVTTEILPVSMTKTSVDCTMYICGDSTECSNLLLQYGSFCTQLNRALTGIAVEQDKNTQEVFAQVKQIYKTPPIKDFGGFNFSQILPDPSKPSKRSFIEDLLFNKVTLADAGFIKQYGDCLGDIAARDLICAQKFNGLTVLPPLLTDEMIAQYTSALLAGTITSGWTFGAGAALQIPFAMQMAYRFNGCGVTQNVLYENQKLIANQFNSAIGKIQDSLSSTASALGKLQDVVNQNAQALNTLVKQLSSNFGAISSVLNDILSRLDKVEAEVQIDRLITGRLQSLQTYVTQQLIRAAEIRASANLAATKMSECVLGQSKRVDFCGKGCHLMSFPQSAPHGVVFLHVTYVPAQEKNFTTAPAICHDGKAHFPREGVFVSNGTHWFVTQRNFYEPQIITTDNTFVSGNCDVVIGIVNNTVYDPLQPELDSGGGGSDIIKLLNEQVNKEMQSSNLYMSMSSWCYTHSLDGAGLFLFDHAAEEYEHAKKLIIFLNENNVPVQLTSISAPEHKFEGLTQIFQKAYEHEQHISESINNIVDHAIKSKDHATFNFLQWYVAEQHEEEVLFKDILDKIELIGNENHGLYLADQYVKGIAKSRKS

SEQ ID NO: 9315 - protein, 1309 aa, Artificial Sequence
  SARS-CoV-2/pangolin/Guangxi/P4L/2017__EPI_ISL_410538 spike protein (1-1141)(I903C_Y1041C) Ferritin construct
MFVFLFVLPLVSSQCVNLTTRTGIPPGYTNSSTRGVYYPDKVFRSSILHLTQDLFLPFFSNVTWFNTINYQGGFKKFDNPVLPFNDGVYFASTEKSNIIRGWIFGTTLDARTQSLLIVNNATNVVIKVCEFQFCTDPFLGVYYHNNNKTWVENEFRVYSSANNCTFEYISQPFLMDLEGKQGNFKNLREFVFKNVDGYFKIYSKHTPIDLVRDLPRGFAALEPLVDLPIGINITRFQTLLALHRSYLTPGNLESGWTTGAAAYYVGYLQQRTFLLSYNQNGTITDAVDCSLDPLSETKCTLKSLTVEKGIYQTSNFRVQPTISIVRFPNITNLCPFGEVFNASKFASVYAWNRKRISNCVADYSVLYNSTSFSTFKCYGVSPTKLNDLCFTNVYADSFVVKGDEVRQIAPGQTGVIADYNYKLPDDFTGCVIAWNSVKQDALTGGNYGYLYRLFRKSKLKPFERDISTEIYQAGSTPCNGQVGLNCYYPLERYGFHPTTGVNYQPFRVVVLSFELLNGPATVCGPKLSTTLVKDKCVNFNFNGLTGTGVLTTSKKQFLPFQQFGRDISDTTDAVRDPQTLEILDITPCSFGGVSVITPGTNTSNQVAVLYQDVNCTEVPMAIHAEQLTPAWRVYSAGANVFQTRAGCLVGAEHVNNSYECDIPVGAGICASYHSMSSLRSVNQRSIIAYTMSLGAENSVAYSNNSIAIPTNFTISVTTEILPVSMTKTSVDCTMYICGDSIECSNLLLQYGSFCTQLNRALTGIAVEQDKNTQEVFAQVKQIYKTPPIKDFGGFNFSQILPDPSKPSKRSFIEDLLFNKVTLADAGFIKQYGDCLGDIAARDLICAQKFNGLTVLPPLLTDEMIAQYTSALLAGTITSGWTFGAGAALQIPFAMQMAYRFNGCGVTQNVLYENQKLIANQFNSAIGKIQDSLSSTASALGKLQDVVNQNAQALNTLVKQLSSNFGAISSVLNDILSRLDKVEAEVQIDRLITGRLQSLQTYVTQQLIRAAEIRASANLAATKMSECVLGQSKRVDFCGKGCHLMSFPQSAPHGVVFLHVTYVPAQEKNFTTAPAICHEGKAHFPREGVFVSNGTHWFITQRNFYEPQIITTDNTFVSGSCDVVIGIVNNTVYDPLQPELDSGGGGSDIIKLLNEQVNKEMQSSNLYMSMSSWCYTHSLDGAGLFLFDHAAEEYEHAKKLIIFLNENNVPVQLTSISAPEHKFEGLTQIFQKAYEHEQHISESINNIVDHAIKSKDHATFNFLQWYVAEQHEEEVLFKDILDKIELIGNENHGLYLADQYVKGIAKSRKS

SEQ ID NO: 9316 - protein, 1309 aa, Artificial Sequence
  SARS-CoV-2/pangolin/Guangxi/P5L/2017__EPI_ISL_410540 spike protein (1-1141)(I903C_Y1041C) Ferritin construct
MFVFLFVLPLVSSQCVNLTTRTGIPPGYTNSSTRGVYYPDKVFRSSILHLTQDLFLPFFSNVTWFNTINYQGGFKKFDNPVLPFNDGVYFASTEKSNIIRGWIFGTTLDARTQSLLIVNNATNVVIKVCEFQFCTDPFLGVYYHNNNKTWVENEFRVYSSANNCTFEYISQPFLMDLEGKQGNFKNLREFVFKNVDGYFKIYSKHTPIDLVRDLPRGFAALEPLVDLPIGINITRFQTLLALHRSYLTPGKLESGWTTGAAAYYVGYLQQRTFLLSYNQNGTITDAVDCSLDPLSETKCTLKSLTVEKGIYQTSNFRVQPTISIVRFPNITNLCPFGEVFNASKFASVYAWNRKRISNCVADYSVLYNSTSFSTFKCYGVSPTKLNDLCFTNVYADSFVVKGDEVRQIAPGQTGVIADYNYKLPDDFTGCVIAWNSVKQDALTGGNYGYLYRLFRKSKLKPFERDISTEIYQAGSTPCNGQVGLNCYYPLERYGFHPTTGVNYQPFRVVVLSFELLNGPATVCGPKLSTTLVKDKCVNFNFNGLTGTGVLTTSKKQFLPFQQFGRDISDTTDAVRDPQTLEILDITPCSFGGVSVITPGTNTSNQVAVLYQDVNCTEVPMAIHAEQLTPAWRVYSAGANVFQTRAGCLVGAEHVNNSYECDIPVGAGICASYHSMSSFRSVNQRSIIAYTMSLGAENSVAYSNNSIAIPTNFTISVTTEILPVSMTKTSVDCTMYICGDSIECSNLLLQYGSFCTQLNRALTGIAVEQDKNTQEVFAQVKQIYKTPPIKDFGGFNFSQILPDPSKPSKRSFIEDLLFNKVTLADAGFIKQYGDCLGDIAARDLICAQKFNGLTVLPPLLTDEMIAQYTSALLAGTITSGWTFGAGAALQIPFAMQMAYRFNGCGVTQNVLYENQKLIANQFNSAIGKIQDSLSSTASALGKLQDVVNQNAQALNTLVKQLSSNFGAISSVLNDILSRLDKVEAEVQIDRLITGRLQSLQTYVTQQLIRAAEIRASANLAATKMSECVLGQSKRVDFCGKGCHLMSFPQSAPHGVVFLHVTYVPAQEKNFTTAPAICHEGKAHFPREGVFVSNGTHWFITQRNFYEPQIITTDNTFVSGSCDVVIGIVNNTVYDPLQPELDSGGGGSDIIKLLNEQVNKEMQSSNLYMSMSSWCYTHSLDGAGLFLFDHAAEEYEHAKKLIIFLNENNVPVQLTSISAPEHKFEGLTQIFQKAYEHEQHISESINNIVDHAIKSKDHATFNFLQWYVAEQHEEEVLFKDILDKIELIGNENHGLYLADQYVKGIAKSRKS

SEQ ID NO: 9317 - protein, 1309 aa, Artificial Sequence
  SARS-CoV-2/pangolin/Guangxi/P5E/2017__EPI_ISL_410541 spike protein (1-1141)(I903C_Y1041C) Ferritin construct
MFVFLFVLPLVSSQCVNLTTRTGIPPGYTNSSTRGVYYPDKVFRSSILHLTQDLFLPFFSNVTWFNTITYQGGSKKFDNPVLPFNDGVYFASTEKSNIIRGWIFGTTLDARTQSLLIVNNATNVVIKVCEFQFCTDPFLGVYYHNNNKTWVENEFRVYSSANNCTFEYISQPFLMDLEGKQGNFKNLREFVFKNVDGYFKIYSKHTPIDLVRDLPRGFAALEPLVDLPIGINITRFQTLLALHRSYLTPGKLESGWTTGAAAYYVGYLQQRTFLLSYNQNGTITDAVDCSLDPLSETKCTLKSLTVEKGIYQTSNFRVQPTISIVRFPNITNLCPFGEVFNASKFASVYAWNRKRISNCVADYSVLYNSTSFSTFKCYGVSPTKLNDLCFTNVYADSFVVKGDEVRQIAPGQTGVIADYNYKLPDDFTGCVIAWNSVKQDALTGDNYGYLYRLFRKSKLKPFERDISTEIYQAGSTPCNGQVGLNCYYPLERYGFHPTTGVNYQPFRVVVLSFELLNGPATVCGPKLSTTLVKDKCVNFNFNGLTGTGVLTTSKKQFLPFQQFGRDISDTTDAVRDPQTLEILDITPCSFGGVSVITPGTNTSNQVAVLYQDVNCTEVPMAIHAEQLTPAWRVYSAGANVFQTRAGCLVGAEHVNNSYECDIPVGAGICASYHSMSSFRSVNQRSIIAYTMSLGAENSVAYSNNSIAIPTNFTISVTTEILPVSMTKTSVDCTMYICGDSIECSNLLLQYGSFCTQLNRALTGIAVEQDKNTQEVFAQVKQIYKTPPIKDFGGFNFSQILPDPSKPSKRSFIEDLLFNKVTLADAGFIKQYGDCLGDIAARDLICAQKFNGLTVLPPLLTDEMIAQYTSALLAGTITSGWTFGAGAALQIPFAMQMAYRFNGCGVTQNVLYENQKLIANQFNSAIGKIQDSLSSTASALGKLQDVVNQNAQALNTLVKQLSSNFGAISSVLNDILSRLDKVEAEVQIDRLITGRLQSLQTYVTQQLIRAAEIRASANLAATKMSECVLGQSKRVDFCGKGCHLMSFPQSAPHGVVFLHVTYVPAQEKNFTTAPAICHEGKAHFPREGVFVSNGTHWFITQRNFYEPQIITTDNTFVSGSCDVVIGIVNNTVYDPLQPELDSGGGGSDIIKLLNEQVNKEMQSSNLYMSMSSWCYTHSLDGAGLFLFDHAAEEYEHAKKLIIFLNENNVPVQLTSISAPEHKFEGLTQIFQKAYEHEQHISESINNIVDHAIKSKDHATFNFLQWYVAEQHEEEVLFKDILDKIELIGNENHGLYLADQYVKGIAKSRKS

SEQ ID NO: 9318 - protein, 1307 aa, Artificial Sequence
  SARS-CoV-2/pangolin/Guangxi/P1E/2017__EPI_ISL_410539 spike protein (1-1139)(I901C_Y1039C) Ferritin construct
MFVFLFVLPLVSSQCVNLTTRTGIQPGYTNSSTRGVYYPDKVFRSSILHLTQDLFLPFFSNVTWFNTINYQGGFKKFDNPVLPFNDGVYFASTEKSNIIRGWIFGTTLDARTQSLLIVNNATNVVIKVCEFQFCTDPFLGVYYHNNNKTWVENEFRVYSSANNCTFEYISQPFLMDLEGKQGNFKNLREFVFKNVDGYFKIYSKHTPIDLVRDLPRGFAALEPLVDLPIGINITRFQTLLALHRSYLTPGKLESGWTTGAAAYYVGYLQQRTFLLSYNQNGTITDAVDCSLDPLSETKCTLKSLTVEKGIYQTSNFRVQPTISIVRFPNITNLCPFGEVFNASKFASVYAWNRKRISNCVADYSVLYNSTSFSTFKCYGVSPTKLNDLCFTNVYADSFVVKGDEVRQIAPGQTGVIADYNYKLPDDFTGCVIAWNSVKQDALTGGNYLYRLFRKSKLKPFERDISTEIYQAGSTPCNGQVGLNCYYPLERYGFHPTTGVNYQPFRVVVLSFELLNGPATVCGPKLSTTLVKDKCVNFNFNGLTGTGVLTTSKKQFLPFQQFGRDISDTTDAVRDPQTLEILDITPCSFGGVSVITPGTNTSNQVAVLYQDVNCTEVPMAIHAEQLTPAWRVYSAGANVFQTRAGCLVGAEHVNNSYECDIPVGAGICASYHSMSSLRSVNQRSIIAYTMSLGAENSVAYSNNSIAIPTNFTISVTTEILPVSMTKTSVDCTMYICGDSIECSNLLLQYGSFCTQLNRALTGIAVEQDKNTQEVFAQVKQIYKTPPIKDFGGFNFSQILPDPSKPSKRSFIEDLLFNKVTLADAGFIKQYGDCLGDIAARDLICAQKFNGLTVLPPLLTDEMIAQYTSALLAGTITSGWTFGAGAALQIPFAMQMAYRFNGCGVTQNVLYENQKLIANQFNSAIGKIQDSLSSTASALGKLQDVVNQNAQALNTLVKQLSSNFGAISSVLNDILSRLDKVEAEVQIDRLITGRLQSLQTYVTQQLIRAAEIRASANLAATKMSECVLGQSKRVDFCGKGCHLMSFPQSAPHGVVFLHVTYVPAQEKNFTTAPAICHEGKAHFPREGVFVSNGTHWFITQRNFYEPQIITTDNTFVSGSCDVVIGIVNNTVYDPLQPELDSGGGGSDIIKLLNEQVNKEMQSSNLYMSMSSWCYTHSLDGAGLFLFDHAAEEYEHAKKLIIFLNENNVPVQLTSISAPEHKFEGLTQIFQKAYEHEQHISESINNIVDHAIKSKDHATFNFLQWYVAEQHEEEVLFKDILDKIELIGNENHGLYLADQYVKGIAKSRKS

SEQ ID NO: 9319 - protein, 1315 aa, Artificial Sequence
  SARS-CoV-2/Wuhan/WIV05/2019__EPI_ISL_402128 spike protein (1-1147)(Q965C_S1003C) Ferritin construct
MFVFLVLLPLVSSQCVNLTTRTQLPPAYTNSFTRGVYYPDKVFRSSVLHSTQDLFLPFFSNVTWFHAIHVSGTNGTKRFDNPVLPFNDGVYFASTEKSNIIRGWIFGTTLDSKTQSLLIVNNATNVVIKVCEFQFCNDPFLGVYYHKNNKSWMESEFRVYSSANNCTFEYVSQPFLMDLEGKQGNFKNLREFVFKNIDGYFKIYSKHTPINLVRDLPQGFSALEPLVDLPIGINITRFQTLLALHRSYLTPGDSSSGWTAGAAAYYVGYLQPRTFLLKYNENGTITDAVDCALDPLSETKCTLKSFTVEKGIYQTSNFRVQPTESIVRFPNITNLCPFGEVFNATRFASVYAWNRKRISNCVADYSVLYNSASFSTFKCYGVSPTKLNDLCFTNVYADSFVIRGDEVRQIAPGQTGKIADYNYKLPDDFTGCVIAWNSNNLDSKVGGNYNYLYRLFRKSNLKPFERDISTEIYQAGSTPCNGVEGFNCYFPLQSYGFQPTNGVGYQPYRVVVLSFELLHAPATVCGPKKSTNLVKNKCVNFNFNGLTGTGVLTESNKKFLPFQQFGRDIADTTDAVRDPQTLEILDITPCSFGGVSVITPGTNTSNQVAVLYQDVNCTEVPVAIHADQLTPTWRVYSTGSNVFQTRAGCLIGAEHVNNSYECDIPIGAGICASYQTQTNSPRRARSVASQSIIAYTMSLGAENSVAYSNNSIAIPTNFTISVTTEILPVSMTKTSVDCTMYICGDSTECSNLLLQYGSFCTQLNRALTGIAVEQDKNTQEVFAQVKQIYKTPPIKDFGGFNFSQILPDPSKPSKRSFIEDLLFNKVTLADAGFIKQYGDCLGDIAARDLICAQKFNGLTVLPPLLTDEMIAQYTSALLAGTITSGWTFGAGAALQIPFAMQMAYRFNGIGVTQNVLYENQKLIANQFNSAIGKIQDSLSSTASALGKLQDVVNQNAQALNTLVKCLSSNFGAISSVLNDILSRLDKVEAEVQIDRLITGRLQCLQTYVTQQLIRAAEIRASANLAATKMSECVLGQSKRVDFCGKGYHLMSFPQSAPHGVVFLHVTYVPAQEKNFTTAPAICHDGKAHFPREGVFVSNGTHWFVTQRNFYEPQIITTDNTFVSGNCDVVIGIVNNTVYDPLQPELDSGGGGSDIIKLLNEQVNKEMQSSNLYMSMSSWCYTHSLDGAGLFLFDHAAEEYEHAKKLIIFLNENNVPVQLTSISAPEHKFEGLTQIFQKAYEHEQHISESINNIVDHAIKSKDHATFNFLQWYVAEQHEEEVLFKDILDKIELIGNENHGLYLADQYVKGIAKSRKS

SEQ ID NO: 9320 - protein, 1311 aa, Artificial Sequence
  SARS-CoV-2/bat/Yunnan/RaTG13/2013__EPI_ISL_402131 spike protein (1-1143)(Q961C_S999C) Ferritin construct
MFVFLVLLPLVSSQCVNLTTRTQLPPAYTNSSTRGVYYPDKVFRSSVLHLTQDLFLPFFSNVTWFHAIHVSGTNGIKRFDNPVLPFNDGVYFASTEKSNIIRGWIFGTTLDSKTQSLLIVNNATNVVIKVCEFQFCNDPFLGVYYHKNNKSWMESEFRVYSSANNCTFEYVSQPFLMDLEGKQGNFKNLREFVFKNIDGYFKIYSKHTPINLVRDLPPGFSALEPLVDLPIGINITRFQTLLALHRSYLTPGDSSSGWTAGAAAYYVGYLQPRTFLLKYNENGTITDAVDCALDPLSETKCTLKSFTVEKGIYQTSNFRVQPTDSIVRFPNITNLCPFGEVFNATTFASVYAWNRKRISNCVADYSVLYNSTSFSTFKCYGVSPTKLNDLCFTNVYADSFVITGDEVRQIAPGQTGKIADYNYKLPDDFTGCVIAWNSKHIDAKEGGNFNYLYRLFRKANLKPFERDISTEIYQAGSKPCNGQTGLNCYYPLYRYGFYPTDGVGHQPYRVVVLSFELLNAPATVCGPKKSTNLVKNKCVNFNFNGLTGTGVLTESNKKFLPFQQFGRDIADTTDAVRDPQTLEILDITPCSFGGVSVITPGTNASNQVAVLYQDVNCTEVPVAIHADQLTPTWRVYSTGSNVFQTRAGCLIGAEHVNNSYECDIPIGAGICASYQTQTNSRSVASQSIIAYTMSLGAENSVAYSNNSIAIPTNFTISVTTEILPVSMTKTSVDCTMYICGDSTECSNLLLQYGSFCTQLNRALTGIAVEQDKNTQEVFAQVKQIYKTPPIKDFGGFNFSQILPDPSKPSKRSFIEDLLFNKVTLADAGFIKQYGDCLGDIAARDLICAQKFNGLTVLPPLLTDEMIAQYTSALLAGTITSGWTFGAGAALQIPFAMQMAYRFNGIGVTQNVLYENQKLIANQFNSAIGKIQDSLSSTASALGKLQDVVNQNAQALNTLVKCLSSNFGAISSVLNDILSRLDKVEAEVQIDRLITGRLQCLQTYVTQQLIRAAEIRASANLAATKMSECVLGQSKRVDFCGKGYHLMSFPQSAPHGVVFLHVTYVPAQEKNFTTAPAICHDGKAHFPREGVFVSNGTHWFVTQRNFYEPQIITTDNTFVSGSCDVVIGIVNNTVYDPLQPELDSGGGGSDIIKLLNEQVNKEMQSSNLYMSMSSWCYTHSLDGAGLFLFDHAAEEYEHAKKLIIFLNENNVPVQLTSISAPEHKFEGLTQIFQKAYEHEQHISESINNIVDHAIKSKDHATFNFLQWYVAEQHEEEVLFKDILDKIELIGNENHGLYLADQYVKGIAKSRKS

SEQ ID NO: 9321 - protein, 1315 aa, Artificial Sequence
  SARS-CoV-2/Wuhan/HBCDC-HB-01/2019__EPI_ISL_402132 spike protein (1-1147)(Q965C_S1003C) Ferritin construct
MFVFLVLLPLVSSQCVNLTTRTQLPPAYTNSITRGVYYPDKVFRSSVLHSTQDLFLPFFSNVTWFHAIHVSGTNGTKRFDNPVLPFNDGVYFASTEKSNIIRGWIFGTTLDSKTQSLLIVNNATNVVIKVCEFQFCNDPFLGVYYHKNNKSWMESEFRVYSSANNCTFEYVSQPFLMDLEGKQGNFKNLREFVFKNIDGYFKIYSKHTPINLVRDLPQGFSALEPLVDLPIGINITRFQTLLALHRSYLTPGDSSSGWTAGAAAYYVGYLQPRTFLLKYNENGTITDAVDCALDPLSETKCTLKSFTVEKGIYQTSNFRVQPTESIVRFPNITNLCPFGEVFNATRFASVYAWNRKRISNCVADYSVLYNSASFSTFKCYGVSPTKLNDLCFTNVYADSFVIRGDEVRQIAPGQTGKIADYNYKLPDDFTGCVIAWNSNNLDSKVGGNYNYLYRLFRKSNLKPFERDISTEIYQAGSTPCNGVEGFNCYFPLQSYGFQPTNGVGYQPYRVVVLSFELLHAPATVCGPKKSTNLVKNKCVNFNFNGLTGTGVLTESNKKFLPFQQFGRDIADTTDAVRDPQTLEILDITPCSFGGVSVITPGTNTSNQVAVLYQDVNCTEVPVAIHADQLTPTWRVYSTGSNVFQTRAGCLIGAEHVNNSYECDIPIGAGICASYQTQTNSPRRARSVASQSIIAYTMSLGAENSVAYSNNSIAIPTNFTISVTTEILPVSMTKTSVDCTMYICGDSTECSNLLLQYGSFCTQLNRALTGIAVEQDKNTQEVFAQVKQIYKTPPIKDFGGFNFSQILPDPSKPSKRSFIEDLLFNKVTLADAGFIKQYGDCLGDIAARDLICAQKFNGLTVLPPLLTDEMIAQYTSALLAGTITSGWTFGAGAALQIPFAMQMAYRFNGIGVTQNVLYENQKLIANQFNSAIGKIQDSLSSTASALGKLQDVVNQNAQALNTLVKCLSSNFGAISSVLNDILSRLDKVEAEVQIDRLITGRLQCLQTYVTQQLIRAAEIRASANLAATKMSECVLGQSKRVDFCGKGYHLMSFPQSAPHGVVFLHVTYVPAQEKNFTTAPAICHDGKAHFPREGVFVSNGTHWFVTQRNFYEPQIITTDNTFVSGNCDVVIGIVNNTVYDPLQPELDSGGGGSDIIKLLNEQVNKEMQSSNLYMSMSSWCYTHSLDGAGLFLFDHAAEEYEHAKKLIIFLNENNVPVQLTSISAPEHKFEGLTQIFQKAYEHEQHISESINNIVDHAIKSKDHATFNFLQWYVAEQHEEEVLFKDILDKIELIGNENHGLYLADQYVKGIAKSRKS

SEQ ID NO: 9322 - protein, 1315 aa, Artificial Sequence
  SARS-CoV-2/Guangdong/20SF028/2020__EPI_ISL_403936 spike protein (1-1147)(Q965C_S1003C) Ferritin construct
MFVFLVLLPLVSSQCVNLTTRTQLPPAYTNSFTRGVYYPDKVFRSSVLYSTQDLFLPFFSNVTWFHAIHVSGTNGTKRFDNPVLPFNDGVYFASTEKSNIIRGWIFGTTLDSKTQSLLIVNNATNVVIKVCEFQFCNDPFLGVYYHKNNKSWMESEFRVYSSANNCTFEYVSQPFLMDLEGKQGNFKNLREFVFKNIDGYFKIYSKHTPINLVRDLPQGFSALEPLVDLPIGINITRFQTLLALHRSYLTPGDSSSGWTAGAAAYYVGYLQPRTFLLKYNENGTITDAVDCALDPLSETKCTLKSFTVEKGIYQTSNFRVQPTESIVRFPNITNLCPFGEVFNATRFASVYAWNRKRISNCVADYSVLYNSASFSTFKCYGVSPTKLNDLCFTNVYADSFVIRGDEVRQIAPGQTGKIADYNYKLPDDFTGCVIAWNSNNLDSKVGGNYNYLYRLFRKSNLKPFERDISTEIYQAGSTPCNGVEGFNCYFPLQSYGFQPTNGVGYQPYRVVVLSFELLHAPATVCGPKKSTNLVKNKCVNFNFNGLTGTGVLTESNKKFLPFQQFGRDIADTTDAVRDPQTLEILDITPCSFGGVSVITPGTNTSNQVAVLYQDVNCTEVPVAIHADQLTPTWRVYSTGSNVFQTRAGCLIGAEHVNNSYECDIPIGAGICASYQTQTNSPRRARSVASQSIIAYTMSLGAENSVAYSNNSIAIPTNFTISVTTEILPVSMTKTSVDCTMYICGDSTECSNLLLQYGSFCTQLNRALTGIAVEQDKNTQEVFAQVKQIYKTPPIKDFGGFNFSQILPDPSKPSKRSFIEDLLFNKVTLADAGFIKQYGDCLGDIAARDLICAQKFNGLTVLPPLLTDEMIAQYTSALLAGTITSGWTFGAGAALQIPFAMQMAYRFNGIGVTQNVLYENQKLIANQFNSAIGKIQDSLSSTASALGKLQDVVNQNAQALNTLVKCLSSNFGAISSVLNDILSRLDKVEAEVQIDRLITGRLQCLQTYVTQQLIRAAEIRASANLAATKMSECVLGQSKRVDFCGKGYHLMSFPQSAPHGVVFLHVTYVPAQEKNFTTAPAICHDGKAHFPREGVFVSNGTHWFVTQRNFYEPQIITTDNTFVSGNCDVVIGIVNNTVYDPLQPELDSGGGGSDIIKLLNEQVNKEMQSSNLYMSMSSWCYTHSLDGAGLFLFDHAAEEYEHAKKLIIFLNENNVPVQLTSISAPEHKFEGLTQIFQKAYEHEQHISESINNIVDHAIKSKDHATFNFLQWYVAEQHEEEVLFKDILDKIELIGNENHGLYLADQYVKGIAKSRKS

SEQ ID NO: 9323 - protein, 1315 aa, Artificial Sequence
  SARS-CoV-2/Shenzhen/SZTH-001/2020__EPI_ISL_406592 spike protein (1-1147)(Q965C_S1003C) Ferritin construct
MFVFLVLLPLVSSQCVNLTTRTQLPPAYTNSFTRGVYYPDKVFRSSVLHSTQDLFLPFFSNVTWFHAIHVSGTNGTKRFDNPVLPFNDGVYFASTEKSNIIRGWIFGTTLDSKTQSLLIVNNATNVVIKVCEFQFCNDPFLGVYYHKNNKSWMESEFRVYSSANNCTFEYVSQPFLMDLEGKQGNFKNLREFVFKNIDGYFKIYSKHTPINLVRDLPQGFSALEPLVDLPIGINITRFQTLLALHRSYLTPGDSSSGWTAGAAAYYVGYLQPRTFLLKYNENGTITDAVDCALDPLSETKCTLKSFTVEKGIYQTSNFRVQPTESIVRFPNITNLCPFGEVFNATRFASVYAWNRKRISNCVADYSVLYNSASFSTFKCYGVSPTKLNDLCFTNVYADSFVIRGDEVRQIAPGQTGKIADYNYKLPDDFTGCVIAWNSNNLDSKVGGNYNYLYRLFRKSNLKPFERDISTEIYQAGSTPCNGVEGFNCYFPLQSYGFQPTNGVGYQPYRVVVLSFELLHAPATVCGPKKSTNLVKNKCVNFNFNGLTGTGVLTESNKKFLPFQQFGRDIADTTDAVRDPQTLEILDITPCSFGGVSVITPGTNTSNQVAVLYQDVNCTEVPVAIHADQLTPTWRVYSTGSNVFQTRAGCLIGAEHVNNSYECDIPIGAGICASYQTQTNSPRRARSVASQSIIAYTMSLGAENSVAYSNNSIAIPTNFTISVTTEILPVSMTKTSVDCTMYICGDSTECSNLLLQYGSFCTQLNRALTGIAVEQDKNTQEVFAQVKQIYKTPPIKDFGGFNFSQILPDPSKPSKRSFIEDLLFNKVTLADAGFIKQYGDCLGDIAARDLICAQKFNGLTVLPPLLTDEMIAQYTSALLAGTITSGWTFGAGAALQIPFAMQMAYRFNGIGVTQNVLYENQKLIANQFNSAIGKIQDSLSSTASALGKLQDVVNQNAQALNTLVKCLSSNFGAISSVLNDILSRLDKVEAEVQIDRLITGRLQCLQTYVTQQLIRAAEIRASANLAATKMSECVLGQSKRVDFCGKGYHLMSFPQSAPHGVVFLHVTYVPAQEKNFTTAPAICHDGKAHFPREGVFVSNGTHWFVTQRNFYEPQIITTDNTFVSGNCDVLIGIVNNTVYDPLQPELDSGGGGSDIIKLLNEQVNKEMQSSNLYMSMSSWCYTHSLDGAGLFLFDHAAEEYEHAKKLIIFLNENNVPVQLTSISAPEHKFEGLTQIFQKAYEHEQHISESINNIVDHAIKSKDHATFNFLQWYVAEQHEEEVLFKDILDKIELIGNENHGLYLADQYVKGIAKSRKS

SEQ ID NO: 9324 - protein, 1315 aa, Artificial Sequence
  SARS-CoV-2/Shenzhen/SZTH-004/2020__EPI_ISL_406595 spike protein (1-1147)(Q965C_S1003C) Ferritin construct
MFVFLVLLPLVSSQCVNLTTRTQLPPAYTNSFTRGVYYPDKVFRSSVLHSTQDLFLPFFSNVTWFHAIHVSGTNGTKRFDNPVLPFNDGVYFASTEKSNIIRGWIFGTTLDSKTQSLLIVNNATNVVIKVCEFQFCNDPFLGVYYHKNNKSWMESEFRVYSSANNCTFEYVSQPFLMDLEGKQGNFKNLREFVFKNIDGYFKIYSKHTPINLVRDLPQGFSALEPLVDLPIGINITRFQTLLALHRSYLTPGDSSSGWTAGAAAYYVGYLQPRTFLLKYNENGTITDAVDCALDPLSETKCTLKSFTVEKGIYQTSNFRVQPTESIVRFPNITNLCPFGEVFNATRFASVYAWDRKRISNCVAYYSVLYNSASFSTFKCYGVSPTKLNDLCFTNVYADSFVIRGDEVRQIAPGQTGKIADYNYKLPDDFTGCVIAWNSNNLDSKVGGNYNYLYRLFRKSNLKPFERDISTEIYQAGSTPCNGVEGFNCYFPLQSYGFQPTNGVGYQPYRVVVLSFELLHAPATVCGPKKSTNLVKNKCVNFNFNGLTGTGVLTESNKKFLPFQQFGRDIADTTDAVRDPQTLEILDITPCSFGGVSVITPGTNTSNQVAVLYQDVNCTEVPVAIHADQLTPTWRVYSTGSNVFQTRAGCLIGAEHVNNSYECDIPIGAGICASYQTQTNSPRRARSVASQSIIAYTMSLGAENSVAYSNNSIAIPTNFTISVTTEILPVSMTKTSVDCTMYICGDSTECSNLLLQYGSFCTQLNRALTGIAVEQDKNTQEVFAQVKQIYKTPPIKDFGGFNFSQILPDPSKPSKRSFIEDLLFNKVTLADAGFIKQYGDCLGDIAARDLICAQKFNGLTVLPPLLTDEMIAQYTSALLAGTITSGWTFGAGAALQIPFAMQMAYRFNGIGVTQNVLYENQKLIANQFNSAIGKIQDSLSSTASALGKLQDVVNQNAQALNTLVKCLSSNFGAISSVLNDILSRLDKVEAEVQIDRLITGRLQCLQTYVTQQLIRAAEIRASANLAATKMSECVLGQSKRVDFCGKGYHLMSFPQSAPHGVVFLHVTYVPAQEKNFTTAPAICHDGKAHFPREGVFVSNGTHWFVTQRNFYEPQIITTDNTFVSGNCDVVIGIVNNTVYDPLQPELDSGGGGSDIIKLLNEQVNKEMQSSNLYMSMSSWCYTHSLDGAGLFLFDHAAEEYEHAKKLIIFLNENNVPVQLTSISAPEHKFEGLTQIFQKAYEHEQHISESINNIVDHAIKSKDHATFNFLQWYVAEQHEEEVLFKDILDKIELIGNENHGLYLADQYVKGIAKSRKS

SEQ ID NO: 9325 - protein, 1315 aa, Artificial Sequence
  SARS-CoV-2/France/IDF0372/2020__EPI_ISL_406596 spike protein (1-1147)(Q965C_S1003C) Ferritin construct
MFVFLVLLPLVSSQCVNLTTRTQLPPAYTNSFTRGVYYPDKVFRSSVLHSTQDLFLPFFSNVTWFHAIHVSGTNGTKRFDNPVLPFNDGVYFASTEKSNIIRGWIFGTTLDSKTQSLLIVNNATNVVIKVCEFQFCNDPFLGVYYHKNNKSWMESEFRVYSSANNCTFEYVSQPFLMDLEGKQGNFKNLREFVFKNIDGYFKIYSKHTPINLVRDLPQGFSALEPLVDLPIGINITRFQTLLALHRSYLTPGDSSSGWTAGAAAYYVGYLQPRTFLLKYNENGTITDAVDCALDPLSETKCTLKSFTVEKGIYQTSNFRVQPTESIVRFPNITNLCPFGEVFNATRFASVYAWNRKRISNCVADYSFLYNSASFSTFKCYGVSPTKLNDLCFTNVYADSFVIRGDEVRQIAPGQTGKIADYNYKLPDDFTGCVIAWNSNNLDSKVGGNYNYLYRLFRKSNLKPFERDISTEIYQAGSTPCNGVEGFNCYFPLQSYGFQPTNGVGYQPYRVVVLSFELLHAPATVCGPKKSTNLVKNKCVNFNFNGLTGTGVLTESNKKFLPFQQFGRDIADTTDAVRDPQTLEILDITPCSFGGVSVITPGTNTSNQVAVLYQDVNCTEVPVAIHADQLTPTWRVYSTGSNVFQTRAGCLIGAEHVNNSYECDIPIGAGICASYQTQTNSPRRARSVASQSIIAYTMSLGAENSVAYSNNSIAIPTNFTISVTTEILPVSMTKTSVDCTMYICGDSTECSNLLLQYGSFCTQLNRALTGIAVEQDKNTQEVFAQVKQIYKTPPIKDFGGFNFSQILPDPSKPSKRSFIEDLLFNKVTLADAGFIKQYGDCLGDIAARDLICAQKFNGLTVLPPLLTDEMIAQYTSALLAGTITSGWTFGAGAALQIPFAMQMAYRFNGIGVTQNVLYENQKLIANQFNSAIGKIQDSLSSTASALGKLQDVVNQNAQALNTLVKCLSSNFGAISSVLNDILSRLDKVEAEVQIDRLITGRLQCLQTYVTQQLIRAAEIRASANLAATKMSECVLGQSKRVDFCGKGYHLMSFPQSAPHGVVFLHVTYVPAQEKNFTTAPAICHDGKAHFPREGVFVSNGTHWFVTQRNFYEPQIITTDNTFVSGNCDVVIGIVNNTVYDPLQPELDSGGGGSDIIKLLNEQVNKEMQSSNLYMSMSSWCYTHSLDGAGLFLFDHAAEEYEHAKKLIIFLNENNVPVQLTSISAPEHKFEGLTQIFQKAYEHEQHISESINNIVDHAIKSKDHATFNFLQWYVAEQHEEEVLFKDILDKIELIGNENHGLYLADQYVKGIAKSRKS

SEQ ID NO: 9326 - protein, 1315 aa, Artificial Sequence
  SARS-CoV-2/Australia/VIC01/2020__EPI_ISL_406844 spike protein (1-1147)(Q965C_S1003C) Ferritin construct
MFVFLVLLPLVSSQCVNLTTRTQLPPAYTNSFTRGVYYPDKVFRSSVLHSTQDLFLPFFSNVTWFHAIHVSGTNGTKRFDNPVLPFNDGVYFASTEKSNIIRGWIFGTTLDSKTQSLLIVNNATNVVIKVCEFQFCNDPFLGVYYHKNNKSWMESEFRVYSSANNCTFEYVSQPFLMDLEGKQGNFKNLREFVFKNIDGYFKIYSKHTPINLVRDLPQGFSALEPLVDLPIGINITRFQTLLALHRRYLTPGDSSSGWTAGAAAYYVGYLQPRTFLLKYNENGTITDAVDCALDPLSETKCTLKSFTVEKGIYQTSNFRVQPTESIVRFPNITNLCPFGEVFNATRFASVYAWNRKRISNCVADYSVLYNSASFSTFKCYGVSPTKLNDLCFTNVYADSFVIRGDEVRQIAPGQTGKIADYNYKLPDDFTGCVIAWNSNNLDSKVGGNYNYLYRLFRKSNLKPFERDISTEIYQAGSTPCNGVEGFNCYFPLQSYGFQPTNGVGYQPYRVVVLSFELLHAPATVCGPKKSTNLVKNKCVNFNFNGLTGTGVLTESNKKFLPFQQFGRDIADTTDAVRDPQTLEILDITPCSFGGVSVITPGTNTSNQVAVLYQDVNCTEVPVAIHADQLTPTWRVYSTGSNVFQTRAGCLIGAEHVNNSYECDIPIGAGICASYQTQTNSPRRARSVASQSIIAYTMSLGAENSVAYSNNSIAIPTNFTISVTTEILPVSMTKTSVDCTMYICGDSTECSNLLLQYGSFCTQLNRALTGIAVEQDKNTQEVFAQVKQIYKTPPIKDFGGFNFSQILPDPSKPSKRSFIEDLLFNKVTLADAGFIKQYGDCLGDIAARDLICAQKFNGLTVLPPLLTDEMIAQYTSALLAGTITSGWTFGAGAALQIPFAMQMAYRFNGIGVTQNVLYENQKLIANQFNSAIGKIQDSLSSTASALGKLQDVVNQNAQALNTLVKCLSSNFGAISSVLNDILSRLDKVEAEVQIDRLITGRLQCLQTYVTQQLIRAAEIRASANLAATKMSECVLGQSKRVDFCGKGYHLMSFPQSAPHGVVFLHVTYVPAQEKNFTTAPAICHDGKAHFPREGVFVSNGTHWFVTQRNFYEPQIITTDNTFVSGNCDVVIGIVNNTVYDPLQPELDSGGGGSDIIKLLNEQVNKEMQSSNLYMSMSSWCYTHSLDGAGLFLFDHAAEEYEHAKKLIIFLNENNVPVQLTSISAPEHKFEGLTQIFQKAYEHEQHISESINNIVDHAIKSKDHATFNFLQWYVAEQHEEEVLFKDILDKIELIGNENHGLYLADQYVKGIAKSRKS

SEQ ID NO: 9327 - protein, 1315 aa, Artificial Sequence
  SARS-CoV-2/Germany/BavPat1/2020__EPI_ISL_406862 spike protein (1-1147)(Q965C_S1003C) Ferritin construct
MFVFLVLLPLVSSQCVNLTTRTQLPPAYTNSFTRGVYYPDKVFRSSVLHSTQDLFLPFFSNVTWFHAIHVSGTNGTKRFDNPVLPFNDGVYFASTEKSNIIRGWIFGTTLDSKTQSLLIVNNATNVVIKVCEFQFCNDPFLGVYYHKNNKSWMESEFRVYSSANNCTFEYVSQPFLMDLEGKQGNFKNLREFVFKNIDGYFKIYSKHTPINLVRDLPQGFSALEPLVDLPIGINITRFQTLLALHRSYLTPGDSSSGWTAGAAAYYVGYLQPRTFLLKYNENGTITDAVDCALDPLSETKCTLKSFTVEKGIYQTSNFRVQPTESIVRFPNITNLCPFGEVFNATRFASVYAWNRKRISNCVADYSVLYNSASFSTFKCYGVSPTKLNDLCFTNVYADSFVIRGDEVRQIAPGQTGKIADYNYKLPDDFTGCVIAWNSNNLDSKVGGNYNYLYRLFRKSNLKPFERDISTEIYQAGSTPCNGVEGFNCYFPLQSYGFQPTNGVGYQPYRVVVLSFELLHAPATVCGPKKSTNLVKNKCVNFNFNGLTGTGVLTESNKKFLPFQQFGRDIADTTDAVRDPQTLEILDITPCSFGGVSVITPGTNTSNQVAVLYQGVNCTEVPVAIHADQLTPTWRVYSTGSNVFQTRAGCLIGAEHVNNSYECDIPIGAGICASYQTQTNSPRRARSVASQSIIAYTMSLGAENSVAYSNNSIAIPTNFTISVTTEILPVSMTKTSVDCTMYICGDSTECSNLLLQYGSFCTQLNRALTGIAVEQDKNTQEVFAQVKQIYKTPPIKDFGGFNFSQILPDPSKPSKRSFIEDLLFNKVTLADAGFIKQYGDCLGDIAARDLICAQKFNGLTVLPPLLTDEMIAQYTSALLAGTITSGWTFGAGAALQIPFAMQMAYRFNGIGVTQNVLYENQKLIANQFNSAIGKIQDSLSSTASALGKLQDVVNQNAQALNTLVKCLSSNFGAISSVLNDILSRLDKVEAEVQIDRLITGRLQCLQTYVTQQLIRAAEIRASANLAATKMSECVLGQSKRVDFCGKGYHLMSFPQSAPHGVVFLHVTYVPAQEKNFTTAPAICHDGKAHFPREGVFVSNGTHWFVTQRNFYEPQIITTDNTFVSGNCDVVIGIVNNTVYDPLQPELDSGGGGSDIIKLLNEQVNKEMQSSNLYMSMSSWCYTHSLDGAGLFLFDHAAEEYEHAKKLIIFLNENNVPVQLTSISAPEHKFEGLTQIFQKAYEHEQHISESINNIVDHAIKSKDHATFNFLQWYVAEQHEEEVLFKDILDKIELIGNENHGLYLADQYVKGIAKSRKS

SEQ ID NO: 9328 - protein, 1315 aa, Artificial Sequence
  SARS-CoV-2/Wuhan/HBCDC-HB-02/2020__EPI_ISL_412978 spike protein (1-1147)(Q965C_S1003C) Ferritin construct
MFVFLVLLPLVSSQCVNLTTRTQLPPAYTNSFTRGVYYPDKVFRSSVLHSTQDLFLPFFSNVTWFHAIHVSGTNGTKRFDNPVLPFNDGVYFASTEKSNIIRGWIFGTTLDSKTQSLLIVNNATNVVIKVCEFQFCNDPFLGVYYHKNNKSWMESEFRVYSSANNCTFEYVSQPFLMDLEGKQGNFKNLREFVFKNIDGYFKIYSKHTPINLVRDLPQGFSALEPLVDLPIGINITRFQTLLALHRSYLTPGDSSSGWTAGAAAYYVGYLQPRTFLLKYNENGTITDAVDCALDPLSETKCTLKSFTVEKGIYQTSNFRVQPTESIVRFPNITNLCPFGEVFNATRFASVYAWNRKRISNCVADYSVLYNSASFSTFKCYGVSPTKLNDLCFTNVYADSFVIRGDEVRQIAPGQTGKIADYNYKLPDDFTGCVIAWNSNNLDSKVGGNYNYLYRLFRKSNLKPFERDISTEIYQAGSTPCNGVEGFNCYFPLQSYGFQPTNGVGYQPYRVVVLSFELLHAPATVCGPKKSTNLVKNKCVNFNFNGLTGTGVLTESNKKFLPFQQFGRDIADTTDAVRDPQTLEILDITPCSFGGVSVITPGTNTSNQVAVLYQDVNCTEVPVAIHADQLTPTWRVYSTGSNVFQTRAGCLIGAEHVNNSYECDIPIGAGICASYQTQTNSPRRARSVASQSIIAYTMSLGAENSVAYSNNSIAIPTNFTISVTTEILPVSMTKTSVDCTMYICGDSTECSNFLLQYGSFCTQLNRALTGIAVEQDKNTQEVFAQVKQIYKTPPIKDFGGFNFSQILPDPSKPSKRSFIEDLLFNKVTLADAGFIKQYGDCLGDIAARDLICAQKFNGLTVLPPLLTDEMIAQYTSALLAGTITSGWTFGAGAALQIPFAMQMAYRFNGIGVTQNVLYENQKLIANQFNSAIGKIQDSLSSTASALGKLQDVVNQNAQALNTLVKCLSSNFGAISSVLNDILSRLDKVEAEVQIDRLITGRLQCLQTYVTQQLIRAAEIRASANLAATKMSECVLGQSKRVDFCGKGYHLMSFPQSAPHGVVFLHVTYVPAQEKNFTTAPAICHDGKAHFPREGVFVSNGTHWFVTQRNFYEPQIITTDNTFVSGNCDVVIGIVNNTVYDPLQPELDSGGGGSDIIKLLNEQVNKEMQSSNLYMSMSSWCYTHSLDGAGLFLFDHAAEEYEHAKKLIIFLNENNVPVQLTSISAPEHKFEGLTQIFQKAYEHEQHISESINNIVDHAIKSKDHATFNFLQWYVAEQHEEEVLFKDILDKIELIGNENHGLYLADQYVKGIAKSRKS

SEQ ID NO: 9329 - protein, 1315 aa, Artificial Sequence
  SARS-CoV-2/Australia/QLD02/2020__EPI_ISL_407896 spike protein (1-1147)(Q965C_S1003C) Ferritin construct
MFVFLVLLPLVSSQCVNLTTRTQLPPAYTNSFTRGVYYPDKVFRSSVLHSTQDLFLPFFSNVTWFHAIHVSGTNGTKRFDNPVLPFNDGVYFASTEKSNIIRGWIFGTTLDSKTQSLLIVNNATNVVIKVCEFQFCNDPFLGVYYHKNNKSWMESEFRVYSSANNCTFEYVSQPFLMDLEGKQGNFKNLREFVFKNIDGYFKIYSKHTPINLVRDLPQGFSALEPLVDLPIGINITRFQTLLALHRSYLTPGDSSSGWTAGAAAYYVGYLQPRTFLLKYNENGTITDAVDCALDPLSETKCTLKSFTVEKGIYQTSNFRVQPTESIVRFPNITNLCPFGEVFNATRFASVYAWNRKRISNCVADYSVLYNSASFSTFKCYGVSPTKLNDLCFTNVYADSFVIRGDEVRQIAPGQTGKIADYNYKLPDDFTGCVIAWNSNNLDSKVGGNYNYLYRLFRKSNLKPFERDISTEIYQAGSTPCNGVEGFNCYFPLQSYGFQPTNGVGYQPYRVVVLSFELLHAPATVCGPKKSTNLVKNKCVNFNFNGLTGTGVLTESNKKFLPFQQFGRDIADTTDAVRDPQTLEILDITPCSFGGVSVITPGTNTSNQVAVLYQDVNCTEVPVAIHADQLTPTWRVYSTGSNVFQTRAGCLIGAEHVNNSYECDIPIGAGICASYQTQTNSPRRARSVASQSIIAYTMSLGAENSVAYSNNSIAIPTNFTISVTTEILPVSMTKTSVDCTMYICGDSTECSNLLLQYGSFCTQLNRALTGIAVEQDKNTQEVFAQVKQIYKTPPIKDFGGFNFSQILPDPSKPSKRSFIEDLLFNKVTLADAGFIKQYGDCLGDIAARDLICAQKFNGLTVLPPLLTDEMIAQYTSALLAGTITSGWTFGAGAALQIPFAMQMAYRFNGIGVTQNVLYENQKLIANQFNSAIGKIQDSLSSTASALGKLQDVVNQNAQALNTLVKCLSSNFGAISSVLNDILSRLDKVEAEVQIDRLITGRLQCLQTYVTQQLIRAAEIRASANLAATKMSECVLGQSKRVDFCGKGYHLMSFPQSAPHGVVFLHVTYVPAQEKNFTTAPAICHDGKAHFPREGVFVSNGTHWFVTQRNFYEPQIITTDNTFVSGNCDVVIGIVNNTVYDPLQLELDSGGGGSDIIKLLNEQVNKEMQSSNLYMSMSSWCYTHSLDGAGLFLFDHAAEEYEHAKKLIIFLNENNVPVQLTSISAPEHKFEGLTQIFQKAYEHEQHISESINNIVDHAIKSKDHATFNFLQWYVAEQHEEEVLFKDILDKIELIGNENHGLYLADQYVKGIAKSRKS

SEQ ID NO: 9330 - protein, 1315 aa, Artificial Sequence
  SARS-CoV-2/India/1-31/2020__EPI_ISL_413523 spike protein (1-1147)(Q965C_S1003C) Ferritin construct
MFVFLVLLPLVSSQCVNLTTRTQLPPAYTNSFTRGVYYPDKVFRSSVLHSTQDLFLPFFSNVTWFHAIHVSGTNGTKRFDNPVLPFNDGVYFASTEKSNIIRGWIFGTTLDSKTQSLLIVNNATNVVIKVCEFQFCNDPFLGVYYHKNNKSWMESEFRVYSSANNCTFEYVSQPFLMDLEGKQGNFKNLREFVFKNIDGYFKIYSKHTPINLVRDLPQGFSALEPLVDLPIGINITRFQTLLALHRSYLTPGDSSSGWTAGAAAYYVGYLQPRTFLLKYNENGTITDAVDCALDPLSETKCTLKSFTVEKGIYQTSNFRVQPTESIVRFPNITNLCPFGEVFNATRFASVYAWNRKRISNCVADYSVLYNSASFSTFKCYGVSPTKLNDLCFTNVYADSFVIRGDEVRQIAPGQTGKIADYNYKLPDDFTGCVIAWNSNNLDSKVGGNYNYLYRLFRKSNLKPFERDISTEIYQAGSTPCNGVEGFNCYFPLQSYGFQPTNGVGYQPYRVVVLSFELLHAPATVCGPKKSTNLVKNKCVNFNFNGLTGTGVLTESNKKFLPFQQFGRDIADTTDAVRDPQTLEILDITPCSFGGVSVITPGTNTSNQVAVLYQDVNCTEVPVAIHADQLTPTWRVYSTGSNVFQTRAGCLIGAEHVNNSYECDIPIGAGICASYQTQTNSPRRARSVASQSIIAYTMSLGAENSVAYSNNSIAIPTNFTISVTTEILPVSMTKTSVDCTMYICGDSTECSNLLLQYGSFCTQLNRALTGIAVEQDKNTQEVFAQVKQIYKTPPIKDFGGFNFSQILPDPSKPSKRSFIEDLLFNKVTLADAGFIKQYGDCLGDIAARDLICAQKFNGLTVLPPLLTDEMIAQYTSALLAGTITSGWTFGAGAALQIPFAMQMAYRFNGIGVTQNVLYENQKLIANQFNSVIGKIQDSLSSTASALGKLQDVVNQNAQALNTLVKCLSSNFGAISSVLNDILSRLDKVEAEVQIDRLITGRLQCLQTYVTQQLIRAAEIRASANLAATKMSECVLGQSKRVDFCGKGYHLMSFPQSAPHGVVFLHVTYVPAQEKNFTTAPAICHDGKAHFPREGVFVSNGTHWFVTQRNFYEPQIITTDNTFVSGNCDVVIGIVNNTVYDPLQPELDSGGGGSDIIKLLNEQVNKEMQSSNLYMSMSSWCYTHSLDGAGLFLFDHAAEEYEHAKKLIIFLNENNVPVQLTSISAPEHKFEGLTQIFQKAYEHEQHISESINNIVDHAIKSKDHATFNFLQWYVAEQHEEEVLFKDILDKIELIGNENHGLYLADQYVKGIAKSRKS

SEQ ID NO: 9331 - protein, 1315 aa, Artificial Sequence
  SARS-CoV-2/Guangdong/GD2020087-P0008/2020__EPI_ISL_413863 spike protein (1-1147)(Q965C_S1003C) Ferritin construct
MFVFLVLLPLVSSQCVNLTTRTQLPPAYTNSFTRGVYYPDKVFRSSVLHSTQDLFLPFFSNVTWFHAIHVSGTNGTKRFDNPVLPFNDGVYFASTEKSNIIRGWIFGTTLDSKTQSLLIVNNATNVVIKVCEFQFCNDPFLGVYYHKNNKSWMESEFRVYSSANNCTFEYVSQPFLMDLEGKQGNFKNLREFVFKNIDGYFKIYSKHTPINLVRDLPQGFSALEPLVDLPIGINITRFQTLLALHRSYLTPGDSSSGWTAGAAAYYVGYLQPRTFLLKYNENGTITDAVDCALDPLSETKCTLKSFTVEKGIYQTSNFRVQPTESIVRFPNITNLCPFGEVFNATRFASVYAWNRKRISNCVADYSVLYNSASFSTFKCYGVSPTKLNDLCFTNVYADSFVIRGDEVREIAPGQTGKIADYNYKLPDDFTGCVIAWNSNNLDSKVGGNYNYLYRLFRKSNLKPFERDISTEIYQAGSTPCNGVEGFNCYFPLQSYGFQPTNGVGYQPYRVVVLSFELLHAPATVCGPKKSTNLVKNKCVNFNFNGLTGTGVLTESNKKFLPFQQFGRDIADTTDAVRDPQTLEILDITPCSFGGVSVITPGTNTSNQVAVLYQDVNCTEVPVAIHADQLTPTWRVYSTGSNVFQTRAGCLIGAEHVNNSYECDIPIGAGICASYQTQTNSPRRARSVASQSIIAYTMSLGAENSVAYSNNSIAIPTNFTISVTTEILPVSMTKTSVDCTMYICGDSTECSNLLLQYGSFCTQLNRALTGIAVEQDKNTQEVFAQVKQIYKTPPIKDFGGFNFSQILPDPSKPSKRSFIEDLLFNKVTLADAGFIKQYGDCLGDIAARDLICAQKFNGLTVLPPLLTDEMIAQYTSALLAGTITSGWTFGAGAALQIPFAMQMAYRFNGIGVTQNVLYENQKLIANQFNSAIGKIQDSLSSTASALGKLQDVVNQNAQALNTLVKCLSSNFGAISSVLNDILSRLDKVEAEVQIDRLITGRLQCLQTYVTQQLIRAAEIRASANLAATKMSECVLGQSKRVDFCGKGYHLMSFPQSAPHGVVFLHVTYVPAQEKNFTTAPAICHDGKAHFPREGVFVSNGTHWFVTQRNFYEPQIITTDNTFVSGNCDVVIGIVNNTVYDPLQPELDSGGGGSDIIKLLNEQVNKEMQSSNLYMSMSSWCYTHSLDGAGLFLFDHAAEEYEHAKKLIIFLNENNVPVQLTSISAPEHKFEGLTQIFQKAYEHEQHISESINNIVDHAIKSKDHATFNFLQWYVAEQHEEEVLFKDILDKIELIGNENHGLYLADQYVKGIAKSRKS

SEQ ID NO: 9332 - protein, 1315 aa, Artificial Sequence
  SARS-CoV-2/Sweden/01/2020__EPI_ISL_411951 spike protein (1-1147)(Q965C_S1003C) Ferritin construct
MFVFLVLLPLVSSQCVNLTTRTQLPPAYTNSFTRGVYYPDKVFRSSVLHSTQDLFLPFFSNVTWFHAIHVSGTNGTKRFDNPVLPFNDGVYFASTEKSNIIRGWIFGTTLDSKTQSLLIVNNATNVVIKVCEFQFCNDPFLGVYYHKNNKSWMESEFRVYSSANNCTFEYVSQPFLMDLEGKQGNFKNLREFVFKNIDGYFKIYSKHTPINLVRDLPQGFSALEPLVDLPIGINITRFQTLLALHRSYLTPGDSSSGWTAGAAAYYVGYLQPRTFLLKYNENGTITDAVDCALDPLSETKCTLKSFTVEKGIYQTSNFRVQPTESIVRFPNITNLCPFGEVFNATRFASVYAWNRKRISNCVADYSVLYNSASFSTFKCYGVSPTKLNDLCFTNVYADSFVIRGDEVRQIAPGQTGKIADYNYKLPDDFTGCVIAWNSNNLDSKVGGNYNYLYRLFRKSNLKPFERDISTEIYQAGSTPCNGVEGFNCYFPLQSYGFQPTNGVGYQPYRVVVLSFELLHAPATVCGPKKSTNLVKNKCVNFNFNGLTGTGVLTESNKKFLPFQQFGRDIADTTDAVRDPQTLEILDITPCSFGGVSVITPGTNTSNQVAVLYQDVNCTEVPVAIHADQLTPTWRVYSTGSNVFQTRAGCLIGAEHVNNSYECDIPIGAGICASYQTQTNSPRRARSVASQSIIAYTMSLGAENSVAYSNNSIAIPTNFTISVTTEILPVSMTKTSVDCTMYICGDSTECSNLLLQYGSFCTQLNRALTGIAVEQDKNTQEVFAQVKQIYKTPPIKDCGGFNFSQILPDPSKPSKRSFIEDLLFNKVTLADAGFIKQYGDCLGDIAARDLICAQKFNGLTVLPPLLTDEMIAQYTSALLAGTITSGWTFGAGAALQIPFAMQMAYRFNGIGVTQNVLYENQKLIANQFNSAIGKIQDSLSSTASALGKLQDVVNQNAQALNTLVKCLSSNFGAISSVLNDILSRLDKVEAEVQIDRLITGRLQCLQTYVTQQLIRAAEIRASANLAATKMSECVLGQSKRVDFCGKGYHLMSFPQSAPHGVVFLHVTYVPAQEKNFTTAPAICHDGKAHFPREGVFVSNGTHWFVTQRNFYEPQIITTDNTFVSGNCDVVIGIVNNTVYDPLQPELDSGGGGSDIIKLLNEQVNKEMQSSNLYMSMSSWCYTHSLDGAGLFLFDHAAEEYEHAKKLIIFLNENNVPVQLTSISAPEHKFEGLTQIFQKAYEHEQHISESINNIVDHAIKSKDHATFNFLQWYVAEQHEEEVLFKDILDKIELIGNENHGLYLADQYVKGIAKSRKS

SEQ ID NO: 9333 - protein, 1315 aa, Artificial Sequence
  SARS-CoV-2/Tianmen/HBCDC-HB-07/2020__EPI_ISL_412983 spike protein (1-1147)(Q965C_S1003C) Ferritin construct
MFVFLVLLPLVSSQCVNLTTRTQLPPAYTNSFTRGVYYPDKVFRSSVLHSTQDLFLPFFSNVTWFHAIHVSGTNGTKRFDNPVLPFNDGVYFASTEKSNIIRGWIFGTTLDSKTQSLLIVNNATNVVIKVCEFQFCNDPFLGVYYHKNNKSWMESEFRVYSSANNCTFEYVSQPFLMDLEGKQGNFKNLREFVFKNIDGYFKIYSKHTPINLVRDLPQGFSALEPLVDLPIGINITRFQTLLALHRSYLTPGDSSSGWTAGAAAYYVGYLQPRTFLLKYNENGTITDAVDCALDPLSETKCTLKSFTVEKGIYQTSNFRVQPTESIVRFPNITNLCPFGEVFNATRFASVYAWNRKRISNCVADYSVLYNSASFSTFKCYGVSPTKLNDLCFTNVYADSFVIRGDEVRQIAPGQTGKIADYNYKLPDDFTGCVIAWNSNNLDSKVGGNYNYLYRLFRKSNLKPFERDISTEIYQAGSTPCNGVEGFNCYFPLQSYGFQPTNGVGYQPYRVVVLSFELLHAPATVCGPKKSTNLVKNKCVNFNFNGLTGTGVLTESNKKFLPFQQFGRDIADTTDAVRDPQTLEILDITPCSFGGVSVITPGTNTSNQVAVLYQDLNCTEVPVAIHADQLTPTWRVYSTGSNVFQTRAGCLIGAEHVNNSYECDIPIGAGICASYQTQTNSPRRARSVASQSIIAYTMSLGAENSVAYSNNSIAIPTNFTISVTTEILPVSMTKTSVDCTMYICGDSTECSNLLLQYGSFCTQLNRALTGIAVEQDKNTQEVFAQVKQIYKTPPIKDFGGFNFSQILPDPSKPSKRSFIEDLLFNKVTLADAGFIKQYGDCLGDIAARDLICAQKFNGLTVLPPLLTDEMIAQYTSALLAGTITSGWTFGAGAALQIPFAMQMAYRFNGIGVTQNVLYENQKLIANQFNSAIGKIQDSLSSTASALGKLQDVVNQNAQALNTLVKCLSSNFGAISSVLNDILSRLDKVEAEVQIDRLITGRLQCLQTYVTQQLIRAAEIRASANLAATKMSECVLGQSKRVDFCGKGYHLMSFPQSAPHGVVFLHVTYVPAQEKNFTTAPAICHDGKAHFPREGVFVSNGTHWFVTQRNFYEPQIITTDNTFVSGNCDVVIGIVNNTVYDPLQPELDSGGGGSDIIKLLNEQVNKEMQSSNLYMSMSSWCYTHSLDGAGLFLFDHAAEEYEHAKKLIIFLNENNVPVQLTSISAPEHKFEGLTQIFQKAYEHEQHISESINNIVDHAIKSKDHATFNFLQWYVAEQHEEEVLFKDILDKIELIGNENHGLYLADQYVKGIAKSRKS

SEQ ID NO: 9334 - protein, 1315 aa, Artificial Sequence
  SARS-CoV-2/Hong Kong/case42_VM20002493/2020__EPI_ISL_414527 spike protein (1-1147)(Q965C_S1003C) Ferritin construct
MFVFLVLLPLVSSQCVNLTTRTQLPPAYTNSFTRGVYYPDKVFRSSVLHSTQDLFLPFFSNVTWFHAIHVSGTNGTKRFDNPVLPFNDGVYFASTEKSNIIRGWIFGTTLDSKTQSLLIVNNATNVVIKVCEFQFCNDPFLGVYYHKNNKSWMESEFRVYSSANNCTFEYVSQPFLMDLEGKQGNFKNLREFVFKNIDGYFKIYSKHTPINLVRDLPQGFSALEPLVDLPIGINITRFQTLLALHRSYLTPGDSSSGWTAGAAAYYVGYLQPRTFLLKYNENGTITDAVDCALDPLSETKCTLKSFTVEKGIYQTSNFRVQPTESIVRFPNITNLCPFGEVFNATRFASVYAWNRKRISNCVADYSVLYNSASFSTFKCYGVSPTKLNDLCFTNVYADSFVIRGDEVRQIAPGQTGKIADYNYKLPDDFTGCVIAWNSNNLDSKVGGNYNYLYRLFRKSNLKPFERDISTEIYQAGSTPCNGVEGFNCYFPLQSYGFQPTNGVGYQPYRVVVLSFELLHAPATVCGPKKSTNLVKNKCVNFNFNGLTGTGVLTESNKKFLPFQQFGRDIADTTDAVRDPQTLEILDITPCSFGGVSVITPGTNTSNQVAVLYQDVNCTEVPVAIHADQLTPTWRVYSTGSNVFQTRAGCLIGAEHVNNSYECDIPIGAGICASYQTQTNSPRRARSVASQSIIAYTMSLGAENSVAYSNNSIAIPTNFAISVTTEILPVSMTKTSVDCTMYICGDSTECSNLLLQYGSFCTQLNRALTGIAVEQDKNTQEVFAQVKQIYKTPPIKDFGGFNFSQILPDPSKPSKRSFIEDLLFNKVTLADAGFIKQYGDCLGDIAARDLICAQKFNGLTVLPPLLTDEMIAQYTSALLAGTITSGWTFGAGAALQIPFAMQMAYRFNGIGVTQNVLYENQKLIANQFNSAIGKIQDSLSSTASALGKLQDVVNQNAQALNTLVKCLSSNFGAISSVLNDILSRLDKVEAEVQIDRLITGRLQCLQTYVTQQLIRAAEIRASANLAATKMSECVLGQSKRVDFCGKGYHLMSFPQSAPHGVVFLHVTYVPAQEKNFTTAPAICHDGKAHFPREGVFVSNGTHWFVTQRNFYEPQIITTDNTFVSGNCDVVIGIVNNTVYDPLQPELDSGGGGSDIIKLLNEQVNKEMQSSNLYMSMSSWCYTHSLDGAGLFLFDHAAEEYEHAKKLIIFLNENNVPVQLTSISAPEHKFEGLTQIFQKAYEHEQHISESINNIVDHAIKSKDHATFNFLQWYVAEQHEEEVLFKDILDKIELIGNENHGLYLADQYVKGIAKSRKS

SEQ ID NO: 9335 - protein, 1315 aa, Artificial Sequence
  SARS-CoV-2/USA/CruiseA-23/2020__EPI_ISL_414482 spike protein (1-1147)(Q965C_S1003C) Ferritin construct
MFVFLVLLPLVSSQCVNLTTRTQLPPAYTNSFTRGVYYPDKVFRSSVLHSTQDLFLPFFSNVTWFHAIHVSGTNGTKRFDNPVLPFNDGVYFASTEKSNIIRGWIFGTTLDSKTQSLLIVNNATNVVIKVCEFQFCNDPFLGVYYHKNNKSWMESEFRVYSSANNCTFEYVSQPFLMDLEVKQGNFKNLREFVFKNIDGYFKIYSKHTPINLVRDLPQGFSALEPLVDLPIGINITRFQTLLALHRSYLTPGDSSSGWTAGAAAYYVGYLQPRTFLLKYNENGTITDAVDCALDPLSETKCTLKSFTVEKGIYQTSNFRVQPTESIVRFPNITNLCPFGEVFNATRFASVYAWNRKRISNCVADYSVLYNSASFSTFKCYGVSPTKLNDLCFTNVYADSFVIRGDEVRQIAPGQTGKIADYNYKLPDDFTGCVIAWNSNNLDSKVGGNYNYLYRLFRKSNLKPFERDISTEIYQAGSTPCNGVEGFNCYFPLQSYGFQPTNGVGYQPYRVVVLSFELLHAPATVCGPKKSTNLVKNKCVNFNFNGLTGTGVLTESNKKFLPFQQFGRDIADTTDAVRDPQTLEILDITPCSFGGVSVITPGTNTSNQVAVLYQDVNCTEVPVAIHADQLTPTWRVYSTGSNVFQTRAGCLIGAEHVNNSYECDIPIGAGICASYQTQTNSPRRARSVASQSIIAYTMSLGAENSVAYSNNSIAIPTNFTISVTTEILPVSMTKTSVDCTMYICGDSTECSNLLLQYGSFCTQLNRALTGIAVEQDKNTQEVFAQVKQIYKTPPIKDFGGFNFSQILPDPSKPSKRSFIEDLLFNKVTLADAGFIKQYGDCLGDIAARDLICAQKFNGLTVLPPLLTDEMIAQYTSALLAGTITSGWTFGAGAALQIPFAMQMAYRFNGIGVTQNVLYENQKLIANQFNSAIGKIQDSLSSTASALGKLQDVVNQNAQALNTLVKCLSSNFGAISSVLNDILSRLDKVEAEVQIDRLITGRLQCLQTYVTQQLIRAAEIRASANLAATKMSECVLGQSKRVDFCGKGYHLMSFPQSAPHGVVFLHVTYVPAQEKNFTTAPAICHDGKAHFPREGVFVSNGTHWFVTQRNFYEPQIITTDNTFVSGNCDVVIGIVNNTVYDPLQPELDSGGGGSDIIKLLNEQVNKEMQSSNLYMSMSSWCYTHSLDGAGLFLFDHAAEEYEHAKKLIIFLNENNVPVQLTSISAPEHKFEGLTQIFQKAYEHEQHISESINNIVDHAIKSKDHATFNFLQWYVAEQHEEEVLFKDILDKIELIGNENHGLYLADQYVKGIAKSRKS

SEQ ID NO: 9336 - protein, 1315 aa, Artificial Sequence
  SARS-CoV-2/Hong Kong/case85_VM20002868/2020__EPI_ISL_414519 spike protein (1-1147)(Q965C_S1003C) Ferritin construct
MFVFLVLVPLVSSQCVNLTTRTQLPPAYTNSFTRGVYYPDKVFRSSVLHSTQDLFLPFFSNVTWFHAIHVSGTNGTKRFDNPVLPFNDGVYFASTEKSNIIRGWIFGTTLDSKTQSLLIVNNATNVVIKVCEFQFCNDPFLGVYYHKNNKSWMESEFRVYSSANNCTFEYVSQPFLMDLEGKQGNFKNLREFVFKNIDGYFKIYSKHTPINLVRDLPQGFSALEPLVDLPIGINITRFQTLLALHRSYLTPGDSSSGWTAGAAAYYVGYLQPRTFLLKYNENGTITDAVDCALDPLSETKCTLKSFTVEKGIYQTSNFRVQPTESIVRFPNITNLCPFGEVFNATRFASVYAWNRKRISNCVADYSVLYNSASFSTFKCYGVSPTKLNDLCFTNVYADSFVIRGDEVRQIAPGQTGKIADYNYKLPDDFTGCVIAWNSNNLDSKVGGNYNYLYRLFRKSNLKPFERDISTEIYQAGSTPCNGVEGFNCYFPLQSYGFQPTNGVGYQPYRVVVLSFELLHAPATVCGPKKSTNLVKNKCVNFNFNGLTGTGVLTESNKKFLPFQQFGRDIADTTDAVRDPQTLEILDITPCSFGGVSVITPGTNTSNQVAVLYQDVNCTEVPVAIHADQLTPTWRVYSTGSNVFQTRAGCLIGAEHVNNSYECDIPIGAGICASYQTQTNSPRRARSVASQSIIAYTMSLGAENSVAYSNNSIAIPTNFTISVTTEILPVSMTKTSVDCTMYICGDSTECSNLLLQYGSFCTQLNRALTGIAVEQDKNTQEVFAQVKQIYKTPPIKDFGGFNFSQILPDPSKPSKRSFIEDLLFNKVTLADAGFIKQYGDCLGDIAARDLICAQKFNGLTVLPPLLTDEMIAQYTSALLAGTITSGWTFGAGAALQIPFAMQMAYRFNGIGVTQNVLYENQKLIANQFNSAIGKIQDSLSSTASALGKLQDVVNQNAQALNTLVKCLSSNFGAISSVLNDILSRLDKVEAEVQIDRLITGRLQCLQTYVTQQLIRAAEIRASANLAATKMSECVLGQSKRVDFCGKGYHLMSFPQSAPHGVVFLHVTYVPAQEKNFTTAPAICHDGKAHFPREGVFVSNGTHWFVTQRNFYEPQIITTDNTFVSGNCDVVIGIVNNTVYDPLQPELDSGGGGSDIIKLLNEQVNKEMQSSNLYMSMSSWCYTHSLDGAGLFLFDHAAEEYEHAKKLIIFLNENNVPVQLTSISAPEHKFEGLTQIFQKAYEHEQHISESINNIVDHAIKSKDHATFNFLQWYVAEQHEEEVLFKDILDKIELIGNENHGLYLADQYVKGIAKSRKS

SEQ ID NO: 9337 - protein, 1315 aa, Artificial Sequence; identical to SEQ ID NO: 9327
  SARS-CoV-2/England/200990660/2020__EPI_ISL_414523 spike protein (1-1147)(Q965C_S1003C) Ferritin construct

SEQ ID NO: 9338 - protein, 1315 aa, Artificial Sequence
  SARS-CoV-2/Australia/NSW09/2020__EPI_ISL_413595 spike protein (1-1147)(Q965C_S1003C) Ferritin construct
MFVFLVLLPLVSSQCVNLTTRTQLPPAYTNSFTRGVYYPDKVFRSSVLHSTQDLFLPFFSNVTWFHAIHVSGTNGTKRFDNPVLPFNDGVYFASTEKSNIIRGWIFGTTLDSKTQSLLIVNNATNVVIKVCEFQFCNDPFLGVYYHKNNKSWMESEFRVYSSANNCTFEYVSQPFLMDLEGKQGNFKNLREFVFKNIDGYFKIYSKHTPINLVRDLPQGFSALEPLVDLPIGINITRFQTLLALHRSYLTPGDSSSGWTAGAAAYYVGYLQPRTFLLKYNENGTITDAVDCALDPLSETKCTLKSFTVEKGIYQTSNFRVQPTESIVRFPNITNLCPFGEVFNATRFASVYAWNRKRISNCVADYSVLYNSASFSTFKCYGVSPTKLNDLCFTNVYADSFVIRGDEVRQIAPGQTGKIADYNYKLPDDFTGCVIAWNSNNLDSKVGGNYNYLYRLFRKSNLKPFERDISTEIYQAGSTPCNGVEGFNCYFPLQSYGFQPTNGVGYQPYRVVVLSFELLHAPATVCGPKKSTNLVKNKCVNFNFNGLTGTGVLTESNKKFLPFQQFGRDIADTTDAVRDPQTLEILDITPCSFGGVSVITPGTNTSNQVAVLYQDVNCTEVPVAIHADQLTPTWRVYSTGSNVFQTRAGCLIGAEHVNNSYECDIPIGAGICASYQTQTNSPRRARSVASQSIIAYTMSLGAENSVAYSNNSIAIPTNFTISVTTEILPVSMTKTSVDCTMYICGDSTECSNLLLQYGSFCTQLNRALTGIAVEQDKNTQEVFAQVKQIYKTPPIKDFGGFNFSQILPDPSKPSKRSFIEDLLFNKVTLADAGFIKQYGDCLGDIAARDLICAQKFNGLTVLPPLLTDEMIAQYTSALLAGTITSGWTFGAGAALQIPFAMQMAYRFNGIGVTQNVLYENQKLIANQFNSAIGKIQDSLSFTASALGKLQDVVNQNAQALNTLVKCLSSNFGAISSVLNDILSRLDKVEAEVQIDRLITGRLQCLQTYVTQQLIRAAEIRASANLAATKMSECVLGQSKRVDFCGKGYHLMSFPQSAPHGVVFLHVTYVPAQEKNFTTAPAICHDGKAHFPREGVFVSNGTHWFVTQRNFYEPQIITTDNTFVSGNCDVVIGIVNNTVYDPLQPELDSGGGGSDIIKLLNEQVNKEMQSSNLYMSMSSWCYTHSLDGAGLFLFDHAAEEYEHAKKLIIFLNENNVPVQLTSISAPEHKFEGLTQIFQKAYEHEQHISESINNIVDHAIKSKDHATFNFLQWYVAEQHEEEVLFKDILDKIELIGNENHGLYLADQYVKGIAKSRKS

SEQ ID NO: 9339 - protein, 1315 aa, Artificial Sequence; identical to SEQ ID NO: 9319
  SARS-CoV-2/Australia/NSW10/2020__EPI_ISL_413596 spike protein (1-1147)(Q965C_S1003C) Ferritin construct

SEQ ID NO: 9340 - protein, 1315 aa, Artificial Sequence
  SARS-CoV-2/Switzerland/1000477797/2020__EPI_ISL_413023 spike protein (1-1147)(Q965C_S1003C) Ferritin construct
MFVFLVLLPLVSSQCVNLTTRTQLPPAYTNSFTRGVYYPDKVFRSSVLHSTQDLFLPFFSNVTWFHAIHVSGTNGTKRFDNPVLPFNDGVYFASTEKSNIIRGWIFGTTLDSKTQSLLIVNNATNVVIKVCEFQFCNDPFLGVYYHKNNKSWMESEFRVYSSANNCTFEYVSQPFLMDLEGKQGNFKNLREFVFKNIDGYFNIYSKHTPINLVRDLPQGFSALEPLVDLPIGINITRFQTLLALHRSYLTPGDSSSGWTAGAAAYYVGYLQPRTFLLKYNENGTITDAVDCALDPLSETKCTLKSFTVEKGIYQTSNFRVQPTESIVRFPNITNLCPFGEVFNATRFASVYAWNRKRISNCVADYSVLYNSASFSTFKCYGVSPTKLNDLCFTNVYADSFVIRGDEVRQIAPGQTGKIADYNYKLPDDFTGCVIAWNSNNLDSKVGGNYNYLYRLFRKSNLKPFERDISTEIYQAGSTPCNGVEGFNCYFPLQSYGFQPTNGVGYQPYRVVVLSFELLHAPATVCGPKKSTNLVKNKCVNFNFNGLTGTGVLTESNKKFLPFQQFGRDIADTTDAVRDPQTLEILDITPCSFGGVSVITPGTNTSNQVAVLYQGVNCTEVPVAIHADQLTPTWRVYSTGSNVFQTRAGCLIGAEHVNNSYECDIPIGAGICASYQTQTNSPRRARSVASQSIIAYTMSLGAENSVAYSNNSIAIPTNFTISVTTEILPVSMTKTSVDCTMYICGDSTECSNLLLQYGSFCTQLNRALTGIAVEQDKNTQEVFAQVKQIYKTPPIKDFGGFNFSQILPDPSKPSKRSFIEDLLFNKVTLADAGFIKQYGDCLGDIAARDLICAQKFNGLTVLPPLLTDEMIAQYTSALLAGTITSGWTFGAGAALQIPFAMQMAYRFNGIGVTQNVLYENQKLIANQFNSAIGKIQDSLSSTASALGKLQDVVNQNAQALNTLVKCLSSNFGAISSVLNDILSRLDKVEAEVQIDRLITGRLQCLQTYVTQQLIRAAEIRASANLAATKMSECVLGQSKRVDFCGKGYHLMSFPQSAPHGVVFLHVTYVPAQEKNFTTAPAICHDGKAHFPREGVFVSNGTHWFVTQRNFYEPQIITTDNTFVSGNCDVVIGIVNNTVYDPLQPELDSGGGGSDIIKLLNEQVNKEMQSSNLYMSMSSWCYTHSLDGAGLFLFDHAAEEYEHAKKLIIFLNENNVPVQLTSISAPEHKFEGLTQIFQKAYEHEQHISESINNIVDHAIKSKDHATFNFLQWYVAEQHEEEVLFKDILDKIELIGNENHGLYLADQYVKGIAKSRKS

SEQ ID NO: 9341 - protein, 1315 aa, Artificial Sequence
  SARS-CoV-2/Belgium/BA-02291/2020__EPI_ISL_415159 spike protein (1-1147)(Q965C_S1003C) Ferritin construct
MFVFLVLLPLVSSQCVNLTTRTQLPPAYTNSFTRGVYYPDKVFRSSVLHSTQDLFLPFFSNVTWFHAIHVSGTNGTKRFDNPVLPFNDGVYFASTEKSNIIRGWIFGTTLDSKTQSLLIVNNATNVVIKVCEFQFCNDPFLGVYYHKNNKSWMESEFRVYSSANNCTFEYVSQPFLMDLEGKQGNFKNLREFVFKNIDGYFKIYSKHTPINLVRDLPQGFSALEPLVDLPIGINITRFQTLLALHRSYLTPGDSSSGWTAGAAAYYVGYLQPRTFLLKYNENGTITDAVDCALDPLSETKCTLKSFTVEKGIYQTSNFRVQPTESIVRFPNITNLCPFGEVFNATRFASVYAWNRKRISNCVADYSVLYNSASFSTFKCYGVSPTKLNDLCFTNVYADSFVIRGDEVRQIAPGQTGKIADYNYKLPDDFTGCVIAWNSNNLDSKVGGNYNYLYRLFRRSNLKPFERDISTEIYQAGSTPCNGVEGFNCYFPLQSYGFQPTNGVGYQPYRVVVLSFELLPAPATVCGPKKSTNLVKNKCVNFNFNGLTGTGVLTESNKKFLPFQQFGRDIADTTDAVRDPQTLEILDITPCSFGGVSVITPGTNTSNQVAVLYQGVNCTEVPVAIHADQLTPTWRVYSTGSNVFQTRAGCLIGAEHVNNSYECDIPIGAGICASYQTQTNSPRRARSVASQSIIAYTMSLGAENSVAYSNNSIAIPTNFTISVTTEILPVSMTKTSVDCTMYICGDSTECSNLLLQYGSFCTQLNRALTGIAVEQDKNTQEVFAQVKQIYKTPPIKDFGGFNFSQILPDPSKPSKRSFIEDLLFNKVTLADAGFIKQYGDCLGDIAARDLICAQKFNGLTVLPPLLTDEMIAQYTSALLAGTITSGWTFGAGAALQIPFAMQMAYRFNGIGVTQNVLYENQKLIANQFNSAIGKIQDSLSSAAPALGKLQDVVNQNAQALNTLVKCLSSNFGAISSVLNDILSRLDKVEAEVQIDRLITGRLQCLQTYVTQQLIRAAEIRASANLAATKMSECVLGQSKRVDFCGKGYHLMSFPQSAPHGVVFLHVTYVPAQEKNFTTAPAICHDGKAHFPREGVFVSNGTHWFVTQRNFYEPQIITTDNTFVSGNCDVVIGIVNNTVYDPLQPELDSGGGGSDIIKLLNEQVNKEMQSSNLYMSMSSWCYTHSLDGAGLFLFDHAAEEYEHAKKLIIFLNENNVPVQLTSISAPEHKFEGLTQIFQKAYEHEQHISESINNIVDHAIKSKDHATFNFLQWYVAEQHEEEVLFKDILDKIELIGNENHGLYLADQYVKGIAKSRKS

SEQ ID NO: 9342 - protein, 1315 aa, Artificial Sequence
  SARS-CoV-2/USA/WA8-UW5/2020__EPI_ISL_413486 spike protein (1-1147)(Q965C_S1003C) Ferritin construct
MFVFLVLLPLVSSQCVNLTTRTQLPPAYTNSFTRGVYYPDKVFRSSVLHSTQDLFLPFFSNVTWFHAIHVSGTNGTKRFDNPVLPFNDGVYFASTEKSNIIRGWIFGTTLDSKTQSLLIVNNATNVVIKVCEFQFCNDPFLGVYYHKNNKSWMESEFRVYSSANNCTFEYVSQPFLMDLEGKQGNFKNLREFVFKNIDGYFKIYSKHTPINLVRDLPQGFSALEPLVDLPIGINITRFQTLLALHRSYLTPGDSSSGWTAGAAAYYVGYLQPRTFLLKYNENGTITDAVDCALDPLSETKCTLKSFTVEKGIYQTSNFRVQPTESIVRFPNITNLCPFGEVFNATRFASVYAWNRKRISNCVADYSVLYNSASFSTFKCYGVSPTKLNDLCFTNVYADSFVIRGDEVRQIAPGQTGKIADYNYKLPDDFTGCVIAWNSNNLDSKVGGNYNYLYRLFRKSNLKPFERDISTEIYQAGSTPCNGVEGFNCYFPLQSYGFQPTNGVGYQPYRVVVLSFELLHAPATVCGPKKSTNLVKNKCVNFNFNGLTGTGVLTESNKKFLPFQQFGRDIADTTDAVRDPQTLEILDITPCSFGGVSVITPGTNTSNQVAVLYQDVNCTEVPVAIHADQLTPTWRVYSTGSNVFQTRAGCLIGAEYVNNSYECDIPIGAGICASYQTQTNSPRRARSVASQSIIAYTMSLGAENSVAYSNNSIAIPTNFTISVTTEILPVSMTKTSVDCTMYICGDSTECSNLLLQYGSFCTQLNRALTGIAVEQDKNTQEVFAQVKQIYKTPPIKDFGGFNFSQILPDPSKPSKRSFIEDLLFNKVTLADAGFIKQYGDCLGDIAARDLICAQKFNGLTVLPPLLTDEMIAQYTSALLAGTITSGWTFGAGAALQIPFAMQMAYRFNGIGVTQNVLYENQKLIANQFNSAIGKIQDSLSSTASALGKLQDVVNQNAQALNTLVKCLSSNFGAISSVLNDILSRLDKVEAEVQIDRLITGRLQCLQTYVTQQLIRAAEIRASANLAATKMSECVLGQSKRVDFCGKGYHLMSFPQSAPHGVVFLHVTYVPAQEKNFTTAPAICHDGKAHFPREGVFVSNGTHWFVTQRNFYEPQIITTDNTFVSGNCDVVIGIVNNTVYDPLQPELDSGGGGSDIIKLLNEQVNKEMQSSNLYMSMSSWCYTHSLDGAGLFLFDHAAEEYEHAKKLIIFLNENNVPVQLTSISAPEHKFEGLTQIFQKAYEHEQHISESINNIVDHAIKSKDHATFNFLQWYVAEQHEEEVLFKDILDKIELIGNENHGLYLADQYVKGIAKSRKS

SEQ ID NO: 9343 - protein, 1315 aa, Artificial Sequence
  SARS-CoV-2/England/20102000506/2020__EPI_ISL_415147 spike protein (1-1147)(Q965C_S1003C) Ferritin construct
MFVFLVLLPLVSSQCVNLTTRTQLPPAYTNSFTRGVYYPDKVFRSSVLHSTQDLFLPFFSNVTWFHAIHVSGTNGTKRFDNPVLPFNDGVYFASTEKSNIIRGWIFGTTLDSKTQSLLIVNNATNVVIKVCEFQFCNDPFLGVYYHKNNKSWMESEFRVYSSANNCTFEYVSQPFLMDLEGKQGNFKNLREFVFKNIDGYFKIYSKHTPINLVRDLPQGFSALEPLVDLPIGINITRFQTLLALHRSYLTPGDSSSGWTAGAAAYYVGYLQPRTFLLKYNENGTITDAVDCALDPLSETKCTLKSFTVEKGIYQTSNFRVQPTESIVRFPNITNLCPFGEVFNATRFASVYAWNRKRISNCVADYSVLYNSASFSTFKCYGVSPTKLNDLCFTNVYADSFVIRGDEVRQIAPGQTGKIADYNYKLPDDFTGCVIAWNSNNLDSKVGGNYNYLYRLFRKSNLKPFERDISTEIYQAGSTPCNGVEGFNCYFPLQSYGFQPTNGVGYQPYRVVVLSFELLHAPATVCGPKKSTNLVKNKCVNFNFNGLTGTGVLTESNKKFLPFQQFGRDIADTTDAVRDPQTLEILDITPCSFGGVSVITPGTNTSNQVAVLYQGVNCTEVPVAIHADQLTPTWRVYSTGSNVFQTRAGCLIGAEHVNNSYECDIPIGAGICASYQTQTNSPRRARSVASQSIIAYTMSLGAENSVAYSNNSIAIPTNFTISVTTEILPVSMTKTSVDCTMYICGDSTECSNLLLQYGSFCTQLNRALTGIAVEQDKNTQEVFAQVKQIYKTPPIKDFGGFNFSQILPDPSKPSKRSFIEDLLFNKVTLADAGFIKQYGYCLGDIAARDLICAQKFNGLTVLPPLLTDEMIAQYTSALLAGTITSGWTFGAGAALQIPFAMQMAYRFNGIGVTQNVLYENQKLIANQFNSAIGKIQDSLSSTASALGKLQDVVNQNAQALNTLVKCLSSNFGAISSVLNDILSRLDKVEAEVQIDRLITGRLQCLQTYVTQQLIRAAEIRASANLAATKMSECVLGQSKRVDFCGKGYHLMSFPQSAPHGVVFLHVTYVPAQEKNFTTAPAICHDGKAHFPREGVFVSNGTHWFVTQRNFYEPQIITTDNTFVSGNCDVVIGIVNNTVYDPLQPELDSGGGGSDIIKLLNEQVNKEMQSSNLYMSMSSWCYTHSLDGAGLFLFDHAAEEYEHAKKLIIFLNENNVPVQLTSISAPEHKFEGLTQIFQKAYEHEQHISESINNIVDHAIKSKDHATFNFLQWYVAEQHEEEVLFKDILDKIELIGNENHGLYLADQYVKGIAKSRKS

SEQ ID NO: 9344 - protein, 1315 aa, Artificial Sequence
  SARS-CoV-2/Belgium/VAG-03013/2020__EPI_ISL_415155 spike protein (1-1147)(Q965C_S1003C) Ferritin construct
MFVFLVLLPLVSSQCVNLTTRTQLPPAYTNSFTRGVYYPDKVFRSSVLHSTQDLFLPFFSNVTWFHAIHVSGTNGTKRFDNPVLPFNDGVYFASTEKSNIIRGWIFGTTLDSKTQSLLIVNNATNVVIKVCEFQFCNDPFLGVYYHKNNKSWMESEFRVYSSANNCTFEYVSQPFLMDLEGKQGNFKNLREFVFKNIDGYFKIYSKHTPINLVRDLPQGFSALEPLVDLPIGINITRFQTLLALHRSYLTPGDSSSGWTAGAAAYYVGYLQPRTFLLKYNENGTITDAVDCALDPLSETKCTLKSFTVEKGIYQTSNFRVQPTESIVRFPNITNLCPFGEVFNATRFASVYAWNRKRISNCVADYSVLYNSASFSTFKCYGVSPTKLNDLCFTNVYADSFVIRGDEVRQIAPGQTGKIADYNYKLPDDFTGCVIAWNSNNLDSKVGGNYNYLYRLFRKSNLKPFERDISTEIYQAGSTPCNGVEGFNCYFPLQSYGFQPTNGVGYQPYRVVVLSFELLHAPATVCGPKKSTNLVKNKCVNFNFNGLTGTGVLTESNKKFLPFQQFGRDIADTTDAVRDPQTLEILDITPCSFGGVSVITPGTNTSNQVAVLYQGVNCTEVPVAIHADQLTPTWRVYSTGSNVFQTRAGCLIGAEHVNNSYECDIPIGAGICASYQTQTNSPRRARSVASQSIIAYTMSLGAENSVAYSNNSIAIPTNFTISVTTEILPVSMTKTSVDCTMYICGDSTECSNLLLQYGSFCTQLNRALTGIAVEQDKNTQEVFAQVKQIYKTPPIKDFGGFNFSQILPDPSKPSKRSFIEDLLFNKVTLADAGFIKQYGDCLGDIAARDLICAQKFNGLTVLPPLLTDEMIAQYTSALLAGTITSGWTFGAGAALQIPFAMQMAYRFNGIGVTQNVLYENQKLIANQFNSAIGKIQDSLSSTATALGKLQDVVNQNAQALNTLVKCLSSNFGAISSVLNDILSRLDKVEAEVQIDRLITGRLQCLQTYVTQQLIRAAEIRASANLAATKMSECVLGQSKRVDFCGKGYHLMSFPQSAPHGVVFLHVTYVPAQEKNFTTAPAICHDGKAHFPREGVFVSNGTHWFVTQRNFYEPQIITTDNTFVSGNCDVVIGIVNNTVYDPLQPELDSGGGGSDIIKLLNEQVNKEMQSSNLYMSMSSWCYTHSLDGAGLFLFDHAAEEYEHAKKLIIFLNENNVPVQLTSISAPEHKFEGLTQIFQKAYEHEQHISESINNIVDHAIKSKDHATFNFLQWYVAEQHEEEVLFKDILDKIELIGNENHGLYLADQYVKGIAKSRKS

SEQ ID NO: 9345 - protein, 1315 aa, Artificial Sequence
  SARS-CoV-2/Belgium/BC-03016/2020__EPI_ISL_415157 spike protein (1-1147)(Q965C_S1003C) Ferritin construct
MFVFLVLLPLVSSQCVNLTTRTQLPPAYTNSFTRGVYYPDKVFRSSVLHSTQDLFLPFFSNVTWFHAIHVSGTNGTKRFDNPVLPFNDGVYFASTEKSNIIRGWIFGTTLDSKTQSLLIVNNATNVVIKVCEFQFCNDPFLGVYYHKNNKSWMESEFRVYSSANNCTFEYVSQPFLMDLEGKQGNFKNLREFVFKNIDGYFKIYSKHTPINLVRDLPQGFSALEPLVDLPIGINITRFQTLLALHRSYLTPGDSSSGWTAGAAAYYVGYLQPRTFLLKYNENGTITDAVDCALDPLSETKCTLKSFTVEKGIYQTSNFRVQPTESIVRFPNITNLCPFGEVFNATRFASVYAWNRKRISNCVADYSVLYNSASFSTFKCYGVSPTKLNDLCFTNVYADSFVIRGDEVRQIAPGQTGKIADYNYKLPDDFTGCVIAWNSNNLDSKVGGNYNYLYRLFRKSNLKPFERDISTEIYQAGSTPCNGVEGFNCYFPLQSYGFQPTNGVGYQPYRVVVLSFELLHAPATVCGPKKSTNLVKNKCVNFNFNGLTGTGVLTESNKKFLPFQQFGRDIADTTDAVRDPQTLEILDITPCSFGGVSVITPGTNTSNQVAVLYQGVNCTEVPVAIHADQLTPTWRVYSTGSNVFQTRAGCLIGAEHVNNSYECDIPIGAGICASYQTQTNSPRRARSVASQSIIAYTMSLGAENSVAYSNNSIAIPTNFTISVTTEILPVSMTKTSVDCTMYICGDSTECSNLLLQYGSFCTQLNRALTGIAVEQDKNTQEVFAQVKQIYKTPPIKDFGGFNFSQILPDPSKPSKRSFIEDLLFNKVTLADAGFIKQYGDCLGDIAARDLICAQKFNGLTVLPPLLTDEMIAQYTSALLAGTITSGWTFGAGAALQIPFAMQMAYRFNGIGVTQNVLYENQKLIANQFNSAIGKIQDSLSSTAPALGKLQDVVNQNAQALNTLVKCLSSNFGAISSVLNDILSRLDKVEAEVQIDRLITGRLQCLQTYVTQQLIRAAEIRASANLAATKMSECVLGQSKRVDFCGKGYHLMSFPQSAPHGVVFLHVTYVPAQEKNFTTAPAICHDGKAHFPREGVFVSNGTHWFVTQRNFYEPQIITTDNTFVSGNCDVVIGIVNNTVYDPLQPELDSGGGGSDIIKLLNEQVNKEMQSSNLYMSMSSWCYTHSLDGAGLFLFDHAAEEYEHAKKLIIFLNENNVPVQLTSISAPEHKFEGLTQIFQKAYEHEQHISESINNIVDHAIKSKDHATFNFLQWYVAEQHEEEVLFKDILDKIELIGNENHGLYLADQYVKGIAKSRKS

SEQ ID NO: 9346 - protein, 1315 aa, Artificial Sequence
  SARS-CoV-2/Germany/BavPat3/2020__EPI_ISL_414521 spike protein (1-1147)(Q965C_S1003C) Ferritin construct
MFVFLVLLPLVSSQCVNLTTRTQLPPAYTNSFTRGVYYPDKVFRSSVLHSTQDLFLPFFSNVTWFHAIHVSGTNGTKRFDNPVLPFNDGVYFASTEKSNIIRGWIFGTTLDSKTQSLLIVNNATNVVIKVCEFQFCNDPFLGVYYHKNNKSWMESEFRVYSSANNCTFEYVSQPFLMDLEGKQGNFKNLREFVFKNIDGYFKIYSKHTPINLVRDLPQGFSALEPLVDLPIGINITRFQTLLALHRSYLTPGDSSSGWTAGAAAYYVGYLQPRTFLLKYNENGTITDAVDCALDPLSETKCTLKSFTVEKGIYQTSNFRVQPTESIVRFPNITNLCPFGEVFNATRFASVYAWNRKRISNCVADYSVLYNSASFSTFKCYGVSPTKLNDLCFTNVYADSFVIRGDEVRQIAPGQTGKIADYNYKLPDDFTGCVIAWNSNNLDSKVGGNYNYLYRLFRKSNLKPFERDISTEIYQAGSTPCNGVEGFNCYFPLQSYGFQPTNGVGYQPYRVVVLSFELLHAPATVCGPKKSTNLVKNKCVNFNFNGLTGTGVLTESNKKFLPFQQFGRDIADTTDAVRDPQTLEILDITPCSFGGVSVITPGTNTSNQVAVLYQDVNCTEVPVAIHADQLTPTWRVYSTGSNVFQTRAGCLIGAEHVNNSYECDIPIGAGICASYQTQTNSPRRARSVASQSIIAYTMSLGAENSVAYSNNSIAIPTNFTISVTTEILPVSMTKTSVDCTMYICGDSTECSNLLLQYGSFCTQLNRALTGIAVEQDKNTQQVFAQVKQIYKTPPIKDFGGFNFSQILPDPSKPSKRSFIEDLLFNKVTLADAGFIKQYGDCLGDIAARDLICAQKFNGLTVLPPLLTDEMIAQYTSALLAGTITSGWTFGAGAALQIPFAMQMAYRFNGIGVTQNVLYENQKLIANQFNSAIGKIQDSLSSTASALGKLQDVVNQNAQALNTLVKCLSSNFGAISSVLNDILSRLDKVEAEVQIDRLITGRLQCLQTYVTQQLIRAAEIRASANLAATKMSECVLGQSKRVDFCGKGYHLMSFPQSAPHGVVFLHVTYVPAQEKNFTTAPAICHDGKAHFPREGVFVSNGTHWFVTQRNFYEPQIITTDNTFVSGNCDVVIGIVNNTVYDPLQPELDSGGGGSDIIKLLNEQVNKEMQSSNLYMSMSSWCYTHSLDGAGLFLFDHAAEEYEHAKKLIIFLNENNVPVQLTSISAPEHKFEGLTQIFQKAYEHEQHISESINNIVDHAIKSKDHATFNFLQWYVAEQHEEEVLFKDILDKIELIGNENHGLYLADQYVKGIAKSRKS

SEQ ID NO: 9347 - protein, 1315 aa, Artificial Sequence
  SARS-CoV-2/France/HF1805/2020__EPI_ISL_414628 spike protein (1-1147)(Q965C_S1003C) Ferritin construct
MFVFLVLLPLVSSQCVNLTTRTQLPPAYTNSFTRGVYYPDKVFRSSVLHSTQDLFLPFFSNVTWFHAIHVSGTNGTKRFDNPVLPFNDGVYFASTEKSNIIRGWIFGTTLDSKTQSLLIVNNATNVVIKVCEFQFCNDPFLGVYYHKNNKSWMESEFRVYSSANNCTFEYVSQPFLMDLEGKQGNFKNLREFVFKNIDGYFKIYSKHTPINLVRDLPQGFSALEPLVDLPIGINITRFQTLLALHRSYLTPGDSSSGWTAGAAAYYVGYLQPRTFLLKYNENGTITDAVDCALDPLSETKCTLKSFTVEKGIYQTSNFRVQPTESIVRFPNITNLCPFGEVFNATRFASVYAWNRKRISNCVADYSVLYNSASFSTFKCYGVSPTKLNDLCFTNVYADSFVIRGDEVRQIAPGQTGKIADYNYKLPDDFTGCVIAWNSNNLDSKVGGNYNYLYRLFRKSNLKPFERDISTEIYQAGSTPCNGVEGFNCYFPLQSYGFQPTNGVGYQPYRVVVLSFELLHAPATVCGPKKSTNLVKNKCVNFNFNGLTGTGVLTESNKKFLPFQQFGRDIADTTDAVRDPQTLEILDITPCSFGGVSVITPGTNTSNQVAVLYQGVNCTEVPVAIHADQLTPTWRVYSTGSNVFQTRAGCLIGAEHVNNSYECDIPIGAGICASYQTQTNSPRRARSVASQSIIAYTMSLGAENSVAYSNNSIAIPTNFTISVTTEILPVSMTKTSVDCTMYICGDSTECSNLLLQYGSFCTQLNRALTGIAVEQDKNTQEVFAQVKQIYKTPPIKDFGGFNFSQILPDPSKPSKRSFIEDLLFNKVTLADAGFIKQYGDCLGDIAARDLICAQKFNGLTVLPPLLTDEMIAQYTSALLAGTITSGWTFGAGAALQIPFAMQMAYRFNGIGVTQNVLYENQKLIANQFNSAIGKIQDSLSSTASALGKLQDVVNQNAQALNTLVKCLSSNFGAISSVLNDILSRLDKVEAEVQIDRLITGRLQCLQTYVTQQLIRAAEIRASANLAATKMSECVLGQSKRVDFCGKGYHLMSFPQSAPHGVVFLHVTYVPAQEKNFTTAPAICHDGKAHFPREGVFVSNGTHWFVTQRNFYEPQIITTDNTFVSGNCDVVIGVVNNTVYDPLQPELDSGGGGSDIIKLLNEQVNKEMQSSNLYMSMSSWCYTHSLDGAGLFLFDHAAEEYEHAKKLIIFLNENNVPVQLTSISAPEHKFEGLTQIFQKAYEHEQHISESINNIVDHAIKSKDHATFNFLQWYVAEQHEEEVLFKDILDKIELIGNENHGLYLADQYVKGIAKSRKS

SEQ ID NO: 9348 - protein, 1315 aa, Artificial Sequence
  SARS-CoV-2/Netherlands/ZuidHolland_9/2020__EPI_ISL_414445 spike protein (1-1147)(Q965C_S1003C) Ferritin construct
MFVFLVLLPLVSSQCVNLTTRTQLPPAYTNSFTRGVYYPDKVFRSSVLHSTQDLFLPFFSNVTWFHAIHVSGTNGTKRFDNPVLPFNDGVYFASTEKSNIIRGWIFGTTLDSKTQSLLIVNNATNVVIKVCEFQFCNDPFLGVYYHKNNKSWMESEFRVYSSANNCTFEYVSQPFLMDLEGKQGNFKNLREFVFKNIDGYFKIYSKHTPINLVRDLPQGFSALEPLVDLPIGINITRFQTLLALHRSYLTPGDSSSGWTAGAAAYYVGYLQPRTFLLKYNENGTITDAVDCALDPLSETKCTLKSFTVEKGIYQTSNFRVQPTESIVRFPNITNLCPFGEVFNATRFASVYAWNRKRISNCVADYSVLYNSASFSTFKCYGVSPTKLNDLCFTNVYADSFVIRGDEVRQIAPGQTGKIADYNYKLPDDFTGCVIAWNSNNLDSKVGGNYNYLYRLFRKSNLKPFERDISTEIYQAGSTPCNGVEGFNCYFPLQSYGFQPTNGVGYQPYRVVVLSFELLHAPATVCGPKKSTNLVKNKCVNFNFNGLTGTGVLTESNKKFLPFQQFGRDIADTTDAVRDPQTLEILDITPCSFGGVSVITPGTNTSNQVAVLYQGVNCTEVPVAIHADQLTPTWRVYSTGSNVFQTRAGCLIGAEHVNNSYECDIPIGAGICASYQTQTNSPRRARSVASQSIIAYTMSLGAENSVAYSNNSIAIPTNFTISVTTEILPVSMTKTSVDCTMYICGDSTECSNLLLQYGSFCTQLNRALTGIAVEQDKNTQEVFAQVKQIYKTPPIKDFGGFNFSQILPDPSKPSKRSFIEDLLFNKVTLADAGFIKQYGDCLGDIAARDLICVQKFNGLTVLPPLLTDEMIAQYTSALLAGTITSGWTFGAGAALQIPFAMQMAYRFNGIGVTQNVLYENQKLIANQFNSAIGKIQDSLSSTASALGKLQDVVNQNAQALNTLVKCLSSNFGAISSVLNDILSRLDKVEAEVQIDRLITGRLQCLQTYVTQQLIRAAEIRASANLAATKMSECVLGQSKRVDFCGKGYHLMSFPQSAPHGVVFLHVTYVPAQEKNFTTAPAICHDGKAHFPREGVFVSNGTHWFVTQRNFYEPQIITTDNTFVSGNCDVVIGIVNNTVYDPLQPELDSGGGGSDIIKLLNEQVNKEMQSSNLYMSMSSWCYTHSLDGAGLFLFDHAAEEYEHAKKLIIFLNENNVPVQLTSISAPEHKFEGLTQIFQKAYEHEQHISESINNIVDHAIKSKDHATFNFLQWYVAEQHEEEVLFKDILDKIELIGNENHGLYLADQYVKGIAKSRKS

SEQ ID NO: 9349 - protein, 1315 aa, Artificial Sequence
  SARS-CoV-2/Finland/FIN03032020A/2020__EPI_ISL_413602 spike protein (1-1147)(Q965C_S1003C) Ferritin construct
MFVFLVLLPLVSSQCVNLTTRTQLPPAYTNSFTRGVYYPDKVFRSSVLHSTQDLFLPFFSNVTWFHAIHVSGTNGTKRFDNPVLPFNDGVYFASTEKSNIIRGWIFGTTLDSKTQSLLIVNNATNVVIKVCEFQFCNDPFLGVYYHKNNKSWMESEFRVYSSANNCTFEYVSQPFLMDLEGKQGNFKNLREFVFKNIDGYFKIYSKHTPINLVRDLPQGFSALEPLVDLPIGINITRFQTLLALHRSYLTPGDSSSGWTAGAAAYYVGYLQPRTFLLKYNENGTITDAVDCALDPLSETKCTLKSFTVEKGIYQTSNFRVQPTESIVRFPNITNLCPFGEVFNATRFASVYAWNRKRISNCVADYSVLYNSASFSTFKCYGVSPTKLNDLCFTNVYADSFVIRGDEVRQIAPGQTGKIADYNYKLPDDFTGCVISWNSNNLDSKVGGNYNYLYRLFRKSNLKPFERDISTEIYQAGSTPCNGVEGFNCYFPLQSYGFQPTNGVGYQPYRVVVLSFELLHAPATVCGPKKSTNLVKNKCVNFNFNGLTGTGVLTESNKKFLPFQQFGRDIADTTDAVRDPQTLEILDITPCSFGGVSVITPGTNTSNQVAVLYQGVNCTEVPVAIHADQLTPTWRVYSTGSNVFQTRAGCLIGAEHVNNSYECDIPIGAGICASYQTQTNSPRRARSVASQSIIAYTMSLGAENSVAYSNNSIAIPTNFTISVTTEILPVSMTKTSVDCTMYICGDSTECSNLLLQYGSFCTQLNRALTGIAVEQDKNTQEVFAQVKQIYKTPPIKDFGGFNFSQILPDPSKPSKRSFIEDLLFNKVTLADAGFIKQYGDCLGDIAARDLICAQKFNGLTVLPPLLTDEMIAQYTSALLAGTITSGWTFGAGAALQIPFAMQMAYRFNGIGVTQNVLYENQKLIANQFNSAIGKIQDSLSSTASALGKLQDVVNQNAQALNTLVKCLSSNFGAISSVLNDILSRLDKVEAEVQIDRLITGRLQCLQTYVTQQLIRAAEIRASANLAATKMSECVLGQSKRVDFCGKGYHLMSFPQSAPHGVVFLHVTYVPAQEKNFTTAPAICHDGKAHFPREGVFVSNGTHWFVTQRNFYEPQIITTDNTFVSGNCDVVIGIVNNTVYDPLQPELDSGGGGSDIIKLLNEQVNKEMQSSNLYMSMSSWCYTHSLDGAGLFLFDHAAEEYEHAKKLIIFLNENNVPVQLTSISAPEHKFEGLTQIFQKAYEHEQHISESINNIVDHAIKSKDHATFNFLQWYVAEQHEEEVLFKDILDKIELIGNENHGLYLADQYVKGIAKSRKS

SEQ ID NO: 9350 - protein, 1315 aa, Artificial Sequence
  SARS-CoV-2/France/GE1977/2020__EPI_ISL_414632 spike protein (1-1147)(Q965C_S1003C) Ferritin construct
MFVFLVLLPLVSSQCVNLTTRTQLPPAYTNSFTRGVYYPDKVFRSSVLHSTQDLFLPFFSNVTWFHAIHVSGTNGTKRFDNPVLPFNDGVYFASTEKSNIIRGWIFGTTLDSKTQSLLIVNNATNVVIKVCEFQFCNDPFLGVYYHKNNKSWMESEFRVYSSANNCTFEYVSQPFLMDLEGKQGNFKNLREFVFKNIDGYFKIYSKHTPINLVRDLPQGFSALEPLVDLPIGINITRFQTLLALHRSYLTPGDSSSGWTAGAAAYYVGYLQPRTFLLKYNENGTITDAVDCALDPLSETKCTLKSFTVEKGIYQTSNFRVQPTESIVRFPNITNLCPFGEVFNATRFASVYAWNRKRISNCVADYSVLYNSASFSTFKCYGVSPTKLNDLCFTNVYADSFVIRGDEVRQIAPGQTGKIADYNYKLPDDFTGCVIAWNSNNLDSKVGGNYNYLYRLFRKSNLKPFERDISTEIYQAGSTPCNGVEGFNCYFPLQSYGFQPTNGVGYQPYRVVVLSFELLHAPATVCGPKKSTNLVKNKCVNFNFNGLTGTGVLTESNKKFLPFQQFGRDIADTTDAVRDPQTLEILDITPCSFGGVSVITPGTNTSNQVAVLYQGVNCTEVPVAIHADQLTPTWRVYSTGSNVFQTRAGCLIGAEHVNNSYECDIPIGAGICASYQTQTNSPRRARSVASQSIIAYTMSLGAENSVAYSNNSIAIPTNFTISVTTEILPVSMTKTSVDCTMYICGDSTECSNLLLQYGSFCTQLNRALTGIAVEQDKNTQEVFAQVKQIYKTPPIKDFGGFNFSQILPDPSKPSKRSFIEDLLFNKVTLADAGFIKQYGDCLGDIAARDLICAQKFNGLTVLPPLLTDEMIAQYTSALLAGTITSGWTFGAGAALQIPFAMQMAYRFNGIGVTQNVLYENQKLIANQFNSAIGKIQDSLFSTASALGKLQDVVNQNAQALNTLVKCLSSNFGAISSVLNDILSRLDKVEAEVQIDRLITGRLQCLQTYVTQQLIRAAEIRASANLAATKMSECVLGQSKRVDFCGKGYHLMSFPQSAPHGVVFLHVTYVPAQEKNFTTAPAICHDGKAHFPREGVFVSNGTHWFVTQRNFYEPQIITTDNTFVSGNCDVVIGIVNNTVYDPLQPELDSGGGGSDIIKLLNEQVNKEMQSSNLYMSMSSWCYTHSLDGAGLFLFDHAAEEYEHAKKLIIFLNENNVPVQLTSISAPEHKFEGLTQIFQKAYEHEQHISESINNIVDHAIKSKDHATFNFLQWYVAEQHEEEVLFKDILDKIELIGNENHGLYLADQYVKGIAKSRKS

SEQ ID NO: 9351 - protein, 1315 aa, Artificial Sequence
  SARS-CoV-2/Finland/FIN-313/2020__EPI_ISL_414641 spike protein (1-1147)(Q965C_S1003C) Ferritin construct
MFVFLVLLPLVSSQCVNLTTRTQLPPAYTNSFTRGVYYPDKVFRSSVLHSTQDLFLPFFSNVTWFHAIHVSGTNGTKRFDNPVLPFNDGVYFASTEKSNIIRGWIFGTTLDSKTQSLLIVNNATNVVIKVCEFQFCNDPFLGVYYHKNNKSWMESEFRVYSSANNCTFEYVSQPFLMDLEGKQGNFKNLREFVFKNIDGYFKIYSKHTPINLVRDLPQGFSALEPLVDLPIGINITRFKTLLALHRSYLTPGDSSSGWTAGAAAYYVGYLQPRTFLLKYNENGTITDAVDCALDPLSETKCTLKSFTVEKGIYQTSNFRVQPTESIVRFPNITNLCPFGEVFNATRFASVYAWNRKRISNCVADYSVLYNSASFSTFKCYGVSPTKLNDLCFTNVYADSFVIRGDEVRQIAPGQTGKIADYNYKLPDDFTGCVIAWNSNNLDSKVGGNYNYLYRLFRKSNLKPFERDISTEIYQAGSTPCNGVEGFNCYFPLQSYGFQPTNGVGYQPYRVVVLSFELLHAPATVCGPKKSTNLVKNKCVNFNFNGLTGTGVLTESNKKFLPFQQFGRDIADTTDAVRDPQTLEILDITPCSFGGVSVITPGTNTSNQVAVLYQGVNCTEVPVAIHADQLTPTWRVYSTGSNVFQTRAGCLIGAEHVNNSYECDIPIGAGICASYQTQTNSPRRARSVASQSIIAYTMSLGAENSVAYSNNSIAIPTNFTISVTTEILPVSMTKTSVDCTMYICGDSTECSNLLLQYGSFCTQLNRALTGIAVEQDKNTQEVFAQVKQIYKTPPIKDFGGFNFSQILPDPSKPSKRSFIEDLLFNKVTLADAGFIKQYGDCLGDIAARDLICAQKFNGLTVLPPLLTDEMIAQYTSALLAGTITSGWTFGAGAALQIPFAMQMAYRFNGIGVTQNVLYENQKLIANQFNSAIGKIQDSLSSTASALGKLQDVVNQNAQALNTLVKCLSSNFGAISSVLNDILSRLDKVEAEVQIDRLITGRLQCLQTYVTQQLIRAAEIRASANLAATKMSECVLGQSKRVDFCGKGYHLMSFPQSAPHGVVFLHVTYVPAQEKNFTTAPAICHDGKAHFPREGVFVSNGTHWFVTQRNFYEPQIITTDNTFVSGNCDVVIGIVNNTVYDPLQPELDSGGGGSDIIKLLNEQVNKEMQSSNLYMSMSSWCYTHSLDGAGLFLFDHAAEEYEHAKKLIIFLNENNVPVQLTSISAPEHKFEGLTQIFQKAYEHEQHISESINNIVDHAIKSKDHATFNFLQWYVAEQHEEEVLFKDILDKIELIGNENHGLYLADQYVKGIAKSRKS

SEQ ID NO: 9352 - protein, 1315 aa, Artificial Sequence
  SARS-CoV-2/Netherlands/ZuidHolland_2/2020__EPI_ISL_414556 spike protein (1-1147)(Q965C_S1003C) Ferritin construct
MFVFLVLLPLVSSQCVNLTTRTQLPPAYTNSFTRGVYYPDKVFRSSVLHSTQDLFLPFFSNVTWFHAIHVSGTNGTKRFDNPVLPFNDGVYFASTEKSNIIRGWIFGTTLDSKTQSLLIVNNATNVVIKVCEFQFCNDPFLGVYYHKNNKSWMESEFRVYSSANNCTFEYVSQPFLMDLEGKQGNFKNLREFVFKNIDGYFKIYSKHTPINLVRDLPQGFSALEPLVDLPIGINITRFQTLLALHRSYLTPGDSSSGWTAGAAAYYVGYLQPRTFLLKYNENGTITDAVDCALDPLSETKCTLKSFTVEKGIYQTSNFRVQPTESIVRFPNITNLCPFGEVFNATRFASVYAWNRKRISNCVADYSVLYNSASFSTFKCYGVSPTKLNDLCFTNVYADSFVIRGDEVRQIAPGQTGKIADYNYKLPDDFTGCVIAWNSNNLDSKVGGNYNYLYRLFRKSNLKPFERDISTEIYQAGSTPCNGVEGFNCYFPLQSYGFQPTNGVGYQPYRVVVLSFELLHAPATVCGPKKSTNLVKNKCVNFNFNGLTGTGVLTESNKKFLPFQQFGRDIADTTDAVRDPQTLEILDITPCSFGGVSVITPGTNTSNQVAVLYQGVNCTEVPVAIHADQLTPTWRVYSTGSNVFQTRAGCLIGAEHVNNSYECDIPIGAGICASYQTQTNSPRRARSVASQSIIAYTMSLGAENSVAYSNNSIAIPTNFTISVTTEILPVSMTKTSVDCTMYICGDSTECSNLLLQYGSFCTQLNRALTGIALEQDKNTQEVFAQVKQIYKTPPIKDFGGFNFSQILPDPSKPSKRSFIEDLLFNKVTLADAGFIKQYGDCLGDIAARDLICAQKFNGLTVLPPLLTDEMIAQYTSALLAGTITSGWTFGAGAALQIPFAMQMAYRFNGIGVTQNVLYENQKLIANQFNSAIGKIQDSLSSTASALGKLQDVVNQNAQALNTLVKCLSSNFGAISSVLNDILSRLDKVEAEVQIDRLITGRLQCLQTYVTQQLIRAAEIRASANLAATKMSECVLGQSKRVDFCGKGYHLMSFPQSAPHGVVFLHVTYVPAQEKNFTTAPAICHDGKAHFPREGVFVSNGTHWFVTQRNFYEPQIITTDNTFVSGNCDVVIGIVNNTVYDPLQPELDSGGGGSDIIKLLNEQVNKEMQSSNLYMSMSSWCYTHSLDGAGLFLFDHAAEEYEHAKKLIIFLNENNVPVQLTSISAPEHKFEGLTQIFQKAYEHEQHISESINNIVDHAIKSKDHATFNFLQWYVAEQHEEEVLFKDILDKIELIGNENHGLYLADQYVKGIAKSRKS

SEQ ID NO: 9353 - protein, 1315 aa, Artificial Sequence
  SARS-CoV-2/USA/WA-UW31/2020__EPI_ISL_414618 spike protein (1-1147)(Q965C_S1003C) Ferritin construct
MFVFLVLLPLVSSQCVNLTTRTQLPPAYTNSFTRGVYYPDKVFRSSVLHSTQDLFLPFFSNVTWFHAIHVSGTNGTKRFDNPVLPFNDGVYFASTEKSNIIRGWIFGTTLDSKTQSLLIVNNATNVVIKVCEFQFCNDPFLGVYYHKNNKSWMESEFRVYSSANNCTFEYVSQPFLMDLEGKQGNFKNLREFVFKNIDGYFKIYSKHTPINLVRDLPQGFSALEPLVDLPIGINITRFQTLLALHRSYLTPGDSSSGWTAGAAAYYVGYLQPRTFLLKYNENGTITDAVDCALDPLSETKCTLKSFTVEKGIYQTSNFRVQPTESIVRFPNITNLCPFGEVFNATRFASVYAWNRKRISNCVADYSVLYNSASFSTFKCYGVSPTKLNDLCFTNVYADSFVIRGDEVRQIAPGQTGKIADYNYKLPDDFTGCVIAWNSNNLDSKVGGNYNYLYRLFRKSNLKPFERDISTEIYQAGSTPCNGAEGFNCYFPLQSYGFQPTNGVGYQPYRVVVLSFELLHAPATVCGPKKSTNLVKNKCVNFNFNGLTGTGVLTESNKKFLPFQQFGRDIADTTDAVRDPQTLEILDITPCSFGGVSVITPGTNTSNQVAVLYQDVNCTEVPVAIHADQLTPTWRVYSTGSNVFQTRAGCLIGAEHVNNSYECDIPIGAGICASYQTQTNSPRRARSVASQSIIAYTMSLGAENSVAYSNNSIAIPTNFTISVTTEILPVSMTKTSVDCTMYICGDSTECSNLLLQYGSFCTQLNRALTGIAVEQDKNTQEVFAQVKQIYKTPPIKDFGGFNFSQILPDPSKPSKRSFIEDLLFNKVTLADAGFIKQYGDCLGDIAARDLICAQKFNGLTVLPPLLTDEMIAQYTSALLAGTITSGWTFGAGAALQIPFAMQMAYRFNGIGVTQNVLYENQKLIANQFNSAIGKIQDSLSSTASALGKLQDVVNQNAQALNTLVKCLSSNFGAISSVLNDILSRLDKVEAEVQIDRLITGRLQCLQTYVTQQLIRAAEIRASANLAATKMSECVLGQSKRVDFCGKGYHLMSFPQSAPHGVVFLHVTYVPAQEKNFTTAPAICHDGKAHFPREGVFVSNGTHWFVTQRNFYEPQIITTDNTFVSGNCDVVIGIVNNTVYDPLQPELDSGGGGSDIIKLLNEQVNKEMQSSNLYMSMSSWCYTHSLDGAGLFLFDHAAEEYEHAKKLIIFLNENNVPVQLTSISAPEHKFEGLTQIFQKAYEHEQHISESINNIVDHAIKSKDHATFNFLQWYVAEQHEEEVLFKDILDKIELIGNENHGLYLADQYVKGIAKSRKS

SEQ ID NO: 9354 - protein, 1315 aa, Artificial Sequence
  SARS-CoV-2/South Korea/SNU01/2020__EPI_ISL_411929 spike protein (1-1147)(Q965C_S1003C) Ferritin construct
MFVFLVLLPLVSSQCVNLTTRTQLPPAYTNSFTRGVYYPDKVFRSSVLHSTQDLFLPFFSNVTWFHAIHVSGTNGTKRFDNPVLPFNDGVYFASTEKSNIIRGWIFGTTLDSKTQSLLIVNNATNVVIKVCEFQFCNDPFLGVYYHKNNKSWMESEFRVYSSANNCTFEYVSQPFLMDLEGKQGNFKNLREFVFKNIDGYFKIYSKHTPINLVRDLPQGFWALEPLVDLPIGINITRFQTLLALHRSYLTPGDSSSGWTAGAAAYYVGYLQPRTFLLKYNENGTITDAVDCALDPLSETKCTLKSFTVEKGIYQTSNFRVQPTESIVRFPNITNLCPFGEVFNATRFASVYAWNRKRISNCVADYSVLYNSASFSTFKCYGVSPTKLNDLCFTNVYADSFVIRGDEVRQIAPGQTGKIADYNYKLPDDFTGCVIAWNSNNLDSKVGGNYNYLYRLFRKSNLKPFERDISTEIYQAGSTPCNGVEGFNCYFPLQSYGFQPTNGVGYQPYRVVVLSFELLHAPATVCGPKKSTNLVKNKCVNFNFNGLTGTGVLTESNKKFLPFQQFGRDIADTTDAVRDPQTLEILDITPCSFGGVSVITPGTNTSNQVAVLYQDVNCTEVPVAIHADQLTPTWRVYSTGSNVFQTRAGCLIGAEHVNNSYECDIPIGAGICASYQTQTNSPRRARSVASQSIIAYTMSLGAENSVAYSNNSIAIPTNFTISVTTEILPVSMTKTSVDCTMYICGDSTECSNLLLQYGSFCTQLNRALTGIAVEQDKNTQEVFAQVKQIYKTPPIKDFGGFNFSQILPDPSKPSKRSFIEDLLFNKVTLADAGFIKQYGDCLGDIAARDLICAQKFNGLTVLPPLLTDEMIAQYTSALLAGTITSGWTFGAGAALQIPFAMQMAYRFNGIGVTQNVLYENQKLIANQFNSAIGKIQDSLSSTASALGKLQDVVNQNAQALNTLVKCLSSNFGAISSVLNDILSRLDKVEAEVQIDRLITGRLQCLQTYVTQQLIRAAEIRASANLAATKMSECVLGQSKRVDFCGKGYHLMSFPQSAPHGVVFLHVTYVPAQEKNFTTAPAICHDGKAHFPREGVFVSNGTHWFVTQRNFYEPQIITTDNTFVSGNCDVVIGIVNNTVYDPLQPELDSGGGGSDIIKLLNEQVNKEMQSSNLYMSMSSWCYTHSLDGAGLFLFDHAAEEYEHAKKLIIFLNENNVPVQLTSISAPEHKFEGLTQIFQKAYEHEQHISESINNIVDHAIKSKDHATFNFLQWYVAEQHEEEVLFKDILDKIELIGNENHGLYLADQYVKGIAKSRKS

SEQ ID NO: 9355 - protein, 1315 aa, Artificial Sequence
  SARS-CoV-2/China/WF0004/2020__EPI_ISL_413694 spike protein (1-1147)(Q965C_S1003C) Ferritin construct
MFVFLVLLPLVSSQCVNLTTRTQLPPAYTNSFTRGVYYPDKVFRSSVLHSTQDLFLPFFSNVTWFHAIHVSGTNGTKRFDNPVLPFNDGVYFASTEKSNIIRGWIFGTTLDSKTQSLLIVNNATNVVIKVCEFQFCNDPFLGVYYHKNNKSWTESEFRVYSSANNCTFEYVSQPFLMDLEGKQGNFKNLREFVFKNIDGYFKIYSKHTPINLVRDLPQGFSALEPLVDLPIGINITRFQTLLALHRSYLTPGDSSSGWTAGAAAYYVGYLQPRTFLLKYNENGTITDAVDCALDPLSETKCTLKSFTVEKGIYQTSNFRVQPTESIVRFPNITNLCPFGEVFNATRFASVYAWNRKRISNCVADYSVLYNSASFSTFKCYGVSPTKLNDLCFTNVYADSFVIRGDEVRQIAPGQTGKIADYNYKLPDDFTGCVIAWNSNNLDSKVGGNYNYLYRLFRKSNLKPFERDISTEIYQAGSTPCNGVEGFNCYFPLQSYGFQPTNGVGYQPYRVVVLSFELLHAPATVCGPKKSTNLVKNKCVNFNFNGLTGTGVLTESNKKFLPFQQFGRDIADTTDAVRDPQTLEILDITPCSFGGVSVITPGTNTSNQVAVLYQDVNCTEVPVAIHADQLTPTWRVYSTGSNVFQTRAGCLIGAEHVNNSYECDIPIGAGICASYQTQTNSPRRARSVASQSIIAYTMSLGAENSVAYSNNSIAIPTNFTISVTTEILPVSMTKTSVDCTMYICGDSTECSNLLLQYGSFCTQLNRALTGIAVEQDKNTQEVFAQVKQIYKTPPIKDFGGFNFSQILPDPSKPSKRSFIEDLLFNKVTLADAGFIKQYGDCLGDIAARDLICAQKFNGLTVLPPLLTDEMIAQYTSALLAGTITSGWTFGAGAALQIPFAMQMAYRFNGIGVTQNVLYENQKLIANQFNSAIGKIQDSLSSTASALGKLQDVVNQNAQALNTLVKCLSSNFGAISSVLNDILSRLDKVEAEVQIDRLITGRLQCLQTYVTQQLIRAAEIRASANLAATKMSECVLGQSKRFDFCGKGYHLMSFPQSAPHGVVFLHVTYVPAQEKNFTTAPAICHDGKAHFPREGVFVSNGTHWFVTQRNFYEPQIITTDNTFVSGNCDVVIGIVNNTVYDPLQPELDSGGGGSDIIKLLNEQVNKEMQSSNLYMSMSSWCYTHSLDGAGLFLFDHAAEEYEHAKKLIIFLNENNVPVQLTSISAPEHKFEGLTQIFQKAYEHEQHISESINNIVDHAIKSKDHATFNFLQWYVAEQHEEEVLFKDILDKIELIGNENHGLYLADQYVKGIAKSRKS

SEQ ID NO: 9356 - protein, 1315 aa, Artificial Sequence
  SARS-CoV-2/China/WF0028/2020__EPI_ISL_413791 spike protein (1-1147)(Q965C_S1003C) Ferritin construct
MFVFLVLLPLVSSQCVNLTTRTQLPPAYTNSFTRGVYYPDKVFRSSVLHSTQDLFLPFFSNVTWFHAIHVSGTNGTKRFDNPVLPFNDGVYFASTEKSNIIRGWIFGTTLDSKTQSLLIVNNATNVVIKVCEFQFCNDPFLGVYYHKNNKSWMESEFRVYSSANNCTFEYVSQPFLMDLEGKQGNFKNLREFVFKNIDGYFKIYSKHTPINLVRDLPQGFSALEPLVDLPIGINITRFQTLLALHRSYLTPGDSSSGWTAGAAAYYVGYLQPRTFLLKYNENGTITDAVDCALDPLSETKCTLKSFTVEKGIYQTSNFRVQPTESIVRFPNITNLCPFGEVFNATRFASVYAWNRKRISNCVADYSVLYNSASFSTFKCYGVSPTKLNDLCFTNVYADSFVIRGDEVRQIAPGQTGKIADYNYKLPDDFTGCVIAWNSNNLDSKVGGNYNYLYRLFRKSNLKPFERDISTEIYQAGSTPCNGVEGFNCYFPLQSYGFQPTNGVGYQPYRVVVLSFELLHAPATVCGPKKSTNLVKNKCVNFNFNGLTGTGVLTESNKKFLPFQQFGRDIADTTDAVRDPQTLEILDITPCSFGGVSVITPGTNTSNQVAVLYQDVNCTEVPVAIHADQLTPTWRVYSTGSNVFQTRAGCLIGAEHVNNSYECDIPIGAGICASYQTQTNSPRRARSVASQSIIAYTMSLGAENSVAYSNNSIAIPTNFTISVTTEILPVSMTKTSVDCTMYICGDSTECSNLLLQYGSFCTQLNRALTGIAVEQDKNTQEVFAQVKQIYKTPPIKDFGGFNFSQILPDPSKPSKRSFIEDLLFNKVTLADAGFIKQYGDCLGDIAARDLICAQKFNGLTVLPPLLTDEMIAQYTSALLAGTITSGWTFGAGAALQIPFAMQMAYRFNGIGVTQNVLYENQKLIANQFNSAIGKIQDSLSSTASALGKLQDVVNQNAQALNTLVKCLSSNFGAISSVLNDILSRLDKVEAEVQIDRLITGRLQCLQTYVTQQLIRAAEIRASANLAATKMSECVLGQSKRVDFCGKGYHLMSFPQSAPHGVVFLHVTYVPAQEKNFTTAPAICHDGKAHFPREGVFVSNGTHWFVTQRNFYEPQIITTDNTFVSGNCDVVIGIVNNTVYDPLQPELESGGGGSDIIKLLNEQVNKEMQSSNLYMSMSSWCYTHSLDGAGLFLFDHAAEEYEHAKKLIIFLNENNVPVQLTSISAPEHKFEGLTQIFQKAYEHEQHISESINNIVDHAIKSKDHATFNFLQWYVAEQHEEEVLFKDILDKIELIGNENHGLYLADQYVKGIAKSRKS

SEQ ID NO: 9357 - protein, 1315 aa, Artificial Sequence
  SARS-CoV-2/2019-nCoV/USA-CruiseA-18/2020__MT159716.1 spike protein (1-1147)(Q965C_S1003C) Ferritin construct
MFVFLVLLPLVSSQCVNLTTRTQLPPAYTNSFTRGVYYPDKVFRSSVLHSTQDLFLPFFSNVTWFHAIHVSGTNGTKRFDNPVLPFNDGVYFASTEKSNIIRGWIFGTTLDSKTQSLLIVNNATNVVIKVCEFQFCNDPFLGVYYHKNNKSWMESELRVYSSANNCTFEYVSQPFLMDLEGKQGNFKNLREFVFKNIDGYFKIYSKHTPINLVRDLPQGFSALEPLVDLPIGINITRFQTLLALHRSYLTPGDSSSGWTAGAAAYYVGYLQPRTFLLKYNENGTITDAVDCALDPLSETKCTLKSFTVEKGIYQTSNFRVQPTESIVRFPNITNLCPFGEVFNATRFASVYAWNRKRISNCVADYSVLYNSASFSTFKCYGVSPTKLNDLCFTNVYADSFVIRGDEVRQIAPGQTGKIADYNYKLPDDFTGCVIAWNSNNLDSKVGGNYNYLYRLFRKSNLKPFERDISTEIYQAGSTPCNGVEGFNCYFPLQSYGFQPTNGVGYQPYRVVVLSFELLHAPATVCGPKKSTNLVKNKCVNFNFNGLTGTGVLTESNKKFLPFQQFGRDIADTTDAVRDPQTLEILDITPCSFGGVSVITPGTNTSNQVAVLYQDVNCTEVPVAIHADQLTPTWRVYSTGSNVFQTRAGCLIGAEHVNNSYECDIPIGAGICASYQTQTNSPRRARSVASQSIIAYTMSLGAENSVAYSNNSIAIPTNFTISVTTEILPVSMTKTSVDCTMYICGDSTECSNLLLQYGSFCTQLNRALTGIAVEQDKNTQEVFAQVKQIYKTPPIKDFGGFNFSQILPDPSKPSKRSFIEDLLFNKVTLADAGFIKQYGDCLGDIAARDLICAQKFNGLTVLPPLLTDEMIAQYTSALLAGTITSGWTFGAGAALQIPFAMQMAYRFNGIGVTQNVLYENQKLIANQFNSAIGKIQDSLSSTASALGKLQDVVNQNAQALNTLVKCLSSNFGAISSVLNDILSRLDKVEAEVQIDRLITGRLQCLQTYVTQQLIRAAEIRASANLAATKMSECVLGQSKRVDFCGKGYHLMSFPQSAPHGVVFLHVTYVPAQEKNFTTAPAICHDGKAHFPREGVFVSNGTHWFVTQRNFYEPQIITTDNTFVSGNCDVVIGIVNNTVYDPLQPELDSGGGGSDIIKLLNEQVNKEMQSSNLYMSMSSWCYTHSLDGAGLFLFDHAAEEYEHAKKLIIFLNENNVPVQLTSISAPEHKFEGLTQIFQKAYEHEQHISESINNIVDHAIKSKDHATFNFLQWYVAEQHEEEVLFKDILDKIELIGNENHGLYLADQYVKGIAKSRKS

SEQ ID NO: 9358 - protein, 1315 aa, Artificial Sequence
  SARS-CoV-2/SARS-CoV-2/Yunnan-01/human/2020/CHN__MT049951.1 spike protein (1-1147)(Q965C_S1003C) Ferritin construct
MFVFLVLLPLVSSQCVNLTTRTQLPPANTNSFTRGVYYPDKVFRSSVLHSTQDLFLPFFSNVTWFHAIHVSGTNGTKRFDNPVLPFNDGVYFASTEKSNIIRGWIFGTTLDSKTQSLLIVNNATNVVIKVCEFQFCNDPFLGVYYHKNNKSWMESEFRVYSSANNCTFEYVSQPFLMDLEGKQGNFKNLREFVFKNIDGYFKIYSKHTPINLVRDLPQGFSALEPLVDLPIGINITRFQTLLALHRSYLTPGDSSSGWTAGAAAYYVGYLQPRTFLLKYNENGTITDAVDCALDPLSETKCTLKSFTVEKGIYQTSNFRVQPTESIVRFPNITNLCPFGEVFNATRFASVYAWNRKRISNCVADYSVLYNSASFSTFKCYGVSPTKLNDLCFTNVYADSFVIRGDEVRQIAPGQTGKIADYNYKLPDDFTGCVIAWNSNNLDSKVGGNYNYLYRLFRKSNLKPFERDISTEIYQAGSTPCNGVEGFNCYFPLQSYGFQPTNGVGYQPYRVVVLSFELLHAPATVCGPKKSTNLVKNKCVNFNFNGLTGTGVLTESNKKFLPFQQFGRDIADTTDAVRDPQTLEILDITPCSFGGVSVITPGTNTSNQVAVLYQDVNCTEVPVAIHADQLTPTWRVYSTGSNVFQTRAGCLIGAEHVNNSYECDIPIGAGICASYQTQTNSPRRARSVASQSIIAYTMSLGAENSVAYSNNSIAIPTNFTISVTTEILPVSMTKTSVDCTMYICGDSTECSNLLLQYGSFCTQLNRALTGIAVEQDKNTQEVFAQVKQIYKTPPIKDFGGFNFSQILPDPSKPSKRSFIEDLLFNKVTLADAGFIKQYGDCLGDIAARDLICAQKFNGLTVLPPLLTDEMIAQYTSALLAGTITSGWTFGAGAALQIPFAMQMAYRFNGIGVTQNVLYENQKLIANQFNSAIGKIQDSLSSTASALGKLQDVVNQNAQALNTLVKCLSSNFGAISSVLNDILSRLDKVEAEVQIDRLITGRLQCLQTYVTQQLIRAAEIRASANLAATKMSECVLGQSKRVDFCGKGYHLMSFPQSAPHGVVFLHVTYVPAQEKNFTTAPAICHDGKAHFPREGVFVSNGTHWFVTQRNFYEPQIITTDNTFVSGNCDVVIGIVNNTVYDPLQPELDSGGGGSDIIKLLNEQVNKEMQSSNLYMSMSSWCYTHSLDGAGLFLFDHAAEEYEHAKKLIIFLNENNVPVQLTSISAPEHKFEGLTQIFQKAYEHEQHISESINNIVDHAIKSKDHATFNFLQWYVAEQHEEEVLFKDILDKIELIGNENHGLYLADQYVKGIAKSRKS

SEQ ID NO: 9359 - protein, 1315 aa, Artificial Sequence
  SARS-CoV-2/USA/WA-UW292/2020__EPI_ISL_418077 spike protein (1-1147)(Q965C_S1003C) Ferritin construct
MFVFLVLLPLVSSQCVNLTTRTQLPPAYTNSFTRGVYYPDKVFRSSVLHSTQDLFLPFFSNVTWFHAIHVSGTNGTKRFDNPVLPFNDGVYFASTEKSNIIRGWIFGTTLDSKTQSLLIVNNATNVVIKVCEFQFCNDPFLGVYYHKNNKSWMESEFRVYSSANNCTFEYVSQPFLMDLEGKQGNFKNLREFVFKNIDGYFKIYSKHTPINLVRDLPQGFSALEPLVDLPIGINITRFQTLLALHRSYLTPGDSSSGWTAGAAAYYVGYLQPRTFLLKYNENGTITDAVDCALDPLSETKCTLKSFTVEKGIYQTSNFRVQPTESIVRFPNITNLCPFGEVFNATRFASVYAWNRKRISNCVADYSVLYNSASFSTFKCYGVSPTKLNDLCFTNVYADSFVIRGDEVRQIAPGQTGKIADYNYKLPDDFTGCVIAWNSNNLDSKVGGNYNYLYRLFRKSNLKPFERDISTEIYQASSTPCNGVEGFNCYFPLQSYGFQPTNGVGYQPYRVVVLSFELLHAPATVCGPKKSTNLVKNKCVNFNFNGLTGTGVLTESNKKFLPFQQFGRDIADTTDAVRDPQTLEILDITPCSFGGVSVITPGTNTSNQVAVLYQDVNCTEVPVAIHADQLTPTWRVYSTGSNVFQTRAGCLIGAEHVNNSYECDIPIGAGICASYQTQTNSPRRARSVASQSIIAYTMSLGAENSVAYSNNSIAIPTNFTISVTTEILPVSMTKTSVDCTMYICGDSTECSNLLLQYGSFCTQLNRALTGIAVEQDKNTQEVFAQVKQIYKTPPIKDFGGFNFSQILPDPSKPSKRSFIEDLLFNKVTLADAGFIKQYGDCLGDIAARDLICAQKFNGLTVLPPLLTDEMIAQYTSALLAGTITSGWTFGAGAALQIPFAMQMAYRFNGIGVTQNVLYENQKLIANQFNSAIGKIQDSLSSTASALGKLQDVVNQNAQALNTLVKCLSSNFGAISSVLNDILSRLDKVEAEVQIDRLITGRLQCLQTYVTQQLIRAAEIRASANLAATKMSECVLGQSKRVDFCGKGYHLMSFPQSAPHGVVFLHVTYVPAQEKNFTTAPAICHDGKAHFPREGVFVSNGTHWFVTQRNFYEPQIITTDNTFVSGNCDVVIGIVNNTVYDPLQPELDSGGGGSDIIKLLNEQVNKEMQSSNLYMSMSSWCYTHSLDGAGLFLFDHAAEEYEHAKKLIIFLNENNVPVQLTSISAPEHKFEGLTQIFQKAYEHEQHISESINNIVDHAIKSKDHATFNFLQWYVAEQHEEEVLFKDILDKIELIGNENHGLYLADQYVKGIAKSRKS

SEQ ID NO: 9360 - protein, 1315 aa, Artificial Sequence
  SARS-CoV-2/Iceland/192/2020__EPI_ISL_417819 spike protein (1-1147)(Q965C_S1003C) Ferritin construct
MFVFFVLLPLVSSQCVNLTTRTQLPPAYTNSFTRGVYYPDKVFRSSVLHSTQDLFLPFFSNVTWFHAIHVSGTNGTKRFDNPVLPFNDGVYFASTEKSNIIRGWIFGTTLDSKTQSLLIVNNATNVVIKVCEFQFCNDPFLGVYYHKNNKSWMESEFRVYSSANNCTFEYVSQPFLMDLEGKQGNFKNLREFVFKNIDGYFKIYSKHTPINLVRDLPQGFSALEPLVDLPIGINITRFQTLLALHRSYLTPGDSSSGWTAGAAAYYVGYLQPRTFLLKYNENGTITDAVDCALDPLSETKCTLKSFTVEKGIYQTSNFRVQPTESIVRFPNITNLCPFGEVFNATRFASVYAWNRKRISNCVADYSVLYNSASFSTFKCYGVSPTKLNDLCFTNVYADSFVIRGDEVRQIAPGQTGKIADYNYKLPDDFTGCVIAWNSNNLDSKVGGNYNYLYRLFRKSNLKPFERDISTEIYQAGSTPCNGVEGFNCYFPLQSYGFQPTNGVGYQPYRVVVLSFELLHAPATVCGPKKSTNLVKNKCVNFNFNGLTGTGVLTESNKKFLPFQQFGRDIADTTDAVRDPQTLEILDITPCSFGGVSVITPGTNTSNQVAVLYQGVNCTEVPVAIHADQLTPTWRVYSTGSNVFQTRAGCLIGAEHVNNSYECDIPIGAGICASYQTQTNSPRRARSVASQSIIAYTMSLGAENSVAYSNNSIAIPTNFTISVTTEILPVSMTKTSVDCTMYICGDSTECSNLLLQYGSFCTQLNRALTGIAVEQDKNTQEVFAQVKQIYKTPPIKDFGGFNFSQILPDPSKPSKRSFIEDLLFNKVTLADAGFIKQYGDCLGDIAARDLICAQKFNGLTVLPPLLTDEMIAQYTSALLAGTITSGWTFGAGAALQIPFAMQMAYRFNGIGVTQNVLYENQKLIANQFNSAIGKIQDSLSSTASALGKLQDVVNQNAQALNTLVKCLSSNFGAISSVLNDILSRLDKVEAEVQIDRLITGRLQCLQTYVTQQLIRAAEIRASANLAATKMSECVLGQSKRVDFCGKGYHLMSFPQSAPHGVVFLHVTYVPAQEKNFTTAPAICHDGKAHFPREGVFVSNGTHWFVTQRNFYEPQIITTDNTFVSGNCDVVIGIVNNTVYDPLQPELDSGGGGSDIIKLLNEQVNKEMQSSNLYMSMSSWCYTHSLDGAGLFLFDHAAEEYEHAKKLIIFLNENNVPVQLTSISAPEHKFEGLTQIFQKAYEHEQHISESINNIVDHAIKSKDHATFNFLQWYVAEQHEEEVLFKDILDKIELIGNENHGLYLADQYVKGIAKSRKS

SEQ ID NO: 9361 - protein, 1315 aa, Artificial Sequence
  SARS-CoV-2/Belgium/ULG-6939/2020__EPI_ISL_417020 spike protein (1-1147)(Q965C_S1003C) Ferritin construct
MFVFLVLLPLVSSQCVNLTTRTQLPPAYTNSFTRGVYYPDKVFRSSVLHSTQDLFLPFFSNVTWFHAIHVSGTNGTKRFDNPVLPFNDGVYFASTEKSNIIRGWIFGTTLDSKTQSLLIVNNATNVVIKVCEFQFCNDPFLGVYYHKNNKSWMESEFRVYSSANNCTFEYVSQPFLMDLEGKQGNFKNLREFVFKNIDGYFKIYSKHTPINLVRDLPQGFSALEPLVDLPIGINITRFQTLLALHRSYLTPGDSSSGWTAGAAAYYVGYLQPRTFLLKYNENGTITDAVDCALDPLSETKCTLKSFTVEKGIYQTSNFRVQPTESIVRFPNITNLCPFGEVFNATRFASVYAWNRKRISNCVADYSVLYNSASFSTFKCYGVSPTKLNDLCFTNVYADSFVIRGDEVRQIAPGQTGKIADYNYKLPDDFTGCVIAWNSNNLDSKVGGNYNYLYRLFRKSNLKPFERDISTEIYQAGSTPCNGVEGFNCYFPLQSYGFQPTNGVGYQPYRVVVLSFELLHAPATVCGPKKSTNLVKNKCVNFNFNGLTGTGVLTESNKKFLPFQQFGRDIADTTDAVRDPQTLEILDITPCSFGGVSVITPGTNTSNQVAVLYQGVNCTEVPVAIHADQLTPTWRVYSTGSNVFQTRAGCLIGAEHVNNSYECDIPIGAGICASYQTQTNSPRRARSVASQSIIAYTMSLGAENSVVYSNNSIAIPTNFTISVTTEILPVSMTKTSVDCTMYICGDSTECSNLLLQYGSFCTQLNRALTGIAVEQDKNTQEVFAQVKQIYKTPPIKDFGGFNFSQILPDPSKPSKRSFIEDLLFNKVTLADAGFIKQYGDCLGDIAARDLICAQKFNGLTVLPPLLTDEMIAQYTSALLAGTITSGWTFGAGAALQIPFAMQMAYRFNGIGVTQNVLYENQKLIANQFNSAIGKIQDSLSSTASALGKLQDVVNQNAQALNTLVKCLSSNFGAISSVLNDILSRLDKVEAEVQIDRLITGRLQCLQTYVTQQLIRAAEIRASANLAATKMSECVLGQSKRVDFCGKGYHLMSFPQSAPHGVVFLHVTYVPAQEKNFTTAPAICHDGKAHFPREGVFVSNGTHWFVTQRNFYEPQIITTDNTFVSGNCDVVIGIVNNTVYDPLQPELDSGGGGSDIIKLLNEQVNKEMQSSNLYMSMSSWCYTHSLDGAGLFLFDHAAEEYEHAKKLIIFLNENNVPVQLTSISAPEHKFEGLTQIFQKAYEHEQHISESINNIVDHAIKSKDHATFNFLQWYVAEQHEEEVLFKDILDKIELIGNENHGLYLADQYVKGIAKSRKS

SEQ ID NO: 9362 - protein, 1315 aa, Artificial Sequence
  SARS-CoV-2/France/HF2496/2020__EPI_ISL_418231 spike protein (1-1147)(Q965C_S1003C) Ferritin construct
MFVFLVLLPLVSSQCVNLTTRTQLPPAYTNSFTRGVYYPDKVFRSSVLHSTQDLFLPFFSNVTWFHAIHVSGTNGTKRFDNPVLPFNDGVYFASTEKSNIIRGWIFGTTLDSKTQSLLIVNNATNVVIKVCEFQFCNDPFLGVYYHKNNKSWMESEFRVYSSANNCTFEYVSQPFLMDLEGKQGNFKNLREFVFKNIDGYFKIYSKHTPINLVRDLPQGFSALEPLVDLPIGINITRFQTLLALHRSYLTPGDSSSGWTAGAAAYYVGYLQPRTFLLKYNENGTITDAVDCALDPLSETKCTLKSFTVEKGIYQTSNFRVQPTESIVRFPNITNLCPFGEVFNATRFASVYAWNRKRISNCVADYSVLYNSASFSTFKCYGVSPTKLNDLCFTNVYADSFVIRGDEVRQIAPGQTGKIADYNYKLPDDFTGCVIAWNSNNLDSKVGGNYNYLYRLFRKSNLKPFERDISTEIYQAGSTPCNGVEGFNCYFPLQSYGFQPTNGVGYQPYRVVVLSFELLHAPATVCGPKKSTNLVKNKCVNFNFNGLTGTGVLTESNKKFLPFQQFGRDIADTTDAVRDPQTLEILDITPCSFGGVSVITPGTNTSNQVAVLYQGVNCTEVPVAIHADQLTPTWRVYSTGSNVFQTRAGCLIGAEHVNNSYECDIPIGAGICASYQTQTNSPRRARSVASQSIIAYTMSLGAENSVAYSNNSIAIPTNFTISVTTEILPVSMTKTSVDCTMYICGDSTECSNLLLQYGSFCTQLNRALTGIAVEQDKNTQEVFAQVKQIYKTPPIKDFGGFNFSQILPDPSKPSKRSFIEDLLFNKVTLADAGFIKQYGDCLGDIVARDLICAQKFNGLTVLPPLLTDEMIAQYTSALLAGTITSGWTFGAGAALQIPFAMQMAYRFNGIGVTQNVLYENQKLIANQFNSAIGKIQDSLSSTASALGKLQDVVNQNAQALNTLVKCLSSNFGAISSVLNDILSRLDKVEAEVQIDRLITGRLQCLQTYVTQQLIRAAEIRASANLAATKMSECVLGQSKRVDFCGKGYHLMSFPQSAPHGVVFLHVTYVPAQEKNFTTAPAICHDGKAHFPREGVFVSNGTHWFVTQRNFYEPQIITTDNTFVSGNCDVVIGIVNNTVYDPLQPELDSGGGGSDIIKLLNEQVNKEMQSSNLYMSMSSWCYTHSLDGAGLFLFDHAAEEYEHAKKLIIFLNENNVPVQLTSISAPEHKFEGLTQIFQKAYEHEQHISESINNIVDHAIKSKDHATFNFLQWYVAEQHEEEVLFKDILDKIELIGNENHGLYLADQYVKGIAKSRKS

SEQ ID NO: 9363 - protein, 1315 aa, Artificial Sequence
  SARS-CoV-2/USA/WA-UW291/2020__EPI_ISL_418076 spike protein (1-1147)(Q965C_S1003C) Ferritin construct
MFVFLVLLPLVSSQCVNLTTRTQLPPAYTNSFTRGVYYPDKVFRSSVLHSTQDLFLPFFSNVTWFHAIHVSGTNGTKRFDNPVLPFNDGVYFASTEKSNIIRGWIFGTTLDSKTQSLLIVNNATNVVIKVCEFQFCNDPFLGVYYHKNNKSWMESEFRVYSSANNCTFEYVSQPFLMDLEGKQGNFKNLREFVFKNIDGYFKIYSKHTPINLVRDLPQGFSALEPLVDLPIGINITRFQTLLALHRSYLTPGDSSSGWTAGAAAYYVGYLQPRTFLLKYNENGTITDAVDCALDPLSETKCTLKSFTVEKGIYQTSNFRVQPTESIVRFPNITNLCPFGEVFNATRFASVYAWNRKRISNCVADYSVLYNSASFSTFKCYGVSPTKLNDLCFTNVYADSFVIRGDEVRQIAPGQTGKIADYNYKLPDDFTGCVIAWNSNNLDSKVGGNYNYLYRLFRKSNLKPFERDISTEIYQAGSTPCNGVEGFNCYFPLQSYGFQPTNGVGYQPYRVVVLSFELLHAPATVCGPKKSTNLVKNKCVNFNFNGLTGTGVLTESNKKFLPFQQFGRDIADTTDAVRDPQTLEILDITPCSFGGVSVITPGTNTSNQVAVLYQGVNCTEVPVAIHADQLTPTWRVYSTGSNVFQTRAGCLIGAEHVNNSYECDIPIGAGICASYQTQTNSPRRARSVASQSIIAYTMSLGAENSVAYSNNSIAIPTNFTISVTTEILPVSMTKTSVDCTMYICGDSTECSNLLLQYGSFCTQLNRALTGIAVEQDKNTQEVFAQVKQIYKTPPIKDFGGFNFSQILPDPSKPSKRSFIEDLLFNKVTLADAGFIKQYGDCLGDIAARDLICAQKFNGLTVLPPLLTDEMIAQYTSALLAGTITSGWTFGAGAALQIPFAMQMAYRFNGIGVTQNVLYENQKLIANQFNSAIGKIQYSLSSTASALGKLQDVVNQNAQALNTLVKCLSSNFGAISSVLNDILSRLDKVEAEVQIDRLITGRLQCLQTYVTQQLIRAAEIRASANLAATKMSECVLGQSKRVDFCGKGYHLMSFPQSAPHGVVFLHVTYVPAQEKNFTTAPAICHDGKAHFPREGVFVSNGTHWFVTQRNFYEPQIITTDNTFVSGNCDVVIGIVNNTVYDPLQPELDSGGGGSDIIKLLNEQVNKEMQSSNLYMSMSSWCYTHSLDGAGLFLFDHAAEEYEHAKKLIIFLNENNVPVQLTSISAPEHKFEGLTQIFQKAYEHEQHISESINNIVDHAIKSKDHATFNFLQWYVAEQHEEEVLFKDILDKIELIGNENHGLYLADQYVKGIAKSRKS

SEQ ID NO: 9364 - protein, 1315 aa, Artificial Sequence; identical to SEQ ID NO: 9327
  SARS-CoV-2/Portugal/PT0034/2020__EPI_ISL_418019 spike protein (1-1147)(Q965C_S1003C) Ferritin construct

SEQ ID NO: 9365 - protein, 1315 aa, Artificial Sequence; identical to SEQ ID NO: 9319
  SARS-CoV-2/Iceland/202/2020__EPI_ISL_417750 spike protein (1-1147)(Q965C_S1003C) Ferritin construct

SEQ ID NO: 9366 - protein, 1315 aa, Artificial Sequence
  SARS-CoV-2/USA/WA-UW261/2020__EPI_ISL_418046 spike protein (1-1147)(Q965C_S1003C) Ferritin construct
MFVFLVLLPLVSSQCVNLTTRTQLPPAYTNSFTRGVYYPDKVFRSSVLHSTQDLFLPFFSNVTWFHAIHVSGTNGTKRFDNPVLPFNDGVYFASTEKSNIIRGWIFGTTLDSKTQSLLIVNNATNVVIKVCEFQFCNDPFLGVYYHKNNKSWMESEFRVYSSANNCTFEYVSQPFLMDLEGKQGNFKNLREFVFKNIDGYFKIYSKHTPINLVRDLPQGFSALEPLVDLPIGINITRFQTLLALHRSYLTPGDSSSGWTAGAAAYYVGYLQPRTFLLKYNENGTITDAVDCALDPLSETKCTLKSFTVEKGIYQTSNFRVQPTESIVRFPNITNLCPFGEVFNATRFTSVYAWNRKRISNCVADYSVLYNSASFSTFKCYGVSPTKLNDLCFTNVYADSFVIRGDEVRQIAPGQTGKIADYNYKLPDDFTGCVIAWNSNNLDSKVGGNYNYLYRLFRKSNLKPFERDISTEIYQAGSTPCNGVEGFNCYFPLQSYGFQPTNGVGYQPYRVVVLSFELLHAPATVCGPKKSTNLVKNKCVNFNFNGLTGTGVLTESNKKFLPFQQFGRDIADTTDAVRDPQTLEILDITPCSFGGVSVITPGTNTSNQVAVLYQDVNCTEVPVAIHADQLTPTWRVYSTGSNVFQTRAGCLIGAEHVNNSYECDIPIGAGICASYQTQTNSPRRARSVASQSIIAYTMSLGAENSVAYSNNSIAIPTNFTISVTTEILPVSMTKTSVDCTMYICGDSTECSNLLLQYGSFCTQLNRALTGIAVEQDKNTQEVFAQVKQIYKTPPIKDFGGFNFSQILPDPSKPSKRSFIEDLLFNKVTLADAGFIKQYGDCLGDIAARDLICAQKFNGLTVLPPLLTDEMIAQYTSALLAGTITSGWTFGAGAALQIPFAMQMAYRFNGIGVTQNVLYENQKLIANQFNSAIGKIQDSLSSTASALGKLQDVVNQNAQALNTLVKCLSSNFGAISSVLNDILSRLDKVEAEVQIDRLITGRLQCLQTYVTQQLIRAAEIRASANLAATKMSECVLGQSKRVDFCGKGYHLMSFPQSAPHGVVFLHVTYVPAQEKNFTTAPAICHDGKAHFPREGVFVSNGTHWFVTQRNFYEPQIITTDNTFVSGNCDVVIGIVNNTVYDPLQPELDSGGGGSDIIKLLNEQVNKEMQSSNLYMSMSSWCYTHSLDGAGLFLFDHAAEEYEHAKKLIIFLNENNVPVQLTSISAPEHKFEGLTQIFQKAYEHEQHISESINNIVDHAIKSKDHATFNFLQWYVAEQHEEEVLFKDILDKIELIGNENHGLYLADQYVKGIAKSRKS

SEQ ID NO: 9367 - protein, 1315 aa, Artificial Sequence
  SARS-CoV-2/Portugal/PT0035/2020__EPI_ISL_418020 spike protein (1-1147)(Q965C_S1003C) Ferritin construct
MFVFLVLLPLVSSQCVNLTTRTQLPPAYTNSFTRGVYYPDKVFRSSVLHSTQDLFLPFFSNVTWFHAIHVSGTNGTKRFDNPVLPFNDGVYFASTEKSNIIRGWIFGTTLDSKTQSLLIVNNATNVVIKVCEFQFCNDPFLGVYYHKNNKSWMESEFRVYSSANNCTFEYVSQPFLMDLEGKQGNFKNLREFVFKNIDGYFKIYSKHTPINLVRDLPQGFSALEPLVDLPIGINITRFQTLLALHRSYLTPGDSSSGWTAGAAAYYVGYLQPRTFLLKYNENGTITDAVDCALDPLSETKCTLKSFTVEKGIYQTSNFRVQPTESIVRFPNITNLCPFGEVFNATRFASVYAWNRKRISNCVADYSVLYNSASFSTFKCYGVSPTKLNDLCFTNVYADSFVIRGDEVRQIAPGQTGKIADYNYKLPDDFTGCVIAWNSNNLDSKVGGNYNYLYRLFRKSNLKPFERDISTEIYQAGSTPCNGVEGFNCYFPLQSYGFQPTNGVGYQPYRVVVLSFELLHAPATVCGPKKSTNLVKNKCVNFNFNGLTGTGVLTESNKKFLPFQQFGRDIADTTDAVRDPQTLEILDITPCSFGGVSVITPGTNTSNQVAVLYQDVNCTEVPVAIHADQLTPTWRVYSTGSNVFQTRAGCLIGAEHVNNSYECDIPIGAGICASYQTQTNSPRRARSVASQSIIAYTMSLGAENSVAYSNNSIAIPTNFTISVTTEILPVSMTKTSVDCTMYICGDSTECSNLLLQYGSFCTQLNRALTGIAVEQDKNTQEVFAQVKQIYKTPPIKDFGGFNFSQILPDPSKPSKRSFIEDLLFNKVTLADAGFIKQYGDCLGDISARDLICAQKFNGLTVLPPLLTDEMIAQYTSALLAGTITSGWTFGAGAALQIPFAMQMAYRFNGIGVTQNVLYENQKLIANQFNSAIGKIQDSLSSTASALGKLQDVVNQNAQALNTLVKCLSSNFGAISSVLNDILSRLDKVEAEVQIDRLITGRLQCLQTYVTQQLIRAAEIRASANLAATKMSECVLGQSKRVDFCGKGYHLMSFPQSAPHGVVFLHVTYVPAQEKNFTTAPAICHDGKAHFPREGVFVSNGTHWFVTQRNFYEPQIITTDNTFVSGNCDVVIGIVNNTVYDPLQPELDSGGGGSDIIKLLNEQVNKEMQSSNLYMSMSSWCYTHSLDGAGLFLFDHAAEEYEHAKKLIIFLNENNVPVQLTSISAPEHKFEGLTQIFQKAYEHEQHISESINNIVDHAIKSKDHATFNFLQWYVAEQHEEEVLFKDILDKIELIGNENHGLYLADQYVKGIAKSRKS

SEQ ID NO: 9368 - protein, 1315 aa, Artificial Sequence
  SARS-CoV-2/USA/NY-NYUMC7/2020__EPI_ISL_418192 spike protein (1-1147)(Q965C_S1003C) Ferritin construct
MFVFLVLLPLVSSQCVNLTTRTQLPPAYTNSFTRGVYYPDKVFRSSVLHSTQDLFLPFFSNVTWFHAIHVSGTNGTKRFDNPVLPFNDGVYFASTEKSNIIRGWIFGTTLDSKTQSLLIVNNATNVVIKVCEFQFCNDPFLGVYHHKNNKSWMESEFRVYSSANNCTFEYVSQPFLMDLEGKQGNFKNLREFVFKNIDGYFKIYSKHTPINLVRDLPQGFSALEPLVDLPIGINITRFQTLLALHRSYLTPGDSSSGWTAGAAAYYVGYLQPRTFLLKYNENGTITDAVDCALDPLSETKCTLKSFTVEKGIYQTSNFRVQPTESIVRFPNITNLCPFGEVFNATRFASVYAWNRKRISNCVADYSVLYNSASFSTFKCYGVSPTKLNDLCFTNVYADSFVIRGDEVRQIAPGQTGKIADYNYKLPDDFTGCVIAWNSNNLDSKVGGNYNYLYRLFRKSNLKPFERDISTEIYQAGSTPCNGVEGFNCYFPLQSYGFQPTNGVGYQPYRVVVLSFELLHAPATVCGPKKSTNLVKNKCVNFNFNGLTGTGVLTESNKKFLPFQQFGRDIADTTDAVRDPQTLEILDITPCSFGGVSVITPGTNTSNQVAVLYQGVNCTEVPVAIHADQLTPTWRVYSTGSNVFQTRAGCLIGAEHVNNSYECDIPIGAGICASYQTQTNSPRRARSVASQSIIAYTMSLGAENSVAYSNNSIAIPTNFTISVTTEILPVSMTKTSVDCTMYICGDSTECSNLLLQYGSFCTQLNRALTGIAVEQDKNTQEVFAQVKQIYKTPPIKDFGGFNFSQILPDPSKPSKRSFIEDLLFNKVTLADAGFIKQYGDCLGDIAARDLICAQKFNGLTVLPPLLTDEMIAQYTSALLAGTITSGWTFGAGAALQIPFAMQMAYRFNGIGVTQNVLYENQKLIANQFNSAIGKIQDSLSSTASALGKLQDVVNQNAQALNTLVKCLSSNFGAISSVLNDILSRLDKVEAEVQIDRLITGRLQCLQTYVTQQLIRAAEIRASANLAATKMSECVLGQSKRVDFCGKGYHLMSFPQSAPHGVVFLHVTYVPAQEKNFTTAPAICHDGKAHFPREGVFVSNGTHWFVTQRNFYEPQIITTDNTFVSGNCDVVIGIVNNTVYDPLQPELDSGGGGSDIIKLLNEQVNKEMQSSNLYMSMSSWCYTHSLDGAGLFLFDHAAEEYEHAKKLIIFLNENNVPVQLTSISAPEHKFEGLTQIFQKAYEHEQHISESINNIVDHAIKSKDHATFNFLQWYVAEQHEEEVLFKDILDKIELIGNENHGLYLADQYVKGIAKSRKS

SEQ ID NO: 9369 - protein, 1315 aa, Artificial Sequence
  SARS-CoV-2/Iceland/189/2020__EPI_ISL_417709 spike protein (1-1147)(Q965C_S1003C) Ferritin construct
MFVFLVLLPLVSSQCVNLTTRTQLPPAYTNSFTRGVYYPDKVFRSSVLHSTQDLFLPFFSNVTWFHAIHVSGTNGTKRFDNPVLPFNDGVYFASTEKSNIIRGWIFGTTLDSKTQSLLIVNNATNVVIKVCEFQFCNDPFLGVYYHKNNKSWMESEFRVYSSANNCTFEYVSQPFLMDLEGKQGNFKNLREFVFKNIDGYFKIYSKHTPINLVRDLPQGFSALEPLVDLPIGINITRFQTLLALHRSYLTPGDSSSGWTAGAAAYYVGYLQPRTFLLKYNENGTITDAVDCALDPLSETKCTLKSFTVEKGIYQTSNFRVQPTESIVRFPNITNLCPFGEVFNATRFASVYAWNRKRISNCVADYSVLYNSASFSTFKCYGVSPTKLNDLCFTNVYADSFVIRGDEVRQIAPGQTGKIADYNYKLPDDFTGCVIAWNSNNLDSKVGGNYNYLYRLFRKSNLKPFERDISTEIYQAGSTPCNGVEGFNCYFPLQSYGFQPTNGVGYQPYRVVVLSFELLHAPATVCGPKKSTNLVKNKCVNFNFNGLTGTGVLTESNKKFLPFQQFGRDIADTTDAVRDPQTLEILDITPCSFGGVSVITPGTNTSNQVAVLYQGVNCTEVPVAIHADQLTPTWRVYSTGSNVFQTRAGCLIGAEHVNNSYECDIPIGAGICASYQTQTNSPRRARSVASQSIIAYTMSLGAENSVAYSNNSIAIPTNFTISVTTEILPVSMTKTSVDCTMYICGDSTECSNLLLQYGSFCTQLNRALTGIAVEQDKNTQEVFAQVKQIYKTPPIKDFGGFNFSQILPDPSKPSKRSFIEDLLFNKVTLADAGFTKQYGDCLGDIAARDLICAQKFNGLTVLPPLLTDEMIAQYTSALLAGTITSGWTFGAGAALQIPFAMQMAYRFNGIGVTQNVLYENQKLIANQFNSAIGKIQDSLSSTASALGKLQDVVNQNAQALNTLVKCLSSNFGAISSVLNDILSRLDKVEAEVQIDRLITGRLQCLQTYVTQQLIRAAEIRASANLAATKMSECVLGQSKRVDFCGKGYHLMSFPQSAPHGVVFLHVTYVPAQEKNFTTAPAICHDGKAHFPREGVFVSNGTHWFVTQRNFYEPQIITTDNTFVSGNCDVVIGIVNNTVYDPLQPELDSGGGGSDIIKLLNEQVNKEMQSSNLYMSMSSWCYTHSLDGAGLFLFDHAAEEYEHAKKLIIFLNENNVPVQLTSISAPEHKFEGLTQIFQKAYEHEQHISESINNIVDHAIKSKDHATFNFLQWYVAEQHEEEVLFKDILDKIELIGNENHGLYLADQYVKGIAKSRKS

SEQ ID NO: 9370 - protein, 1315 aa, Artificial Sequence
  SARS-CoV-2/Australia/NSW56/2020__EPI_ISL_417408 spike protein (1-1147)(Q965C_S1003C) Ferritin construct
MFVFLVLLPLVSSQCVNLTTRTQLPPAYTNSFTRGVYYPDKVFRSSVLHSTQDLFLPFFSNVTWFHAIHVSGTNGTKRFDNPVLPFNDGVYFASTEKSNIIRGWIFGTTLDSKTQSLLIVNNATNVVIKVCEFQFCNDPFLGVYYHKNNKSWMESEFRVYSSANNCTFEYVSQPFLMDLEGKQGNFKNLREFVFKNIDGYFKIYSKHTPINLVRDLPQGFSALEPLVDLPIGINITRFQTLLALHRSYLTPGDSSSGWTAGAAAYYVGYLQPRTFLLKYNENGTITDAVDCALDPLSETKCTLKSFTVEKGIYQTSNFRVQPTESIVRFPNITNLCPFGEVFNATRFASVYAWNRKRISNCVADYSVLYNSASFSTFKCYGVSPTKLNDLCFTNVYADSFVIRGDEVRQIAPGQTGKIADYNYKLPDDFTGCVIAWNSNNLDSKVGGNYNYLYRLFRKSNLKPFERDISTEIYQAGSTPCNGVEGFNCYFPLQSYGFQPTNGVGYQPYRVVVLSFELLHAPATVCGPKKSTNLVKNKCVNFNFNGLTGTGVLTESNKKFLPFQQFGRDIADTTDAVRDPQTLEILDITPCSFGGVSVITPGTNTSNQVAVLYQDVNCTEVPVAIHADQLTPTWRVYSTGSNVFQTRAGCLIGAEHVNNSYECDIPIGAGICASYQTQTNSPRRARSVASQSIIAYTMSLGAENSVAYSNNSIAIPTNFTISVTTEILPVSMTKTSVDCTMYICGDSTECSNLLLQYGSFCTQLNRALTGIAVEQDKNTQEVFAQVKQIYKTPPIKDFGGFNFSQILPDSSKPSKRSFIEDLLFNKVTLADAGFIKQYGDCLGDIAARDLICAQKFNGLTVLPPLLTDEMIAQYTSALLAGTITSGWTFGAGAALQIPFAMQMAYRFNGIGVTQNVLYENQKLIANQFNSAIGKIQDSLSSTASALGKLQDVVNQNAQALNTLVKCLSSNFGAISSVLNDILSRLDKVEAEVQIDRLITGRLQCLQTYVTQQLIRAAEIRASANLAATKMSECVLGQSKRVDFCGKGYHLMSFPQSAPHGVVFLHVTYVPAQEKNFTTAPAICHDGKAHFPREGVFVSNGTHWFVTQRNFYEPQIITTDNTFVSGNCDVVIGIVNNTVYDPLQPELDSGGGGSDIIKLLNEQVNKEMQSSNLYMSMSSWCYTHSLDGAGLFLFDHAAEEYEHAKKLIIFLNENNVPVQLTSISAPEHKFEGLTQIFQKAYEHEQHISESINNIVDHAIKSKDHATFNFLQWYVAEQHEEEVLFKDILDKIELIGNENHGLYLADQYVKGIAKSRKS

SEQ ID NO: 9371 - protein, 1315 aa, Artificial Sequence
  SARS-CoV-2/Iceland/280/2020__EPI_ISL_417608 spike protein (1-1147)(Q965C_S1003C) Ferritin construct
MFVFLVLLPLVSSQCVNLTTRTQLPPAYTNSFTRGVYYPDKVFRSSVLHSTQDLFLPFFSNVTWFHAIHVSGTNGTKRFDNPVLPFNDGVYFASTEKSNIIRGWIFGTTLDSKTQSLLIVNNATNVVIKVCEFQFCNDPFLGVYYHKNNKSWMESEFRVYSSANNCTFEYVSQPFLMDLEGKQGNFKNLREFVFKNIDGYFKIYSKHTPINLVRDLPQGFSALEPLVDLPIGINITRFQTLLALHRSYLTPGDSSSGWTAGAAAYYVGYLQPRTFLLKYNENGTITDAVDCALDPLSETKCTLKSFTVEKGIYQTSNFRVQPTESIVRFPNITNLCPFGEVFNATRFASVYAWNRKRISNCVADYSVLYNSASFSTFKCYGVSPTKLNDLCFTNVYADSFVIRGDEVRQIAPGQTGKIADYNYKLPDDFTGCVIAWNSNNLDSKVGGNYNYLYRLFRKSNLKPFERDISTEIYQAGSTPCNGVEGFNCYFPLQSYGFQPTNGVGYQPYRVVVLSFELLHAPATVCGPKKSTNLVKNKCVNFNFNGLTGTGVLTESNKKFLPFQQFGRDIADTTDAVRDPQTLEILDITPCSFGGVSVITPGTNTSNQVAVLYQGVNCTEVPVAIHADQLTPTWRVYSTGSNVFQTRAGCLIGAEHVNNSYECDIPIGAGICASYHTQTNSPRRARSVASQSIIAYTMSLGAENSVAYSNNSIAIPTNFTISVTTEILPVSMTKTSVDCTMYICGDSTECSNLLLQYGSFCTQLNRALTGIAVEQDKNTQEVFAQVKQIYKTPPIKDFGGFNFSQILPDPSKPSKRSFIEDLLFNKVTLADAGFIKQYGDCLGDIAARDLICAQKFNGLTVLPPLLTDEMIAQYTSALLAGTITSGWTFGAGAALQIPFAMQMAYRFNGIGVTQNVLYENQKLIANQFNSAIGKIQDSLSSTASALGKLQDVVNQNAQALNTLVKCLSSNFGAISSVLNDILSRLDKVEAEVQIDRLITGRLQCLQTYVTQQLIRAAEIRASANLAATKMSECVLGQSKRVDFCGKGYHLMSFPQSAPHGVVFLHVTYVPAQEKNFTTAPAICHDGKAHFPREGVFVSNGTHWFVTQRNFYEPQIITTDNTFVSGNCDVVIGIVNNTVYDPLQPELDSGGGGSDIIKLLNEQVNKEMQSSNLYMSMSSWCYTHSLDGAGLFLFDHAAEEYEHAKKLIIFLNENNVPVQLTSISAPEHKFEGLTQIFQKAYEHEQHISESINNIVDHAIKSKDHATFNFLQWYVAEQHEEEVLFKDILDKIELIGNENHGLYLADQYVKGIAKSRKS

SEQ ID NO: 9372 - protein, 1315 aa, Artificial Sequence; identical to SEQ ID NO: 9327
  SARS-CoV-2/Iceland/247/2020__EPI_ISL_417575 spike protein (1-1147)(Q965C_S1003C) Ferritin construct

SEQ ID NO: 9373 - protein, 1315 aa, Artificial Sequence
  SARS-CoV-2/Iceland/238/2020__EPI_ISL_417566 spike protein (1-1147)(Q965C_S1003C) Ferritin construct
MFVFLVLLPLVSSQCVNLTTRTQLPPAYTNSFTRGVYYPDKVFRSSVLHSTQDLFLPFFSNVTWFHAIHVSGTNGTKRFDNPVLPFNDGVYFASTEKSNIIRGWIFGTTLDSKTQSLLIVNNATNVVIKVCEFQFCNDPFLGVYYHKNNKSWMESEFRVYSSANNCTFEYVSQPFLMDLEGKQGNFKNLREFVFKNIDGYFKIYSKHTPINLVRDLPQGFSALEPLVDLPIGINITRFQTLLALHRSYLTPGDSSSGWTAGAAAYYVGYLQPRTFLLKYNENGTITDAVDCALDPLSETKCTLKSFTVEKGIYQTSNFRVQPTESIVRFPNITNLCPFGEVFNATRFASVYAWNRKRISNCVADYSVLYNSASFSTFKCYGVSPTKLNDLCFTNVYADSFVIRGDEVRQIAPGQTGKIADYNYKLPDDFTGCVIAWNSNNLDSKVGGNYNYLYRLFRKSNLKPFERDISTEIYQAGSTPCNGVEGFNCYFPLQSYGFQPTNGVGYQPYRVVVLSFELLHAPATVCGPKKSTNLVKNKCVNFNFNGLTGTGVLTESNKKFLPFQQFGRDIADTTDAVRDPQTLEILDITPCSFGGVSVITPGTNTSNQVAVLYQGVNCTEVPVAIHADQLTPTWRVYSTGSNVFQTRAGCLIGAEHVNNSYECDIPIGAGICASYQTQTNSPRRARSVASQSIIAYTMSLGAENSVAYSNNSIAIPTNFTISVTTEILPVSMTKTSVDCTMYICGDSTECSNLLLQYGSFCTQLNRALTGIAVEQDKNTQEVFAQVKQIYKTPPIKDFGGFNFSQILPDPSKPSKRSFIEDLLFNKVTLADVGFIKQYGDCLGDIAARDLICAQKFNGLTVLPPLLTDEMIAQYTSALLAGTITSGWTFGAGAALQIPFAMQMAYRFNGIGVTQNVLYENQKLIANQFNSAIGKIQDSLSSTASALGKLQDVVNQNAQALNTLVKCLSSNFGAISSVLNDILSRLDKVEAEVQIDRLITGRLQCLQTYVTQQLIRAAEIRASANLAATKMSECVLGQSKRVDFCGKGYHLMSFPQSAPHGVVFLHVTYVPAQEKNFTTAPAICHDGKAHFPREGVFVSNGTHWFVTQRNFYEPQIITTDNTFVSGNCDVVIGIVNNTVYDPLQPELDSGGGGSDIIKLLNEQVNKEMQSSNLYMSMSSWCYTHSLDGAGLFLFDHAAEEYEHAKKLIIFLNENNVPVQLTSISAPEHKFEGLTQIFQKAYEHEQHISESINNIVDHAIKSKDHATFNFLQWYVAEQHEEEVLFKDILDKIELIGNENHGLYLADQYVKGIAKSRKS

SEQ ID NO: 9374 - protein, 1315 aa, Artificial Sequence
  SARS-CoV-2/Greece/16/2020__EPI_ISL_418265 spike protein (1-1147)(Q965C_S1003C) Ferritin construct
MFVFLVLLPLVSSQCVNLTTRTQLPPAYTNSFTRGVYYPDKVFRSSVLHSTQDLFLPFFSNVTWFHAIHVSGTNGTKRFDNPVLPFNDGVYFASTEKSNIIRGWIFGTTLDSKTQSLLIVNNATNVVIKVCEFQFCNDPFLGVYYHKNNKSWMESEFRVYSSANNCTFEYVSQPFLMDLEGKQGNFKNLREFVFKNVDGYFKIYSKHTPINLVRDLPQGFSALEPLVDLPIGINITRFQTLLALHRSYLTPGDSSSGWTAGAAAYYVGYLQPRTFLLKYNENGTITDAVDCALDPLSETKCTLKSFTVEKGIYQTSNFRVQPTESIVRFPNITNLCPFGEVFNATRFASVYAWNRKRISNCVADYSVLYNSASFSTFKCYGVSPTKLNDLCFTNVYADSFVIRGDEVRQIAPGQTGKIADYNYKLPDDFTGCVIAWNSNNLDSKVGGNYNYLYRLFRKSNLKPFERDISTEIYQAGSTPCNGVEGFNCYFPLQSYGFQPTNGVGYQPYRVVVLSFELLHAPATVCGPKKSTNLVKNKCVNFNFNGLTGTGVLTESNKKFLPFQQFGRDIADTTDAVRDPQTLEILDITPCSFGGVSVITPGTNTSNQVAVLYQDVNCTEVPVAIHADQLTPTWRVYSTGSNVFQTRAGCLIGAEHVNNSYECDIPIGAGICASYQTQTNSPRRARSVASQSIIAYTMSLGAENSVAYSNNSIAIPTNFTISVTTEILPVSMTKTSVDCTMYICGDSTECSNLLLQYGSFCTQLNRALTGIAVEQDKNTQEVFAQVKQIYKTPPIKDFGGFNFSQILPDPSKPSKRSFIEDLLFNKVTLADAGFIKQYGDCLGDIAARDLICAQKFNGLTVLPPLLTDEMIAQYTSALLAGTITSGWTFGAGAALQIPFAMQMAYRFNGIGVTQNVLYENQKLIANQFNSAIGKIQDSLSSTASALGKLQDVVNQNAQALNTLVKCLSSNFGAISSVLNDILSRLDKVEAEVQIDRLITGRLQCLQTYVTQQLIRAAEIRASANLAATKMSECVLGQSKRVDFCGKGYHLMSFPQSAPHGVVFLHVTYVPAQEKNFTTAPAICHDGKAHFPREGVFVSNGTHWFVTQRNFYEPQIITTDNTFVSGNCDVVIGIVNNTVYDPLQPELDSGGGGSDIIKLLNEQVNKEMQSSNLYMSMSSWCYTHSLDGAGLFLFDHAAEEYEHAKKLIIFLNENNVPVQLTSISAPEHKFEGLTQIFQKAYEHEQHISESINNIVDHAIKSKDHATFNFLQWYVAEQHEEEVLFKDILDKIELIGNENHGLYLADQYVKGIAKSRKS

SEQ ID NO: 9375 - protein, 1315 aa, Artificial Sequence
  SARS-CoV-2/Iceland/319/2020__EPI_ISL_417648 spike protein (1-1147)(Q965C_S1003C) Ferritin construct
MFVFLVLLPLVSSQCVNLTTRTQLPPAYTNSFTRGVYYPDKVFRSSVLHSTQDLFLPFFSNVTWFHAIHVSGTNGTKRFDNPVLPFNDGVYFASTEKSNIIRGWIFGTTLDSKTQSLLIVNNATNVVIKVCEFQFCNDPFLGVYYHKNNKSWMESEFRVYSSANNCTFEYVSQPFLIDLEGKQGNFKNLREFVFKNIDGYFKIYSKHTPINLVRDLPQGFSALEPLVDLPIGINITRFQTLLALHRSYLTPGDSSSGWTAGAAAYYVGYLQPRTFLLKYNENGTITDAVDCALDPLSETKCTLKSFTVEKGIYQTSNFRVQPTESIVRFPNITNLCPFGEVFNATRFASVYAWNRKRISNCVADYSVLYNSASFSTFKCYGVSPTKLNDLCFTNVYADSFVIRGDEVRQIAPGQTGKIADYNYKLPDDFTGCVIAWNSNNLDSKVGGNYNYLYRLFRKSNLKPFERDISTEIYQAGSTPCNGVEGFNCYFPLQSYGFQPTNGVGYQPYRVVVLSFELLHAPATVCGPKKSTNLVKNKCVNFNFNGLTGTGVLTESNKKFLPFQQFGRDIADTTDAVRDPQTLEILDITPCSFGGVSVITPGTNTSNQVAVLYQGVNCTEVPVAIHADQLTPTWRVYSTGSNVFQTRAGCLIGAEHVNNSYECDIPIGAGICASYQTQTNSPRRARSVASQSIIAYTMSLGAENSVAYSNNSIAIPTNFTISVTTEILPVSMTKTSVDCTMYICGDSTECSNLLLQYGSFCTQLNRALTGIAVEQDKNTQEVFAQVKQIYKTPPIKDFGGFNFSQILPDPSKPSKRSFIEDLLFNKVTLADAGFIKQYGDCLGDIAARDLICAQKFNGLTVLPPLLTDEMIAQYTSALLAGTITSGWTFGAGAALQIPFAMQMAYRFNGIGVTQNVLYENQKLIANQFNSAIGKIQDSLSSTASALGKLQDVVNQNAQALNTLVKCLSSNFGAISSVLNDILSRLDKVEAEVQIDRLITGRLQCLQTYVTQQLIRAAEIRASANLAATKMSECVLGQSKRVDFCGKGYHLMSFPQSAPHGVVFLHVTYVPAQEKNFTTAPAICHDGKAHFPREGVFVSNGTHWFVTQRNFYEPQIITTDNTFVSGNCDVVIGIVNNTVYDPLQPELDSGGGGSDIIKLLNEQVNKEMQSSNLYMSMSSWCYTHSLDGAGLFLFDHAAEEYEHAKKLIIFLNENNVPVQLTSISAPEHKFEGLTQIFQKAYEHEQHISESINNIVDHAIKSKDHATFNFLQWYVAEQHEEEVLFKDILDKIELIGNENHGLYLADQYVKGIAKSRKS

SEQ ID NO: 9376 - protein, 1315 aa, Artificial Sequence
  SARS-CoV-2/Congo/94/2020__EPI_ISL_417947 spike protein (1-1147)(Q965C_S1003C) Ferritin construct
MFVFLVLLPLVSSQCVNLTTRTQLPPAYTNSFTRGVYYPDKVFRSSVLHSTQDLFLPFFSNVTWFHAIHVSGTNGTKRFDNPVLPFNDGVYFASTEKSNIIRGWIFGTTLDSKTQSLLIVNNATNVVIKVCEFQFCNDPFLGVYYHKNNKSWMESEFRVYSSANNCTFEYVSQPFLMDLEGKQGNFKNLREFVFKNIDGYFKIYSKHTPINLVRDLPQGFSALEPLVDLPIGINITRFQTLLALHRSYLTPGDSSSGWTAGAAAYYVGYLQPRTFLLKYNENGTITDAVDCALDPLSETKCTLKSFTVEKGIYQTSNFRVQPTESIVRFPNITNLCPFGEVFNATRFASVYAWNRKRISNCVADYSVLYNSASFSTFKCYGVSPTKLNDLCFTNVYADSFVIRGDEVRQIAPGQTGKIADYNYKLPDDFTGCVIAWNSNNLDSKVGGNYNYLYRLFRKSNLKPFERDISTEIYQAGSTPCNGVEGFNCYFPLQSYGFQPTNGVGYQPYRVVVLSFELLHAPATVCGPKKSTNLVKNKCVNFNFNGLTGTGVLTESNKKFLPFQQFGRDIADTTDAVRDPQTLEILDITPCSFGGVSVITPGTNTSNQVAVLYQGVNCTEVPVAIHADQLTPTWRVYSTGSNVFQTRAGCLIGAEHVNNSYECDIPIGAGICASYQTQTNSPRRARSVASQSIIAYTMSLGAENSVAYSNNSIAIPTNFTISVTTEILPVSMTKTSVDCTMYICGDSTECSNLLLQYGSFCTQLNRALTGIAVEQDKNTQEVFAQVKQIYKTPPIKDFGGFNFSQILPDPSKPSKRSFIEDILFNKVTLADAGFIKQYGDCLGDIAARDLICAQKFNGLTVLPPLLTDEMIAQYTSALLAGTITSGWTFGAGAALQIPFAMQMAYRFNGIGVTQNVLYENQKLIANQFNSAIGKIQDSLSSTASALGKLQDVVNQNAQALNTLVKCLSSNFGAISSVLNDILSRLDKVEAEVQIDRLITGRLQCLQTYVTQQLIRAAEIRASANLAATKMSECVLGQSKRVDFCGKGYHLMSFPQSAPHGVVFLHVTYVPAQEKNFTTAPAICHDGKAHFPREGVFVSNGTHWFVTQRNFYEPQIITTDNTFVSGNCDVVIGIVNNTVYDPLQPELDSGGGGSDIIKLLNEQVNKEMQSSNLYMSMSSWCYTHSLDGAGLFLFDHAAEEYEHAKKLIIFLNENNVPVQLTSISAPEHKFEGLTQIFQKAYEHEQHISESINNIVDHAIKSKDHATFNFLQWYVAEQHEEEVLFKDILDKIELIGNENHGLYLADQYVKGIAKSRKS

SEQ ID NO: 9377 - protein, 1315 aa, Artificial Sequence
  SARS-CoV-2/Congo/158/2020__EPI_ISL_417950 spike protein (1-1147)(Q965C_S1003C) Ferritin construct
MFVFLVLLPLVSSQCVNLTTRTQLPPAYTNSFTRGVYYPDKVFRSSVLHSTQDLFLPFFSNVTWFHAIHVSGTNGTKRFDNPVLPFNDGVYFASTEKSNIIRGWIFGTTLDSKTQSLLIVNNATNVVIKVCEFQFCNDPFLGVYYHKNNKSWMESEFRVYSSANNCTFEYVSQPFLMDLEGKQGNFKNLREFVFKNIDGYFKIYSKHTPINLVRDLPQGFSALEPLVDLPIGINITRFQTLLALHRSYLTPGDSSSGWTAGAAAYYVGYLQPRTFLLKYNENGTITDAVDCALDPLSETKCTLKSFTVEKGIYQTSNFRVQPTESIVRFPNITNLCPFGEVFNATRFASVYAWNRKRISNCVADYSVLYNSASFSTFKCYGVSPTKLNDLCFTNVYADSFVIRGDEVRQIAPGQTGKIADYNYKLPDDFTGCVIAWNSNNLDSKVGGNYNYLYRLFRKSNLKPFERDISTEIYQAGSTPCNGVEGFNCYFPLQSYGFQPTNGVGYQPYRVVVLSFELLHAPATVCGPKKSTNLVKNKCVNFNFNGLTGTGVLTESNKKFLPFQQFGRDIADTTDAVRDPQTLEILDITPCSFGGVSVITPGTNTSNQVAVLYQDVNCTEVPVAIHADQLTPTWRVYSTGSNVFQTRAGCLIGAEHVNNSYECDIPIGAGICASYQTQTNSPRRARSVASQSIIAYTMSLGAENSVAYSNNSIAIPTNFTISVTTEILPVSMTKTSVDCTMYICGDSTECSNLLLQYGSFCTQLNRALTGIAVEQDKNTQEVFAQVKQIYKTPPIKDFGGFNFSQILPDPSKPSKRSFIEDLLFNKVTLADAGFIKQYGDCLGDIAARDLICAQKFNGLTVLPPLLTDEMIAQYTSALLAGTITSGWTFGAGAALQIPFAMQMAYRFNGIGVTQNVLYENQKLIANQFNSAIGKIQDSLSSTASALGKLQDVVNQNAQALNTLVKCLSSNFGAISSVLNDILSRLDKVEAEVQIDRLITGRLQCLQTYVTQQLIRAAEIRASANLAATKMSECVLGQSKRVDFCGKGYHLMSFPQSAPHGVVFLHVTYVPAQEKNFTTAPAICHDGKAHFPREGVFVSNGTHWFVTQRNFYEPQIITTDNTFLSGNCDVVIGIVNNTVYDPLQPELDSGGGGSDIIKLLNEQVNKEMQSSNLYMSMSSWCYTHSLDGAGLFLFDHAAEEYEHAKKLIIFLNENNVPVQLTSISAPEHKFEGLTQIFQKAYEHEQHISESINNIVDHAIKSKDHATFNFLQWYVAEQHEEEVLFKDILDKIELIGNENHGLYLADQYVKGIAKSRKS

SEQ ID NO: 9378 - protein, 1315 aa, Artificial Sequence
  SARS-CoV-2/USA/UT-00034/2020__EPI_ISL_417977 spike protein (1-1147)(Q965C_S1003C) Ferritin construct
MFVFLVLLPLVSSQCVNLTTRTQLPPAYTNSFTRGVYYPDKVFRSSVLHSTQDLFLPFFSNVTWFHAIHVSGTNGTKRFDNPVLPFNDGVYFASTEKSNIIRGWIFGTTLDSKTQSLLIVNNATNVVIKVCEFQFCNDPFLGVYYYKNNKSWMESEFRVYSSANNCTFEYVSQPFLMDLEGKQGNFKNLREFVFKNIDGYFKIYSKHTPINLVRDLPQGFSALEPLVDLPIGINITRFQTLLALHRSYLTPGDSSSGWTAGAAAYYVGYLQPRTFLLKYNENGTITDAVDCALDPLSETKCTLKSFTVEKGIYQTSNFRVQPTESIVRFPNITNLCPFGEVFNATRFASVYAWNRKRISNCVADYSVLYNSASFSTFKCYGVSPTKLNDLCFTNVYADSFVIRGDEVRQIAPGQTGKIADYNYKLPDDFTGCVIAWNSNNLDSKVGGNYNYLYRLFRKSNLKPFERDISTEIYQAGSTPCNGVEGFNCYFPLQSYGFQPTNGVGYQPYRVVVLSFELLHAPATVCGPKKSTNLVKNKCVNFNFNGLTGTGVLTESNKKFLPFQQFGRDIADTTDAVRDPQTLEILDITPCSFGGVSVITPGTNTSNQVAVLYQGVNCTEVPVAIHADQLTPTWRVYSTGSNVFQTRAGCLIGAEHVNNSYECDIPIGAGICASYQTQTNSPRRARSVASQSIIAYTMSLGAENSVAYSNNSIAIPTNFTISVTTEILPVSMTKTSVDCTMYICGDSTECSNLLLQYGSFCTQLNRALTGIAVEQDKNTQEVFAQVKQIYKTPPIKDFGGFNFSQILPDPSKPSKRSFIEDLLFNKVTLADAGFIKQYGDCLGDIAARDLICAQKFNGLTVLPPLLTDEMIAQYTSALLAGTITSGWTFGAGAALQIPFAMQMAYRFNGIGVTQNVLYENQKLIANQFNSAIGKIQDSLSSTASALGKLQDVVNQNAQALNTLVKCLSSNFGAISSVLNDILSRLDKVEAEVQIDRLITGRLQCLQTYVTQQLIRAAEIRASANLAATKMSECVLGQSKRVDFCGKGYHLMSFPQSAPHGVVFLHVTYVPAQEKNFTTAPAICHDGKAHFPREGVFVSNGTHWFVTQRNFYEPQIITTDNTFVSGNCDVVIGIVNNTVYDPLQPELDSGGGGSDIIKLLNEQVNKEMQSSNLYMSMSSWCYTHSLDGAGLFLFDHAAEEYEHAKKLIIFLNENNVPVQLTSISAPEHKFEGLTQIFQKAYEHEQHISESINNIVDHAIKSKDHATFNFLQWYVAEQHEEEVLFKDILDKIELIGNENHGLYLADQYVKGIAKSRKS

SEQ ID NO: 9379 - protein, 1315 aa, Artificial Sequence
  SARS-CoV-2/USA/UT-00033/2020__EPI_ISL_417976 spike protein (1-1147)(Q965C_S1003C) Ferritin construct
MFVFLVLLPLVSSQCVNLTTRTQLPPAYTNSFTRGVYYPDKVFRSSVLHSTQDLFLPFFSNVTWFHAIHVSGTNGTKRFDNPVLPFNDGVYFASTEKSNIIRGWIFGTTLDSKTQSLLIVNNATNVVIKVCEFQFCNDPFLGVYYHKNNKSWMESEFRVYSSANNCTFEYVSQPFLMDLEGKQGNFKNLREFVFKNIDGYFKIYSKHTPINLVRDLPQGFSALEPLVDLPIGINITRFQTLLALHRSYLTPGDSSSGLTAGAAAYYVGYLQPRTFLLKYNENGTITDAVDCALDPLSETKCTLKSFTVEKGIYQTSNFRVQPTESIVRFPNITNLCPFGEVFNATRFASVYAWNRKRISNCVADYSVLYNSASFSTFKCYGVSPTKLNDLCFTNVYADSFVIRGDEVRQIAPGQTGKIADYNYKLPDDFTGCVIAWNSNNLDSKVGGNYNYLYRLFRKSNLKPFERDISTEIYQAGSTPCNGVEGFNCYFPLQSYGFQPTNGVGYQPYRVVVLSFELLHAPATVCGPKKSTNLVKNKCVNFNFNGLTGTGVLTESNKKFLPFQQFGRDIADTTDAVRDPQTLEILDITPCSFGGVSVITPGTNTSNQVAVLYQGVNCTEVPVAIHADQLTPTWRVYSTGSNVFQTRAGCLIGAEHVNNSYECDIPIGAGICASYQTQTNSPRRARSVASQSIIAYTMSLGAENSVAYSNNSIAIPTNFTISVTTEILPVSMTKTSVDCTMYICGDSTECSNLLLQYGSFCTQLNRALTGIAVEQDKNTQEVFAQVKQIYKTPPIKDFGGFNFSQILPDPSKPSKRSFIEDLLFNKVTLADAGFIKQYGDCLGDIAARDLICAQKFNGLTVLPPLLTDEMIAQYTSALLAGTITSGWTFGAGAALQIPFAMQMAYRFNGIGVTQNVLYENQKLIANQFNSAIGKIQDSLSSTASALGKLQDVVNQNAQALNTLVKCLSSNFGAISSVLNDILSRLDKVEAEVQIDRLITGRLQCLQTYVTQQLIRAAEIRASANLAATKMSECVLGQSKRVDFCGKGYHLMSFPQSAPHGVVFLHVTYVPAQEKNFTTAPAICHDGKAHFPREGVFVSNGTHWFVTQRNFYEPQIITTDNTFVSGNCDVVIGIVNNTVYDPLQPELDSGGGGSDIIKLLNEQVNKEMQSSNLYMSMSSWCYTHSLDGAGLFLFDHAAEEYEHAKKLIIFLNENNVPVQLTSISAPEHKFEGLTQIFQKAYEHEQHISESINNIVDHAIKSKDHATFNFLQWYVAEQHEEEVLFKDILDKIELIGNENHGLYLADQYVKGIAKSRKS

SEQ ID NO: 9380 - protein, 1315 aa, Artificial Sequence
  SARS-CoV-2/USA/WI-13/2020__EPI_ISL_417516 spike protein (1-1147)(Q965C_S1003C) Ferritin construct
MFVFLVLLPLVSSQCVNLTTRTQLPPAYTNSFTRGVYYPDKVFRSSVLHSTQDLFLPFFSNVTWFHAIHVSGTNGTKRFDNPVLPFNDGVYFASTEKSNIIRGWIFGTTLDSKTQSLLIVNNATNVVIKVCEFQFCNDPFLGVYYHKNNKSWMESEFRVYSSANNCTFEYVSQPFLMDLEGKQGNFKNLREFVFKNIDGYFKIYSKHTPINLVRDLPQGFSALEPLVDLPIGINITRFQTLLALHRSYLTPGDSSSGWTAGAAAYYVGYLQPRTFLLKYNENGTITDAVDCALDPLSETKCTLKSFTVEKGIYQTSNFRVLPTESIVRFPNITNLCPFGEVFNATRFASVYAWNRKRISNCVADYSVLYNSASFSTFKCYGVSPTKLNDLCFTNVYADSFVIRGDEVRQIAPGQTGKIADYNYKLPDDFTGCVIAWNSNNLDSKVGGNYNYLYRLFRKSNLKPFERDISTEIYQAGSTPCNGVEGFNCYFPLQSYGFQPTNGVGYQPYRVVVLSFELLHAPATVCGPKKSTNLVKNKCVNFNFNGLTGTGVLTESNKKFLPFQQFGRDIADTTDAVRDPQTLEILDITPCSFGGVSVITPGTNTSNQVAVLYQGVNCTEVPVAIHADQLTPTWRVYSTGSNVFQTRAGCLIGAEHVNNSYECDIPIGAGICASYQTQTNSPRRARSVASQSIIAYTMSLGAENSVAYSNNSIAIPTNFTISVTTEILPVSMTKTSVDCTMYICGDSTECSNLLLQYGSFCTQLNRALTGIAVEQDKNTQEVFAQVKQIYKTPPIKDFGGFNFSQILPDPSKPSKRSFIEDLLFNKVTLADAGFIKQYGDCLGDIAARDLICAQKFNGLTVLPPLLTDEMIAQYTSALLAGTITSGWTFGAGAALQIPFAMQMAYRFNGIGVTQNVLYENQKLIANQFNSAIGKIQDSLSSTASALGKLQDVVNQNAQALNTLVKCLSSNFGAISSVLNDILSRLDKVEAEVQIDRLITGRLQCLQTYVTQQLIRAAEIRASANLAATKMSECVLGQSKRVDFCGKGYHLMSFPQSAPHGVVFLHVTYVPAQEKNFTTAPAICHDGKAHFPREGVFVSNGTHWFVTQRNFYEPQIITTDNTFVSGNCDVVIGIVNNTVYDPLQPELDSGGGGSDIIKLLNEQVNKEMQSSNLYMSMSSWCYTHSLDGAGLFLFDHAAEEYEHAKKLIIFLNENNVPVQLTSISAPEHKFEGLTQIFQKAYEHEQHISESINNIVDHAIKSKDHATFNFLQWYVAEQHEEEVLFKDILDKIELIGNENHGLYLADQYVKGIAKSRKS

SEQ ID NO: 9381 - protein, 1314 aa, Artificial Sequence
  SARS-CoV-2/India/1-27/2020__EPI_ISL_413522 spike protein (1-1146)(Q964C_S1002C) Ferritin construct
MFVFLVLLPLVSSQCVNLTTRTQLPPAYTNSFTRGVYYPDKVFRSSVLHSTQDLFLPFFSNVTWFHAIHVSGTNGTKRFDNPVLPFNDGVYFASTEKSNIIRGWIFGTTLDSKTQSLLIVNNATNVVIKVCEFQFCNDPFLGVYHKNNKSWMESEFRVYSSANNCTFEYVSQPFLMDLEGKQGNFKNLREFVFKNIDGYFKIYSKHTPINLVRDLPQGFSALEPLVDLPIGINITRFQTLLALHRSYLTPGDSSSGWTAGAAAYYVGYLQPRTFLLKYNENGTITDAVDCALDPLSETKCTLKSFTVEKGIYQTSNFRVQPTESIVRFPNITNLCPFGEVFNATRFASVYAWNRKRISNCVADYSVLYNSASFSTFKCYGVSPTKLNDLCFTNVYADSFVIRGDEVIQIAPGQTGKIADYNYKLPDDFTGCVIAWNSNNLDSKVGGNYNYLYRLFRKSNLKPFERDISTEIYQAGSTPCNGVEGFNCYFPLQSYGFQPTNGVGYQPYRVVVLSFELLHAPATVCGPKKSTNLVKNKCVNFNFNGLTGTGVLTESNKKFLPFQQFGRDIADTTDAVRDPQTLEILDITPCSFGGVSVITPGTNTSNQVAVLYQDVNCTEVPVAIHADQLTPTWRVYSTGSNVFQTRAGCLIGAEHVNNSYECDIPIGAGICASYQTQTNSPRRARSVASQSIIAYTMSLGAENSVAYSNNSIAIPTNFTISVTTEILPVSMTKTSVDCTMYICGDSTECSNLLLQYGSFCTQLNRALTGIAVEQDKNTQEVFAQVKQIYKTPPIKDFGGFNFSQILPDPSKPSKRSFIEDLLFNKVTLADAGFIKQYGDCLGDIAARDLICAQKFNGLTVLPPLLTDEMIAQYTSALLAGTITSGWTFGAGAALQIPFAMQMAYRFNGIGVTQNVLYENQKLIANQFNSAIGKIQDSLSSTASALGKLQDVVNQNAQALNTLVKCLSSNFGAISSVLNDILSRLDKVEAEVQIDRLITGRLQCLQTYVTQQLIRAAEIRASANLAATKMSECVLGQSKRVDFCGKGYHLMSFPQSAPHGVVFLHVTYVPAQEKNFTTAPAICHDGKAHFPREGVFVSNGTHWFVTQRNFYEPQIITTDNTFVSGNCDVVIGIVNNTVYDPLQPELDSGGGGSDIIKLLNEQVNKEMQSSNLYMSMSSWCYTHSLDGAGLFLFDHAAEEYEHAKKLIIFLNENNVPVQLTSISAPEHKFEGLTQIFQKAYEHEQHISESINNIVDHAIKSKDHATFNFLQWYVAEQHEEEVLFKDILDKIELIGNENHGLYLADQYVKGIAKSRKS

SEQ ID NO: 9382 - protein, 1309 aa, Artificial Sequence
  SARS-CoV-2/pangolin/Guangxi/P4L/2017__EPI_ISL_410538 spike protein (1-1141)(Q959C_S997C) Ferritin construct
MFVFLFVLPLVSSQCVNLTTRTGIPPGYTNSSTRGVYYPDKVFRSSILHLTQDLFLPFFSNVTWFNTINYQGGFKKFDNPVLPFNDGVYFASTEKSNIIRGWIFGTTLDARTQSLLIVNNATNVVIKVCEFQFCTDPFLGVYYHNNNKTWVENEFRVYSSANNCTFEYISQPFLMDLEGKQGNFKNLREFVFKNVDGYFKIYSKHTPIDLVRDLPRGFAALEPLVDLPIGINITRFQTLLALHRSYLTPGNLESGWTTGAAAYYVGYLQQRTFLLSYNQNGTITDAVDCSLDPLSETKCTLKSLTVEKGIYQTSNFRVQPTISIVRFPNITNLCPFGEVFNASKFASVYAWNRKRISNCVADYSVLYNSTSFSTFKCYGVSPTKLNDLCFTNVYADSFVVKGDEVRQIAPGQTGVIADYNYKLPDDFTGCVIAWNSVKQDALTGGNYGYLYRLFRKSKLKPFERDISTEIYQAGSTPCNGQVGLNCYYPLERYGFHPTTGVNYQPFRVVVLSFELLNGPATVCGPKLSTTLVKDKCVNFNFNGLTGTGVLTTSKKQFLPFQQFGRDISDTTDAVRDPQTLEILDITPCSFGGVSVITPGTNTSNQVAVLYQDVNCTEVPMAIHAEQLTPAWRVYSAGANVFQTRAGCLVGAEHVNNSYECDIPVGAGICASYHSMSSLRSVNQRSIIAYTMSLGAENSVAYSNNSIAIPTNFTISVTTEILPVSMTKTSVDCTMYICGDSIECSNLLLQYGSFCTQLNRALTGIAVEQDKNTQEVFAQVKQIYKTPPIKDFGGFNFSQILPDPSKPSKRSFIEDLLFNKVTLADAGFIKQYGDCLGDIAARDLICAQKFNGLTVLPPLLTDEMIAQYTSALLAGTITSGWTFGAGAALQIPFAMQMAYRFNGIGVTQNVLYENQKLIANQFNSAIGKIQDSLSSTASALGKLQDVVNQNAQALNTLVKCLSSNFGAISSVLNDILSRLDKVEAEVQIDRLITGRLQCLQTYVTQQLIRAAEIRASANLAATKMSECVLGQSKRVDFCGKGYHLMSFPQSAPHGVVFLHVTYVPAQEKNFTTAPAICHEGKAHFPREGVFVSNGTHWFITQRNFYEPQIITTDNTFVSGSCDVVIGIVNNTVYDPLQPELDSGGGGSDIIKLLNEQVNKEMQSSNLYMSMSSWCYTHSLDGAGLFLFDHAAEEYEHAKKLIIFLNENNVPVQLTSISAPEHKFEGLTQIFQKAYEHEQHISESINNIVDHAIKSKDHATFNFLQWYVAEQHEEEVLFKDILDKIELIGNENHGLYLADQYVKGIAKSRKS

SEQ ID NO: 9383 - protein, 1309 aa, Artificial Sequence
  SARS-CoV-2/pangolin/Guangxi/P5L/2017__EPI_ISL_410540 spike protein (1-1141)(Q959C_S997C) Ferritin construct
MFVFLFVLPLVSSQCVNLTTRTGIPPGYTNSSTRGVYYPDKVFRSSILHLTQDLFLPFFSNVTWFNTINYQGGFKKFDNPVLPFNDGVYFASTEKSNIIRGWIFGTTLDARTQSLLIVNNATNVVIKVCEFQFCTDPFLGVYYHNNNKTWVENEFRVYSSANNCTFEYISQPFLMDLEGKQGNFKNLREFVFKNVDGYFKIYSKHTPIDLVRDLPRGFAALEPLVDLPIGINITRFQTLLALHRSYLTPGKLESGWTTGAAAYYVGYLQQRTFLLSYNQNGTITDAVDCSLDPLSETKCTLKSLTVEKGIYQTSNFRVQPTISIVRFPNITNLCPFGEVFNASKFASVYAWNRKRISNCVADYSVLYNSTSFSTFKCYGVSPTKLNDLCFTNVYADSFVVKGDEVRQIAPGQTGVIADYNYKLPDDFTGCVIAWNSVKQDALTGGNYGYLYRLFRKSKLKPFERDISTEIYQAGSTPCNGQVGLNCYYPLERYGFHPTTGVNYQPFRVVVLSFELLNGPATVCGPKLSTTLVKDKCVNFNFNGLTGTGVLTTSKKQFLPFQQFGRDISDTTDAVRDPQTLEILDITPCSFGGVSVITPGTNTSNQVAVLYQDVNCTEVPMAIHAEQLTPAWRVYSAGANVFQTRAGCLVGAEHVNNSYECDIPVGAGICASYHSMSSFRSVNQRSIIAYTMSLGAENSVAYSNNSIAIPTNFTISVTTEILPVSMTKTSVDCTMYICGDSIECSNLLLQYGSFCTQLNRALTGIAVEQDKNTQEVFAQVKQIYKTPPIKDFGGFNFSQILPDPSKPSKRSFIEDLLFNKVTLADAGFIKQYGDCLGDIAARDLICAQKFNGLTVLPPLLTDEMIAQYTSALLAGTITSGWTFGAGAALQIPFAMQMAYRFNGIGVTQNVLYENQKLIANQFNSAIGKIQDSLSSTASALGKLQDVVNQNAQALNTLVKCLSSNFGAISSVLNDILSRLDKVEAEVQIDRLITGRLQCLQTYVTQQLIRAAEIRASANLAATKMSECVLGQSKRVDFCGKGYHLMSFPQSAPHGVVFLHVTYVPAQEKNFTTAPAICHEGKAHFPREGVFVSNGTHWFITQRNFYEPQIITTDNTFVSGSCDVVIGIVNNTVYDPLQPELDSGGGGSDIIKLLNEQVNKEMQSSNLYMSMSSWCYTHSLDGAGLFLFDHAAEEYEHAKKLIIFLNENNVPVQLTSISAPEHKFEGLTQIFQKAYEHEQHISESINNIVDHAIKSKDHATFNFLQWYVAEQHEEEVLFKDILDKIELIGNENHGLYLADQYVKGIAKSRKS

SEQ ID NO: 9384 - protein, 1309 aa, Artificial Sequence
  SARS-CoV-2/pangolin/Guangxi/P5E/2017__EPI_ISL_410541 spike protein (1-1141)(Q959C_S997C) Ferritin construct
MFVFLFVLPLVSSQCVNLTTRTGIPPGYTNSSTRGVYYPDKVFRSSILHLTQDLFLPFFSNVTWFNTITYQGGSKKFDNPVLPFNDGVYFASTEKSNIIRGWIFGTTLDARTQSLLIVNNATNVVIKVCEFQFCTDPFLGVYYHNNNKTWVENEFRVYSSANNCTFEYISQPFLMDLEGKQGNFKNLREFVFKNVDGYFKIYSKHTPIDLVRDLPRGFAALEPLVDLPIGINITRFQTLLALHRSYLTPGKLESGWTTGAAAYYVGYLQQRTFLLSYNQNGTITDAVDCSLDPLSETKCTLKSLTVEKGIYQTSNFRVQPTISIVRFPNITNLCPFGEVFNASKFASVYAWNRKRISNCVADYSVLYNSTSFSTFKCYGVSPTKLNDLCFTNVYADSFVVKGDEVRQIAPGQTGVIADYNYKLPDDFTGCVIAWNSVKQDALTGDNYGYLYRLFRKSKLKPFERDISTEIYQAGSTPCNGQVGLNCYYPLERYGFHPTTGVNYQPFRVVVLSFELLNGPATVCGPKLSTTLVKDKCVNFNFNGLTGTGVLTTSKKQFLPFQQFGRDISDTTDAVRDPQTLEILDITPCSFGGVSVITPGTNTSNQVAVLYQDVNCTEVPMAIHAEQLTPAWRVYSAGANVFQTRAGCLVGAEHVNNSYECDIPVGAGICASYHSMSSFRSVNQRSIIAYTMSLGAENSVAYSNNSIAIPTNFTISVTTEILPVSMTKTSVDCTMYICGDSIECSNLLLQYGSFCTQLNRALTGIAVEQDKNTQEVFAQVKQIYKTPPIKDFGGFNFSQILPDPSKPSKRSFIEDLLFNKVTLADAGFIKQYGDCLGDIAARDLICAQKFNGLTVLPPLLTDEMIAQYTSALLAGTITSGWTFGAGAALQIPFAMQMAYRFNGIGVTQNVLYENQKLIANQFNSAIGKIQDSLSSTASALGKLQDVVNQNAQALNTLVKCLSSNFGAISSVLNDILSRLDKVEAEVQIDRLITGRLQCLQTYVTQQLIRAAEIRASANLAATKMSECVLGQSKRVDFCGKGYHLMSFPQSAPHGVVFLHVTYVPAQEKNFTTAPAICHEGKAHFPREGVFVSNGTHWFITQRNFYEPQIITTDNTFVSGSCDVVIGIVNNTVYDPLQPELDSGGGGSDIIKLLNEQVNKEMQSSNLYMSMSSWCYTHSLDGAGLFLFDHAAEEYEHAKKLIIFLNENNVPVQLTSISAPEHKFEGLTQIFQKAYEHEQHISESINNIVDHAIKSKDHATFNFLQWYVAEQHEEEVLFKDILDKIELIGNENHGLYLADQYVKGIAKSRKS

SEQ ID NO: 9385 - protein, 1307 aa, Artificial Sequence
  SARS-CoV-2/pangolin/Guangxi/P1E/2017__EPI_ISL_410539 spike protein (1-1139)(Q957C_S995C) Ferritin construct
MFVFLFVLPLVSSQCVNLTTRTGIQPGYTNSSTRGVYYPDKVFRSSILHLTQDLFLPFFSNVTWFNTINYQGGFKKFDNPVLPFNDGVYFASTEKSNIIRGWIFGTTLDARTQSLLIVNNATNVVIKVCEFQFCTDPFLGVYYHNNNKTWVENEFRVYSSANNCTFEYISQPFLMDLEGKQGNFKNLREFVFKNVDGYFKIYSKHTPIDLVRDLPRGFAALEPLVDLPIGINITRFQTLLALHRSYLTPGKLESGWTTGAAAYYVGYLQQRTFLLSYNQNGTITDAVDCSLDPLSETKCTLKSLTVEKGIYQTSNFRVQPTISIVRFPNITNLCPFGEVFNASKFASVYAWNRKRISNCVADYSVLYNSTSFSTFKCYGVSPTKLNDLCFTNVYADSFVVKGDEVRQIAPGQTGVIADYNYKLPDDFTGCVIAWNSVKQDALTGGNYLYRLFRKSKLKPFERDISTEIYQAGSTPCNGQVGLNCYYPLERYGFHPTTGVNYQPFRVVVLSFELLNGPATVCGPKLSTTLVKDKCVNFNFNGLTGTGVLTTSKKQFLPFQQFGRDISDTTDAVRDPQTLEILDITPCSFGGVSVITPGTNTSNQVAVLYQDVNCTEVPMAIHAEQLTPAWRVYSAGANVFQTRAGCLVGAEHVNNSYECDIPVGAGICASYHSMSSLRSVNQRSIIAYTMSLGAENSVAYSNNSIAIPTNFTISVTTEILPVSMTKTSVDCTMYICGDSIECSNLLLQYGSFCTQLNRALTGIAVEQDKNTQEVFAQVKQIYKTPPIKDFGGFNFSQILPDPSKPSKRSFIEDLLFNKVTLADAGFIKQYGDCLGDIAARDLICAQKFNGLTVLPPLLTDEMIAQYTSALLAGTITSGWTFGAGAALQIPFAMQMAYRFNGIGVTQNVLYENQKLIANQFNSAIGKIQDSLSSTASALGKLQDVVNQNAQALNTLVKCLSSNFGAISSVLNDILSRLDKVEAEVQIDRLITGRLQCLQTYVTQQLIRAAEIRASANLAATKMSECVLGQSKRVDFCGKGYHLMSFPQSAPHGVVFLHVTYVPAQEKNFTTAPAICHEGKAHFPREGVFVSNGTHWFITQRNFYEPQIITTDNTFVSGSCDVVIGIVNNTVYDPLQPELDSGGGGSDIIKLLNEQVNKEMQSSNLYMSMSSWCYTHSLDGAGLFLFDHAAEEYEHAKKLIIFLNENNVPVQLTSISAPEHKFEGLTQIFQKAYEHEQHISESINNIVDHAIKSKDHATFNFLQWYVAEQHEEEVLFKDILDKIELIGNENHGLYLADQYVKGIAKSRKS

SEQ ID NO: 9386 - protein, 1315 aa, Artificial Sequence
  SARS-CoV-2/Wuhan/WIV05/2019__EPI_ISL_402128 spike protein (1-1147)(F970C_G999C) Ferritin construct
MFVFLVLLPLVSSQCVNLTTRTQLPPAYTNSFTRGVYYPDKVFRSSVLHSTQDLFLPFFSNVTWFHAIHVSGTNGTKRFDNPVLPFNDGVYFASTEKSNIIRGWIFGTTLDSKTQSLLIVNNATNVVIKVCEFQFCNDPFLGVYYHKNNKSWMESEFRVYSSANNCTFEYVSQPFLMDLEGKQGNFKNLREFVFKNIDGYFKIYSKHTPINLVRDLPQGFSALEPLVDLPIGINITRFQTLLALHRSYLTPGDSSSGWTAGAAAYYVGYLQPRTFLLKYNENGTITDAVDCALDPLSETKCTLKSFTVEKGIYQTSNFRVQPTESIVRFPNITNLCPFGEVFNATRFASVYAWNRKRISNCVADYSVLYNSASFSTFKCYGVSPTKLNDLCFTNVYADSFVIRGDEVRQIAPGQTGKIADYNYKLPDDFTGCVIAWNSNNLDSKVGGNYNYLYRLFRKSNLKPFERDISTEIYQAGSTPCNGVEGFNCYFPLQSYGFQPTNGVGYQPYRVVVLSFELLHAPATVCGPKKSTNLVKNKCVNFNFNGLTGTGVLTESNKKFLPFQQFGRDIADTTDAVRDPQTLEILDITPCSFGGVSVITPGTNTSNQVAVLYQDVNCTEVPVAIHADQLTPTWRVYSTGSNVFQTRAGCLIGAEHVNNSYECDIPIGAGICASYQTQTNSPRRARSVASQSIIAYTMSLGAENSVAYSNNSIAIPTNFTISVTTEILPVSMTKTSVDCTMYICGDSTECSNLLLQYGSFCTQLNRALTGIAVEQDKNTQEVFAQVKQIYKTPPIKDFGGFNFSQILPDPSKPSKRSFIEDLLFNKVTLADAGFIKQYGDCLGDIAARDLICAQKFNGLTVLPPLLTDEMIAQYTSALLAGTITSGWTFGAGAALQIPFAMQMAYRFNGIGVTQNVLYENQKLIANQFNSAIGKIQDSLSSTASALGKLQDVVNQNAQALNTLVKQLSSNCGAISSVLNDILSRLDKVEAEVQIDRLITCRLQSLQTYVTQQLIRAAEIRASANLAATKMSECVLGQSKRVDFCGKGYHLMSFPQSAPHGVVFLHVTYVPAQEKNFTTAPAICHDGKAHFPREGVFVSNGTHWFVTQRNFYEPQIITTDNTFVSGNCDVVIGIVNNTVYDPLQPELDSGGGGSDIIKLLNEQVNKEMQSSNLYMSMSSWCYTHSLDGAGLFLFDHAAEEYEHAKKLIIFLNENNVPVQLTSISAPEHKFEGLTQIFQKAYEHEQHISESINNIVDHAIKSKDHATFNFLQWYVAEQHEEEVLFKDILDKIELIGNENHGLYLADQYVKGIAKSRKS

SEQ ID NO: 9387 - protein, 1311 aa, Artificial Sequence
  SARS-CoV-2/bat/Yunnan/RaTG13/2013__EPI_ISL_402131 spike protein (1-1143)(F966C_G995C) Ferritin construct
MFVFLVLLPLVSSQCVNLTTRTQLPPAYTNSSTRGVYYPDKVFRSSVLHLTQDLFLPFFSNVTWFHAIHVSGTNGIKRFDNPVLPFNDGVYFASTEKSNIIRGWIFGTTLDSKTQSLLIVNNATNVVIKVCEFQFCNDPFLGVYYHKNNKSWMESEFRVYSSANNCTFEYVSQPFLMDLEGKQGNFKNLREFVFKNIDGYFKIYSKHTPINLVRDLPPGFSALEPLVDLPIGINITRFQTLLALHRSYLTPGDSSSGWTAGAAAYYVGYLQPRTFLLKYNENGTITDAVDCALDPLSETKCTLKSFTVEKGIYQTSNFRVQPTDSIVRFPNITNLCPFGEVFNATTFASVYAWNRKRISNCVADYSVLYNSTSFSTFKCYGVSPTKLNDLCFTNVYADSFVITGDEVRQIAPGQTGKIADYNYKLPDDFTGCVIAWNSKHIDAKEGGNFNYLYRLFRKANLKPFERDISTEIYQAGSKPCNGQTGLNCYYPLYRYGFYPTDGVGHQPYRVVVLSFELLNAPATVCGPKKSTNLVKNKCVNFNFNGLTGTGVLTESNKKFLPFQQFGRDIADTTDAVRDPQTLEILDITPCSFGGVSVITPGTNASNQVAVLYQDVNCTEVPVAIHADQLTPTWRVYSTGSNVFQTRAGCLIGAEHVNNSYECDIPIGAGICASYQTQTNSRSVASQSIIAYTMSLGAENSVAYSNNSIAIPTNFTISVTTEILPVSMTKTSVDCTMYICGDSTECSNLLLQYGSFCTQLNRALTGIAVEQDKNTQEVFAQVKQIYKTPPIKDFGGFNFSQILPDPSKPSKRSFIEDLLFNKVTLADAGFIKQYGDCLGDIAARDLICAQKFNGLTVLPPLLTDEMIAQYTSALLAGTITSGWTFGAGAALQIPFAMQMAYRFNGIGVTQNVLYENQKLIANQFNSAIGKIQDSLSSTASALGKLQDVVNQNAQALNTLVKQLSSNCGAISSVLNDILSRLDKVEAEVQIDRLITCRLQSLQTYVTQQLIRAAEIRASANLAATKMSECVLGQSKRVDFCGKGYHLMSFPQSAPHGVVFLHVTYVPAQEKNFTTAPAICHDGKAHFPREGVFVSNGTHWFVTQRNFYEPQIITTDNTFVSGSCDVVIGIVNNTVYDPLQPELDSGGGGSDIIKLLNEQVNKEMQSSNLYMSMSSWCYTHSLDGAGLFLFDHAAEEYEHAKKLIIFLNENNVPVQLTSISAPEHKFEGLTQIFQKAYEHEQHISESINNIVDHAIKSKDHATFNFLQWYVAEQHEEEVLFKDILDKIELIGNENHGLYLADQYVKGIAKSRKS

SEQ ID NO: 9388 - protein, 1315 aa, Artificial Sequence
  SARS-CoV-2/Wuhan/HBCDC-HB-01/2019__EPI_ISL_402132 spike protein (1-1147)(F970C_G999C) Ferritin construct
MFVFLVLLPLVSSQCVNLTTRTQLPPAYTNSITRGVYYPDKVFRSSVLHSTQDLFLPFFSNVTWFHAIHVSGTNGTKRFDNPVLPFNDGVYFASTEKSNIIRGWIFGTTLDSKTQSLLIVNNATNVVIKVCEFQFCNDPFLGVYYHKNNKSWMESEFRVYSSANNCTFEYVSQPFLMDLEGKQGNFKNLREFVFKNIDGYFKIYSKHTPINLVRDLPQGFSALEPLVDLPIGINITRFQTLLALHRSYLTPGDSSSGWTAGAAAYYVGYLQPRTFLLKYNENGTITDAVDCALDPLSETKCTLKSFTVEKGIYQTSNFRVQPTESIVRFPNITNLCPFGEVFNATRFASVYAWNRKRISNCVADYSVLYNSASFSTFKCYGVSPTKLNDLCFTNVYADSFVIRGDEVRQIAPGQTGKIADYNYKLPDDFTGCVIAWNSNNLDSKVGGNYNYLYRLFRKSNLKPFERDISTEIYQAGSTPCNGVEGFNCYFPLQSYGFQPTNGVGYQPYRVVVLSFELLHAPATVCGPKKSTNLVKNKCVNFNFNGLTGTGVLTESNKKFLPFQQFGRDIADTTDAVRDPQTLEILDITPCSFGGVSVITPGTNTSNQVAVLYQDVNCTEVPVAIHADQLTPTWRVYSTGSNVFQTRAGCLIGAEHVNNSYECDIPIGAGICASYQTQTNSPRRARSVASQSIIAYTMSLGAENSVAYSNNSIAIPTNFTISVTTEILPVSMTKTSVDCTMYICGDSTECSNLLLQYGSFCTQLNRALTGIAVEQDKNTQEVFAQVKQIYKTPPIKDFGGFNFSQILPDPSKPSKRSFIEDLLFNKVTLADAGFIKQYGDCLGDIAARDLICAQKFNGLTVLPPLLTDEMIAQYTSALLAGTITSGWTFGAGAALQIPFAMQMAYRFNGIGVTQNVLYENQKLIANQFNSAIGKIQDSLSSTASALGKLQDVVNQNAQALNTLVKQLSSNCGAISSVLNDILSRLDKVEAEVQIDRLITCRLQSLQTYVTQQLIRAAEIRASANLAATKMSECVLGQSKRVDFCGKGYHLMSFPQSAPHGVVFLHVTYVPAQEKNFTTAPAICHDGKAHFPREGVFVSNGTHWFVTQRNFYEPQIITTDNTFVSGNCDVVIGIVNNTVYDPLQPELDSGGGGSDIIKLLNEQVNKEMQSSNLYMSMSSWCYTHSLDGAGLFLFDHAAEEYEHAKKLIIFLNENNVPVQLTSISAPEHKFEGLTQIFQKAYEHEQHISESINNIVDHAIKSKDHATFNFLQWYVAEQHEEEVLFKDILDKIELIGNENHGLYLADQYVKGIAKSRKS

SEQ ID NO: 9389 - protein, 1315 aa, Artificial Sequence
  SARS-CoV-2/Guangdong/20SF028/2020__EPI_ISL_403936 spike protein (1-1147)(F970C_G999C) Ferritin construct
MFVFLVLLPLVSSQCVNLTTRTQLPPAYTNSFTRGVYYPDKVFRSSVLYSTQDLFLPFFSNVTWFHAIHVSGTNGTKRFDNPVLPFNDGVYFASTEKSNIIRGWIFGTTLDSKTQSLLIVNNATNVVIKVCEFQFCNDPFLGVYYHKNNKSWMESEFRVYSSANNCTFEYVSQPFLMDLEGKQGNFKNLREFVFKNIDGYFKIYSKHTPINLVRDLPQGFSALEPLVDLPIGINITRFQTLLALHRSYLTPGDSSSGWTAGAAAYYVGYLQPRTFLLKYNENGTITDAVDCALDPLSETKCTLKSFTVEKGIYQTSNFRVQPTESIVRFPNITNLCPFGEVFNATRFASVYAWNRKRISNCVADYSVLYNSASFSTFKCYGVSPTKLNDLCFTNVYADSFVIRGDEVRQIAPGQTGKIADYNYKLPDDFTGCVIAWNSNNLDSKVGGNYNYLYRLFRKSNLKPFERDISTEIYQAGSTPCNGVEGFNCYFPLQSYGFQPTNGVGYQPYRVVVLSFELLHAPATVCGPKKSTNLVKNKCVNFNFNGLTGTGVLTESNKKFLPFQQFGRDIADTTDAVRDPQTLEILDITPCSFGGVSVITPGTNTSNQVAVLYQDVNCTEVPVAIHADQLTPTWRVYSTGSNVFQTRAGCLIGAEHVNNSYECDIPIGAGICASYQTQTNSPRRARSVASQSIIAYTMSLGAENSVAYSNNSIAIPTNFTISVTTEILPVSMTKTSVDCTMYICGDSTECSNLLLQYGSFCTQLNRALTGIAVEQDKNTQEVFAQVKQIYKTPPIKDFGGFNFSQILPDPSKPSKRSFIEDLLFNKVTLADAGFIKQYGDCLGDIAARDLICAQKFNGLTVLPPLLTDEMIAQYTSALLAGTITSGWTFGAGAALQIPFAMQMAYRFNGIGVTQNVLYENQKLIANQFNSAIGKIQDSLSSTASALGKLQDVVNQNAQALNTLVKQLSSNCGAISSVLNDILSRLDKVEAEVQIDRLITCRLQSLQTYVTQQLIRAAEIRASANLAATKMSECVLGQSKRVDFCGKGYHLMSFPQSAPHGVVFLHVTYVPAQEKNFTTAPAICHDGKAHFPREGVFVSNGTHWFVTQRNFYEPQIITTDNTFVSGNCDVVIGIVNNTVYDPLQPELDSGGGGSDIIKLLNEQVNKEMQSSNLYMSMSSWCYTHSLDGAGLFLFDHAAEEYEHAKKLIIFLNENNVPVQLTSISAPEHKFEGLTQIFQKAYEHEQHISESINNIVDHAIKSKDHATFNFLQWYVAEQHEEEVLFKDILDKIELIGNENHGLYLADQYVKGIAKSRKS

SEQ ID NO: 9390 - protein, 1315 aa, Artificial Sequence
  SARS-CoV-2/Shenzhen/SZTH-001/2020__EPI_ISL_406592 spike protein (1-1147)(F970C_G999C) Ferritin construct
MFVFLVLLPLVSSQCVNLTTRTQLPPAYTNSFTRGVYYPDKVFRSSVLHSTQDLFLPFFSNVTWFHAIHVSGTNGTKRFDNPVLPFNDGVYFASTEKSNIIRGWIFGTTLDSKTQSLLIVNNATNVVIKVCEFQFCNDPFLGVYYHKNNKSWMESEFRVYSSANNCTFEYVSQPFLMDLEGKQGNFKNLREFVFKNIDGYFKIYSKHTPINLVRDLPQGFSALEPLVDLPIGINITRFQTLLALHRSYLTPGDSSSGWTAGAAAYYVGYLQPRTFLLKYNENGTITDAVDCALDPLSETKCTLKSFTVEKGIYQTSNFRVQPTESIVRFPNITNLCPFGEVFNATRFASVYAWNRKRISNCVADYSVLYNSASFSTFKCYGVSPTKLNDLCFTNVYADSFVIRGDEVRQIAPGQTGKIADYNYKLPDDFTGCVIAWNSNNLDSKVGGNYNYLYRLFRKSNLKPFERDISTEIYQAGSTPCNGVEGFNCYFPLQSYGFQPTNGVGYQPYRVVVLSFELLHAPATVCGPKKSTNLVKNKCVNFNFNGLTGTGVLTESNKKFLPFQQFGRDIADTTDAVRDPQTLEILDITPCSFGGVSVITPGTNTSNQVAVLYQDVNCTEVPVAIHADQLTPTWRVYSTGSNVFQTRAGCLIGAEHVNNSYECDIPIGAGICASYQTQTNSPRRARSVASQSIIAYTMSLGAENSVAYSNNSIAIPTNFTISVTTEILPVSMTKTSVDCTMYICGDSTECSNLLLQYGSFCTQLNRALTGIAVEQDKNTQEVFAQVKQIYKTPPIKDFGGFNFSQILPDPSKPSKRSFIEDLLFNKVTLADAGFIKQYGDCLGDIAARDLICAQKFNGLTVLPPLLTDEMIAQYTSALLAGTITSGWTFGAGAALQIPFAMQMAYRFNGIGVTQNVLYENQKLIANQFNSAIGKIQDSLSSTASALGKLQDVVNQNAQALNTLVKQLSSNCGAISSVLNDILSRLDKVEAEVQIDRLITCRLQSLQTYVTQQLIRAAEIRASANLAATKMSECVLGQSKRVDFCGKGYHLMSFPQSAPHGVVFLHVTYVPAQEKNFTTAPAICHDGKAHFPREGVFVSNGTHWFVTQRNFYEPQIITTDNTFVSGNCDVLIGIVNNTVYDPLQPELDSGGGGSDIIKLLNEQVNKEMQSSNLYMSMSSWCYTHSLDGAGLFLFDHAAEEYEHAKKLIIFLNENNVPVQLTSISAPEHKFEGLTQIFQKAYEHEQHISESINNIVDHAIKSKDHATFNFLQWYVAEQHEEEVLFKDILDKIELIGNENHGLYLADQYVKGIAKSRKS

SEQ ID NO: 9391 - protein, 1315 aa, Artificial Sequence
  SARS-CoV-2/Shenzhen/SZTH-004/2020__EPI_ISL_406595 spike protein (1-1147)(F970C_G999C) Ferritin construct
MFVFLVLLPLVSSQCVNLTTRTQLPPAYTNSFTRGVYYPDKVFRSSVLHSTQDLFLPFFSNVTWFHAIHVSGTNGTKRFDNPVLPFNDGVYFASTEKSNIIRGWIFGTTLDSKTQSLLIVNNATNVVIKVCEFQFCNDPFLGVYYHKNNKSWMESEFRVYSSANNCTFEYVSQPFLMDLEGKQGNFKNLREFVFKNIDGYFKIYSKHTPINLVRDLPQGFSALEPLVDLPIGINITRFQTLLALHRSYLTPGDSSSGWTAGAAAYYVGYLQPRTFLLKYNENGTITDAVDCALDPLSETKCTLKSFTVEKGIYQTSNFRVQPTESIVRFPNITNLCPFGEVFNATRFASVYAWDRKRISNCVAYYSVLYNSASFSTFKCYGVSPTKLNDLCFTNVYADSFVIRGDEVRQIAPGQTGKIADYNYKLPDDFTGCVIAWNSNNLDSKVGGNYNYLYRLFRKSNLKPFERDISTEIYQAGSTPCNGVEGFNCYFPLQSYGFQPTNGVGYQPYRVVVLSFELLHAPATVCGPKKSTNLVKNKCVNFNFNGLTGTGVLTESNKKFLPFQQFGRDIADTTDAVRDPQTLEILDITPCSFGGVSVITPGTNTSNQVAVLYQDVNCTEVPVAIHADQLTPTWRVYSTGSNVFQTRAGCLIGAEHVNNSYECDIPIGAGICASYQTQTNSPRRARSVASQSIIAYTMSLGAENSVAYSNNSIAIPTNFTISVTTEILPVSMTKTSVDCTMYICGDSTECSNLLLQYGSFCTQLNRALTGIAVEQDKNTQEVFAQVKQIYKTPPIKDFGGFNFSQILPDPSKPSKRSFIEDLLFNKVTLADAGFIKQYGDCLGDIAARDLICAQKFNGLTVLPPLLTDEMIAQYTSALLAGTITSGWTFGAGAALQIPFAMQMAYRFNGIGVTQNVLYENQKLIANQFNSAIGKIQDSLSSTASALGKLQDVVNQNAQALNTLVKQLSSNCGAISSVLNDILSRLDKVEAEVQIDRLITCRLQSLQTYVTQQLIRAAEIRASANLAATKMSECVLGQSKRVDFCGKGYHLMSFPQSAPHGVVFLHVTYVPAQEKNFTTAPAICHDGKAHFPREGVFVSNGTHWFVTQRNFYEPQIITTDNTFVSGNCDVVIGIVNNTVYDPLQPELDSGGGGSDIIKLLNEQVNKEMQSSNLYMSMSSWCYTHSLDGAGLFLFDHAAEEYEHAKKLIIFLNENNVPVQLTSISAPEHKFEGLTQIFQKAYEHEQHISESINNIVDHAIKSKDHATFNFLQWYVAEQHEEEVLFKDILDKIELIGNENHGLYLADQYVKGIAKSRKS

SEQ ID NO: 9392 - protein, 1315 aa, Artificial Sequence
  SARS-CoV-2/France/IDF0372/2020__EPI_ISL_406596 spike protein (1-1147)(F970C_G999C) Ferritin construct
MFVFLVLLPLVSSQCVNLTTRTQLPPAYTNSFTRGVYYPDKVFRSSVLHSTQDLFLPFFSNVTWFHAIHVSGTNGTKRFDNPVLPFNDGVYFASTEKSNIIRGWIFGTTLDSKTQSLLIVNNATNVVIKVCEFQFCNDPFLGVYYHKNNKSWMESEFRVYSSANNCTFEYVSQPFLMDLEGKQGNFKNLREFVFKNIDGYFKIYSKHTPINLVRDLPQGFSALEPLVDLPIGINITRFQTLLALHRSYLTPGDSSSGWTAGAAAYYVGYLQPRTFLLKYNENGTITDAVDCALDPLSETKCTLKSFTVEKGIYQTSNFRVQPTESIVRFPNITNLCPFGEVFNATRFASVYAWNRKRISNCVADYSFLYNSASFSTFKCYGVSPTKLNDLCFTNVYADSFVIRGDEVRQIAPGQTGKIADYNYKLPDDFTGCVIAWNSNNLDSKVGGNYNYLYRLFRKSNLKPFERDISTEIYQAGSTPCNGVEGFNCYFPLQSYGFQPTNGVGYQPYRVVVLSFELLHAPATVCGPKKSTNLVKNKCVNFNFNGLTGTGVLTESNKKFLPFQQFGRDIADTTDAVRDPQTLEILDITPCSFGGVSVITPGTNTSNQVAVLYQDVNCTEVPVAIHADQLTPTWRVYSTGSNVFQTRAGCLIGAEHVNNSYECDIPIGAGICASYQTQTNSPRRARSVASQSIIAYTMSLGAENSVAYSNNSIAIPTNFTISVTTEILPVSMTKTSVDCTMYICGDSTECSNLLLQYGSFCTQLNRALTGIAVEQDKNTQEVFAQVKQIYKTPPIKDFGGFNFSQILPDPSKPSKRSFIEDLLFNKVTLADAGFIKQYGDCLGDIAARDLICAQKFNGLTVLPPLLTDEMIAQYTSALLAGTITSGWTFGAGAALQIPFAMQMAYRFNGIGVTQNVLYENQKLIANQFNSAIGKIQDSLSSTASALGKLQDVVNQNAQALNTLVKQLSSNCGAISSVLNDILSRLDKVEAEVQIDRLITCRLQSLQTYVTQQLIRAAEIRASANLAATKMSECVLGQSKRVDFCGKGYHLMSFPQSAPHGVVFLHVTYVPAQEKNFTTAPAICHDGKAHFPREGVFVSNGTHWFVTQRNFYEPQIITTDNTFVSGNCDVVIGIVNNTVYDPLQPELDSGGGGSDIIKLLNEQVNKEMQSSNLYMSMSSWCYTHSLDGAGLFLFDHAAEEYEHAKKLIIFLNENNVPVQLTSISAPEHKFEGLTQIFQKAYEHEQHISESINNIVDHAIKSKDHATFNFLQWYVAEQHEEEVLFKDILDKIELIGNENHGLYLADQYVKGIAKSRKS

SEQ ID NO: 9393 - protein, 1315 aa, Artificial Sequence
  SARS-CoV-2/Australia/VIC01/2020__EPI_ISL_406844 spike protein (1-1147)(F970C_G999C) Ferritin construct
MFVFLVLLPLVSSQCVNLTTRTQLPPAYTNSFTRGVYYPDKVFRSSVLHSTQDLFLPFFSNVTWFHAIHVSGTNGTKRFDNPVLPFNDGVYFASTEKSNIIRGWIFGTTLDSKTQSLLIVNNATNVVIKVCEFQFCNDPFLGVYYHKNNKSWMESEFRVYSSANNCTFEYVSQPFLMDLEGKQGNFKNLREFVFKNIDGYFKIYSKHTPINLVRDLPQGFSALEPLVDLPIGINITRFQTLLALHRRYLTPGDSSSGWTAGAAAYYVGYLQPRTFLLKYNENGTITDAVDCALDPLSETKCTLKSFTVEKGIYQTSNFRVQPTESIVRFPNITNLCPFGEVFNATRFASVYAWNRKRISNCVADYSVLYNSASFSTFKCYGVSPTKLNDLCFTNVYADSFVIRGDEVRQIAPGQTGKIADYNYKLPDDFTGCVIAWNSNNLDSKVGGNYNYLYRLFRKSNLKPFERDISTEIYQAGSTPCNGVEGFNCYFPLQSYGFQPTNGVGYQPYRVVVLSFELLHAPATVCGPKKSTNLVKNKCVNFNFNGLTGTGVLTESNKKFLPFQQFGRDIADTTDAVRDPQTLEILDITPCSFGGVSVITPGTNTSNQVAVLYQDVNCTEVPVAIHADQLTPTWRVYSTGSNVFQTRAGCLIGAEHVNNSYECDIPIGAGICASYQTQTNSPRRARSVASQSIIAYTMSLGAENSVAYSNNSIAIPTNFTISVTTEILPVSMTKTSVDCTMYICGDSTECSNLLLQYGSFCTQLNRALTGIAVEQDKNTQEVFAQVKQIYKTPPIKDFGGFNFSQILPDPSKPSKRSFIEDLLFNKVTLADAGFIKQYGDCLGDIAARDLICAQKFNGLTVLPPLLTDEMIAQYTSALLAGTITSGWTFGAGAALQIPFAMQMAYRFNGIGVTQNVLYENQKLIANQFNSAIGKIQDSLSSTASALGKLQDVVNQNAQALNTLVKQLSSNCGAISSVLNDILSRLDKVEAEVQIDRLITCRLQSLQTYVTQQLIRAAEIRASANLAATKMSECVLGQSKRVDFCGKGYHLMSFPQSAPHGVVFLHVTYVPAQEKNFTTAPAICHDGKAHFPREGVFVSNGTHWFVTQRNFYEPQIITTDNTFVSGNCDVVIGIVNNTVYDPLQPELDSGGGGSDIIKLLNEQVNKEMQSSNLYMSMSSWCYTHSLDGAGLFLFDHAAEEYEHAKKLIIFLNENNVPVQLTSISAPEHKFEGLTQIFQKAYEHEQHISESINNIVDHAIKSKDHATFNFLQWYVAEQHEEEVLFKDILDKIELIGNENHGLYLADQYVKGIAKSRKS

SEQ ID NO: 9394 - protein, 1315 aa, Artificial Sequence
  SARS-CoV-2/Germany/BavPat1/2020__EPI_ISL_406862 spike protein (1-1147)(F970C_G999C) Ferritin construct
MFVFLVLLPLVSSQCVNLTTRTQLPPAYTNSFTRGVYYPDKVFRSSVLHSTQDLFLPFFSNVTWFHAIHVSGTNGTKRFDNPVLPFNDGVYFASTEKSNIIRGWIFGTTLDSKTQSLLIVNNATNVVIKVCEFQFCNDPFLGVYYHKNNKSWMESEFRVYSSANNCTFEYVSQPFLMDLEGKQGNFKNLREFVFKNIDGYFKIYSKHTPINLVRDLPQGFSALEPLVDLPIGINITRFQTLLALHRSYLTPGDSSSGWTAGAAAYYVGYLQPRTFLLKYNENGTITDAVDCALDPLSETKCTLKSFTVEKGIYQTSNFRVQPTESIVRFPNITNLCPFGEVFNATRFASVYAWNRKRISNCVADYSVLYNSASFSTFKCYGVSPTKLNDLCFTNVYADSFVIRGDEVRQIAPGQTGKIADYNYKLPDDFTGCVIAWNSNNLDSKVGGNYNYLYRLFRKSNLKPFERDISTEIYQAGSTPCNGVEGFNCYFPLQSYGFQPTNGVGYQPYRVVVLSFELLHAPATVCGPKKSTNLVKNKCVNFNFNGLTGTGVLTESNKKFLPFQQFGRDIADTTDAVRDPQTLEILDITPCSFGGVSVITPGTNTSNQVAVLYQGVNCTEVPVAIHADQLTPTWRVYSTGSNVFQTRAGCLIGAEHVNNSYECDIPIGAGICASYQTQTNSPRRARSVASQSIIAYTMSLGAENSVAYSNNSIAIPTNFTISVTTEILPVSMTKTSVDCTMYICGDSTECSNLLLQYGSFCTQLNRALTGIAVEQDKNTQEVFAQVKQIYKTPPIKDFGGFNFSQILPDPSKPSKRSFIEDLLFNKVTLADAGFIKQYGDCLGDIAARDLICAQKFNGLTVLPPLLTDEMIAQYTSALLAGTITSGWTFGAGAALQIPFAMQMAYRFNGIGVTQNVLYENQKLIANQFNSAIGKIQDSLSSTASALGKLQDVVNQNAQALNTLVKQLSSNCGAISSVLNDILSRLDKVEAEVQIDRLITCRLQSLQTYVTQQLIRAAEIRASANLAATKMSECVLGQSKRVDFCGKGYHLMSFPQSAPHGVVFLHVTYVPAQEKNFTTAPAICHDGKAHFPREGVFVSNGTHWFVTQRNFYEPQIITTDNTFVSGNCDVVIGIVNNTVYDPLQPELDSGGGGSDIIKLLNEQVNKEMQSSNLYMSMSSWCYTHSLDGAGLFLFDHAAEEYEHAKKLIIFLNENNVPVQLTSISAPEHKFEGLTQIFQKAYEHEQHISESINNIVDHAIKSKDHATFNFLQWYVAEQHEEEVLFKDILDKIELIGNENHGLYLADQYVKGIAKSRKS

SEQ ID NO: 9395 - protein, 1315 aa, Artificial Sequence
  SARS-CoV-2/Wuhan/HBCDC-HB-02/2020__EPI_ISL_412978 spike protein (1-1147)(F970C_G999C) Ferritin construct
MFVFLVLLPLVSSQCVNLTTRTQLPPAYTNSFTRGVYYPDKVFRSSVLHSTQDLFLPFFSNVTWFHAIHVSGTNGTKRFDNPVLPFNDGVYFASTEKSNIIRGWIFGTTLDSKTQSLLIVNNATNVVIKVCEFQFCNDPFLGVYYHKNNKSWMESEFRVYSSANNCTFEYVSQPFLMDLEGKQGNFKNLREFVFKNIDGYFKIYSKHTPINLVRDLPQGFSALEPLVDLPIGINITRFQTLLALHRSYLTPGDSSSGWTAGAAAYYVGYLQPRTFLLKYNENGTITDAVDCALDPLSETKCTLKSFTVEKGIYQTSNFRVQPTESIVRFPNITNLCPFGEVFNATRFASVYAWNRKRISNCVADYSVLYNSASFSTFKCYGVSPTKLNDLCFTNVYADSFVIRGDEVRQIAPGQTGKIADYNYKLPDDFTGCVIAWNSNNLDSKVGGNYNYLYRLFRKSNLKPFERDISTEIYQAGSTPCNGVEGFNCYFPLQSYGFQPTNGVGYQPYRVVVLSFELLHAPATVCGPKKSTNLVKNKCVNFNFNGLTGTGVLTESNKKFLPFQQFGRDIADTTDAVRDPQTLEILDITPCSFGGVSVITPGTNTSNQVAVLYQDVNCTEVPVAIHADQLTPTWRVYSTGSNVFQTRAGCLIGAEHVNNSYECDIPIGAGICASYQTQTNSPRRARSVASQSIIAYTMSLGAENSVAYSNNSIAIPTNFTISVTTEILPVSMTKTSVDCTMYICGDSTECSNFLLQYGSFCTQLNRALTGIAVEQDKNTQEVFAQVKQIYKTPPIKDFGGFNFSQILPDPSKPSKRSFIEDLLFNKVTLADAGFIKQYGDCLGDIAARDLICAQKFNGLTVLPPLLTDEMIAQYTSALLAGTITSGWTFGAGAALQIPFAMQMAYRFNGIGVTQNVLYENQKLIANQFNSAIGKIQDSLSSTASALGKLQDVVNQNAQALNTLVKQLSSNCGAISSVLNDILSRLDKVEAEVQIDRLITCRLQSLQTYVTQQLIRAAEIRASANLAATKMSECVLGQSKRVDFCGKGYHLMSFPQSAPHGVVFLHVTYVPAQEKNFTTAPAICHDGKAHFPREGVFVSNGTHWFVTQRNFYEPQIITTDNTFVSGNCDVVIGIVNNTVYDPLQPELDSGGGGSDIIKLLNEQVNKEMQSSNLYMSMSSWCYTHSLDGAGLFLFDHAAEEYEHAKKLIIFLNENNVPVQLTSISAPEHKFEGLTQIFQKAYEHEQHISESINNIVDHAIKSKDHATFNFLQWYVAEQHEEEVLFKDILDKIELIGNENHGLYLADQYVKGIAKSRKS

SEQ ID NO: 9396 - protein, 1315 aa, Artificial Sequence
  SARS-CoV-2/Australia/QLD02/2020__EPI_ISL_407896 spike protein (1-1147)(F970C_G999C) Ferritin construct
MFVFLVLLPLVSSQCVNLTTRTQLPPAYTNSFTRGVYYPDKVFRSSVLHSTQDLFLPFFSNVTWFHAIHVSGTNGTKRFDNPVLPFNDGVYFASTEKSNIIRGWIFGTTLDSKTQSLLIVNNATNVVIKVCEFQFCNDPFLGVYYHKNNKSWMESEFRVYSSANNCTFEYVSQPFLMDLEGKQGNFKNLREFVFKNIDGYFKIYSKHTPINLVRDLPQGFSALEPLVDLPIGINITRFQTLLALHRSYLTPGDSSSGWTAGAAAYYVGYLQPRTFLLKYNENGTITDAVDCALDPLSETKCTLKSFTVEKGIYQTSNFRVQPTESIVRFPNITNLCPFGEVFNATRFASVYAWNRKRISNCVADYSVLYNSASFSTFKCYGVSPTKLNDLCFTNVYADSFVIRGDEVRQIAPGQTGKIADYNYKLPDDFTGCVIAWNSNNLDSKVGGNYNYLYRLFRKSNLKPFERDISTEIYQAGSTPCNGVEGFNCYFPLQSYGFQPTNGVGYQPYRVVVLSFELLHAPATVCGPKKSTNLVKNKCVNFNFNGLTGTGVLTESNKKFLPFQQFGRDIADTTDAVRDPQTLEILDITPCSFGGVSVITPGTNTSNQVAVLYQDVNCTEVPVAIHADQLTPTWRVYSTGSNVFQTRAGCLIGAEHVNNSYECDIPIGAGICASYQTQTNSPRRARSVASQSIIAYTMSLGAENSVAYSNNSIAIPTNFTISVTTEILPVSMTKTSVDCTMYICGDSTECSNLLLQYGSFCTQLNRALTGIAVEQDKNTQEVFAQVKQIYKTPPIKDFGGFNFSQILPDPSKPSKRSFIEDLLFNKVTLADAGFIKQYGDCLGDIAARDLICAQKFNGLTVLPPLLTDEMIAQYTSALLAGTITSGWTFGAGAALQIPFAMQMAYRFNGIGVTQNVLYENQKLIANQFNSAIGKIQDSLSSTASALGKLQDVVNQNAQALNTLVKQLSSNCGAISSVLNDILSRLDKVEAEVQIDRLITCRLQSLQTYVTQQLIRAAEIRASANLAATKMSECVLGQSKRVDFCGKGYHLMSFPQSAPHGVVFLHVTYVPAQEKNFTTAPAICHDGKAHFPREGVFVSNGTHWFVTQRNFYEPQIITTDNTFVSGNCDVVIGIVNNTVYDPLQLELDSGGGGSDIIKLLNEQVNKEMQSSNLYMSMSSWCYTHSLDGAGLFLFDHAAEEYEHAKKLIIFLNENNVPVQLTSISAPEHKFEGLTQIFQKAYEHEQHISESINNIVDHAIKSKDHATFNFLQWYVAEQHEEEVLFKDILDKIELIGNENHGLYLADQYVKGIAKSRKS

SEQ ID NO: 9397 - protein, 1315 aa, Artificial Sequence
  SARS-CoV-2/India/1-31/2020__EPI_ISL_413523 spike protein (1-1147)(F970C_G999C) Ferritin construct
MFVFLVLLPLVSSQCVNLTTRTQLPPAYTNSFTRGVYYPDKVFRSSVLHSTQDLFLPFFSNVTWFHAIHVSGTNGTKRFDNPVLPFNDGVYFASTEKSNIIRGWIFGTTLDSKTQSLLIVNNATNVVIKVCEFQFCNDPFLGVYYHKNNKSWMESEFRVYSSANNCTFEYVSQPFLMDLEGKQGNFKNLREFVFKNIDGYFKIYSKHTPINLVRDLPQGFSALEPLVDLPIGINITRFQTLLALHRSYLTPGDSSSGWTAGAAAYYVGYLQPRTFLLKYNENGTITDAVDCALDPLSETKCTLKSFTVEKGIYQTSNFRVQPTESIVRFPNITNLCPFGEVFNATRFASVYAWNRKRISNCVADYSVLYNSASFSTFKCYGVSPTKLNDLCFTNVYADSFVIRGDEVRQIAPGQTGKIADYNYKLPDDFTGCVIAWNSNNLDSKVGGNYNYLYRLFRKSNLKPFERDISTEIYQAGSTPCNGVEGFNCYFPLQSYGFQPTNGVGYQPYRVVVLSFELLHAPATVCGPKKSTNLVKNKCVNFNFNGLTGTGVLTESNKKFLPFQQFGRDIADTTDAVRDPQTLEILDITPCSFGGVSVITPGTNTSNQVAVLYQDVNCTEVPVAIHADQLTPTWRVYSTGSNVFQTRAGCLIGAEHVNNSYECDIPIGAGICASYQTQTNSPRRARSVASQSIIAYTMSLGAENSVAYSNNSIAIPTNFTISVTTEILPVSMTKTSVDCTMYICGDSTECSNLLLQYGSFCTQLNRALTGIAVEQDKNTQEVFAQVKQIYKTPPIKDFGGFNFSQILPDPSKPSKRSFIEDLLFNKVTLADAGFIKQYGDCLGDIAARDLICAQKFNGLTVLPPLLTDEMIAQYTSALLAGTITSGWTFGAGAALQIPFAMQMAYRFNGIGVTQNVLYENQKLIANQFNSVIGKIQDSLSSTASALGKLQDVVNQNAQALNTLVKQLSSNCGAISSVLNDILSRLDKVEAEVQIDRLITCRLQSLQTYVTQQLIRAAEIRASANLAATKMSECVLGQSKRVDFCGKGYHLMSFPQSAPHGVVFLHVTYVPAQEKNFTTAPAICHDGKAHFPREGVFVSNGTHWFVTQRNFYEPQIITTDNTFVSGNCDVVIGIVNNTVYDPLQPELDSGGGGSDIIKLLNEQVNKEMQSSNLYMSMSSWCYTHSLDGAGLFLFDHAAEEYEHAKKLIIFLNENNVPVQLTSISAPEHKFEGLTQIFQKAYEHEQHISESINNIVDHAIKSKDHATFNFLQWYVAEQHEEEVLFKDILDKIELIGNENHGLYLADQYVKGIAKSRKS

SEQ ID NO: 9398 - protein, 1315 aa, Artificial Sequence
  SARS-CoV-2/Guangdong/GD2020087-P0008/2020__EPI_ISL_413863 spike protein (1-1147)(F970C_G999C) Ferritin construct
MFVFLVLLPLVSSQCVNLTTRTQLPPAYTNSFTRGVYYPDKVFRSSVLHSTQDLFLPFFSNVTWFHAIHVSGTNGTKRFDNPVLPFNDGVYFASTEKSNIIRGWIFGTTLDSKTQSLLIVNNATNVVIKVCEFQFCNDPFLGVYYHKNNKSWMESEFRVYSSANNCTFEYVSQPFLMDLEGKQGNFKNLREFVFKNIDGYFKIYSKHTPINLVRDLPQGFSALEPLVDLPIGINITRFQTLLALHRSYLTPGDSSSGWTAGAAAYYVGYLQPRTFLLKYNENGTITDAVDCALDPLSETKCTLKSFTVEKGIYQTSNFRVQPTESIVRFPNITNLCPFGEVFNATRFASVYAWNRKRISNCVADYSVLYNSASFSTFKCYGVSPTKLNDLCFTNVYADSFVIRGDEVREIAPGQTGKIADYNYKLPDDFTGCVIAWNSNNLDSKVGGNYNYLYRLFRKSNLKPFERDISTEIYQAGSTPCNGVEGFNCYFPLQSYGFQPTNGVGYQPYRVVVLSFELLHAPATVCGPKKSTNLVKNKCVNFNFNGLTGTGVLTESNKKFLPFQQFGRDIADTTDAVRDPQTLEILDITPCSFGGVSVITPGTNTSNQVAVLYQDVNCTEVPVAIHADQLTPTWRVYSTGSNVFQTRAGCLIGAEHVNNSYECDIPIGAGICASYQTQTNSPRRARSVASQSIIAYTMSLGAENSVAYSNNSIAIPTNFTISVTTEILPVSMTKTSVDCTMYICGDSTECSNLLLQYGSFCTQLNRALTGIAVEQDKNTQEVFAQVKQIYKTPPIKDFGGFNFSQILPDPSKPSKRSFIEDLLFNKVTLADAGFIKQYGDCLGDIAARDLICAQKFNGLTVLPPLLTDEMIAQYTSALLAGTITSGWTFGAGAALQIPFAMQMAYRFNGIGVTQNVLYENQKLIANQFNSAIGKIQDSLSSTASALGKLQDVVNQNAQALNTLVKQLSSNCGAISSVLNDILSRLDKVEAEVQIDRLITCRLQSLQTYVTQQLIRAAEIRASANLAATKMSECVLGQSKRVDFCGKGYHLMSFPQSAPHGVVFLHVTYVPAQEKNFTTAPAICHDGKAHFPREGVFVSNGTHWFVTQRNFYEPQIITTDNTFVSGNCDVVIGIVNNTVYDPLQPELDSGGGGSDIIKLLNEQVNKEMQSSNLYMSMSSWCYTHSLDGAGLFLFDHAAEEYEHAKKLIIFLNENNVPVQLTSISAPEHKFEGLTQIFQKAYEHEQHISESINNIVDHAIKSKDHATFNFLQWYVAEQHEEEVLFKDILDKIELIGNENHGLYLADQYVKGIAKSRKS

SEQ ID NO: 9399 - protein, 1315 aa, Artificial Sequence
  SARS-CoV-2/Sweden/01/2020__EPI_ISL_411951 spike protein (1-1147)(F970C_G999C) Ferritin construct
MFVFLVLLPLVSSQCVNLTTRTQLPPAYTNSFTRGVYYPDKVFRSSVLHSTQDLFLPFFSNVTWFHAIHVSGTNGTKRFDNPVLPFNDGVYFASTEKSNIIRGWIFGTTLDSKTQSLLIVNNATNVVIKVCEFQFCNDPFLGVYYHKNNKSWMESEFRVYSSANNCTFEYVSQPFLMDLEGKQGNFKNLREFVFKNIDGYFKIYSKHTPINLVRDLPQGFSALEPLVDLPIGINITRFQTLLALHRSYLTPGDSSSGWTAGAAAYYVGYLQPRTFLLKYNENGTITDAVDCALDPLSETKCTLKSFTVEKGIYQTSNFRVQPTESIVRFPNITNLCPFGEVFNATRFASVYAWNRKRISNCVADYSVLYNSASFSTFKCYGVSPTKLNDLCFTNVYADSFVIRGDEVRQIAPGQTGKIADYNYKLPDDFTGCVIAWNSNNLDSKVGGNYNYLYRLFRKSNLKPFERDISTEIYQAGSTPCNGVEGFNCYFPLQSYGFQPTNGVGYQPYRVVVLSFELLHAPATVCGPKKSTNLVKNKCVNFNFNGLTGTGVLTESNKKFLPFQQFGRDIADTTDAVRDPQTLEILDITPCSFGGVSVITPGTNTSNQVAVLYQDVNCTEVPVAIHADQLTPTWRVYSTGSNVFQTRAGCLIGAEHVNNSYECDIPIGAGICASYQTQTNSPRRARSVASQSIIAYTMSLGAENSVAYSNNSIAIPTNFTISVTTEILPVSMTKTSVDCTMYICGDSTECSNLLLQYGSFCTQLNRALTGIAVEQDKNTQEVFAQVKQIYKTPPIKDCGGFNFSQILPDPSKPSKRSFIEDLLFNKVTLADAGFIKQYGDCLGDIAARDLICAQKFNGLTVLPPLLTDEMIAQYTSALLAGTITSGWTFGAGAALQIPFAMQMAYRFNGIGVTQNVLYENQKLIANQFNSAIGKIQDSLSSTASALGKLQDVVNQNAQALNTLVKQLSSNCGAISSVLNDILSRLDKVEAEVQIDRLITCRLQSLQTYVTQQLIRAAEIRASANLAATKMSECVLGQSKRVDFCGKGYHLMSFPQSAPHGVVFLHVTYVPAQEKNFTTAPAICHDGKAHFPREGVFVSNGTHWFVTQRNFYEPQIITTDNTFVSGNCDVVIGIVNNTVYDPLQPELDSGGGGSDIIKLLNEQVNKEMQSSNLYMSMSSWCYTHSLDGAGLFLFDHAAEEYEHAKKLIIFLNENNVPVQLTSISAPEHKFEGLTQIFQKAYEHEQHISESINNIVDHAIKSKDHATFNFLQWYVAEQHEEEVLFKDILDKIELIGNENHGLYLADQYVKGIAKSRKS

SEQ ID NO: 9400 - protein, 1315 aa, Artificial Sequence
  SARS-CoV-2/Tianmen/HBCDC-HB-07/2020__EPI_ISL_412983 spike protein (1-1147)(F970C_G999C) Ferritin construct
MFVFLVLLPLVSSQCVNLTTRTQLPPAYTNSFTRGVYYPDKVFRSSVLHSTQDLFLPFFSNVTWFHAIHVSGTNGTKRFDNPVLPFNDGVYFASTEKSNIIRGWIFGTTLDSKTQSLLIVNNATNVVIKVCEFQFCNDPFLGVYYHKNNKSWMESEFRVYSSANNCTFEYVSQPFLMDLEGKQGNFKNLREFVFKNIDGYFKIYSKHTPINLVRDLPQGFSALEPLVDLPIGINITRFQTLLALHRSYLTPGDSSSGWTAGAAAYYVGYLQPRTFLLKYNENGTITDAVDCALDPLSETKCTLKSFTVEKGIYQTSNFRVQPTESIVRFPNITNLCPFGEVFNATRFASVYAWNRKRISNCVADYSVLYNSASFSTFKCYGVSPTKLNDLCFTNVYADSFVIRGDEVRQIAPGQTGKIADYNYKLPDDFTGCVIAWNSNNLDSKVGGNYNYLYRLFRKSNLKPFERDISTEIYQAGSTPCNGVEGFNCYFPLQSYGFQPTNGVGYQPYRVVVLSFELLHAPATVCGPKKSTNLVKNKCVNFNFNGLTGTGVLTESNKKFLPFQQFGRDIADTTDAVRDPQTLEILDITPCSFGGVSVITPGTNTSNQVAVLYQDLNCTEVPVAIHADQLTPTWRVYSTGSNVFQTRAGCLIGAEHVNNSYECDIPIGAGICASYQTQTNSPRRARSVASQSIIAYTMSLGAENSVAYSNNSIAIPTNFTISVTTEILPVSMTKTSVDCTMYICGDSTECSNLLLQYGSFCTQLNRALTGIAVEQDKNTQEVFAQVKQIYKTPPIKDFGGFNFSQILPDPSKPSKRSFIEDLLFNKVTLADAGFIKQYGDCLGDIAARDLICAQKFNGLTVLPPLLTDEMIAQYTSALLAGTITSGWTFGAGAALQIPFAMQMAYRFNGIGVTQNVLYENQKLIANQFNSAIGKIQDSLSSTASALGKLQDVVNQNAQALNTLVKQLSSNCGAISSVLNDILSRLDKVEAEVQIDRLITCRLQSLQTYVTQQLIRAAEIRASANLAATKMSECVLGQSKRVDFCGKGYHLMSFPQSAPHGVVFLHVTYVPAQEKNFTTAPAICHDGKAHFPREGVFVSNGTHWFVTQRNFYEPQIITTDNTFVSGNCDVVIGIVNNTVYDPLQPELDSGGGGSDIIKLLNEQVNKEMQSSNLYMSMSSWCYTHSLDGAGLFLFDHAAEEYEHAKKLIIFLNENNVPVQLTSISAPEHKFEGLTQIFQKAYEHEQHISESINNIVDHAIKSKDHATFNFLQWYVAEQHEEEVLFKDILDKIELIGNENHGLYLADQYVKGIAKSRKS

SEQ ID NO: 9401 - protein, 1315 aa, Artificial Sequence
  SARS-CoV-2/Hong Kong/case42_VM20002493/2020__EPI_ISL_414527 spike protein (1-1147)(F970C_G999C) Ferritin construct
MFVFLVLLPLVSSQCVNLTTRTQLPPAYTNSFTRGVYYPDKVFRSSVLHSTQDLFLPFFSNVTWFHAIHVSGTNGTKRFDNPVLPFNDGVYFASTEKSNIIRGWIFGTTLDSKTQSLLIVNNATNVVIKVCEFQFCNDPFLGVYYHKNNKSWMESEFRVYSSANNCTFEYVSQPFLMDLEGKQGNFKNLREFVFKNIDGYFKIYSKHTPINLVRDLPQGFSALEPLVDLPIGINITRFQTLLALHRSYLTPGDSSSGWTAGAAAYYVGYLQPRTFLLKYNENGTITDAVDCALDPLSETKCTLKSFTVEKGIYQTSNFRVQPTESIVRFPNITNLCPFGEVFNATRFASVYAWNRKRISNCVADYSVLYNSASFSTFKCYGVSPTKLNDLCFTNVYADSFVIRGDEVRQIAPGQTGKIADYNYKLPDDFTGCVIAWNSNNLDSKVGGNYNYLYRLFRKSNLKPFERDISTEIYQAGSTPCNGVEGFNCYFPLQSYGFQPTNGVGYQPYRVVVLSFELLHAPATVCGPKKSTNLVKNKCVNFNFNGLTGTGVLTESNKKFLPFQQFGRDIADTTDAVRDPQTLEILDITPCSFGGVSVITPGTNTSNQVAVLYQDVNCTEVPVAIHADQLTPTWRVYSTGSNVFQTRAGCLIGAEHVNNSYECDIPIGAGICASYQTQTNSPRRARSVASQSIIAYTMSLGAENSVAYSNNSIAIPTNFAISVTTEILPVSMTKTSVDCTMYICGDSTECSNLLLQYGSFCTQLNRALTGIAVEQDKNTQEVFAQVKQIYKTPPIKDFGGFNFSQILPDPSKPSKRSFIEDLLFNKVTLADAGFIKQYGDCLGDIAARDLICAQKFNGLTVLPPLLTDEMIAQYTSALLAGTITSGWTFGAGAALQIPFAMQMAYRFNGIGVTQNVLYENQKLIANQFNSAIGKIQDSLSSTASALGKLQDVVNQNAQALNTLVKQLSSNCGAISSVLNDILSRLDKVEAEVQIDRLITCRLQSLQTYVTQQLIRAAEIRASANLAATKMSECVLGQSKRVDFCGKGYHLMSFPQSAPHGVVFLHVTYVPAQEKNFTTAPAICHDGKAHFPREGVFVSNGTHWFVTQRNFYEPQIITTDNTFVSGNCDVVIGIVNNTVYDPLQPELDSGGGGSDIIKLLNEQVNKEMQSSNLYMSMSSWCYTHSLDGAGLFLFDHAAEEYEHAKKLIIFLNENNVPVQLTSISAPEHKFEGLTQIFQKAYEHEQHISESINNIVDHAIKSKDHATFNFLQWYVAEQHEEEVLFKDILDKIELIGNENHGLYLADQYVKGIAKSRKS

SEQ ID NO: 9402 - protein, 1315 aa, Artificial Sequence
  SARS-CoV-2/USA/CruiseA-23/2020__EPI_ISL_414482 spike protein (1-1147)(F970C_G999C) Ferritin construct
MFVFLVLLPLVSSQCVNLTTRTQLPPAYTNSFTRGVYYPDKVFRSSVLHSTQDLFLPFFSNVTWFHAIHVSGTNGTKRFDNPVLPFNDGVYFASTEKSNIIRGWIFGTTLDSKTQSLLIVNNATNVVIKVCEFQFCNDPFLGVYYHKNNKSWMESEFRVYSSANNCTFEYVSQPFLMDLEVKQGNFKNLREFVFKNIDGYFKIYSKHTPINLVRDLPQGFSALEPLVDLPIGINITRFQTLLALHRSYLTPGDSSSGWTAGAAAYYVGYLQPRTFLLKYNENGTITDAVDCALDPLSETKCTLKSFTVEKGIYQTSNFRVQPTESIVRFPNITNLCPFGEVFNATRFASVYAWNRKRISNCVADYSVLYNSASFSTFKCYGVSPTKLNDLCFTNVYADSFVIRGDEVRQIAPGQTGKIADYNYKLPDDFTGCVIAWNSNNLDSKVGGNYNYLYRLFRKSNLKPFERDISTEIYQAGSTPCNGVEGFNCYFPLQSYGFQPTNGVGYQPYRVVVLSFELLHAPATVCGPKKSTNLVKNKCVNFNFNGLTGTGVLTESNKKFLPFQQFGRDIADTTDAVRDPQTLEILDITPCSFGGVSVITPGTNTSNQVAVLYQDVNCTEVPVAIHADQLTPTWRVYSTGSNVFQTRAGCLIGAEHVNNSYECDIPIGAGICASYQTQTNSPRRARSVASQSIIAYTMSLGAENSVAYSNNSIAIPTNFTISVTTEILPVSMTKTSVDCTMYICGDSTECSNLLLQYGSFCTQLNRALTGIAVEQDKNTQEVFAQVKQIYKTPPIKDFGGFNFSQILPDPSKPSKRSFIEDLLFNKVTLADAGFIKQYGDCLGDIAARDLICAQKFNGLTVLPPLLTDEMIAQYTSALLAGTITSGWTFGAGAALQIPFAMQMAYRFNGIGVTQNVLYENQKLIANQFNSAIGKIQDSLSSTASALGKLQDVVNQNAQALNTLVKQLSSNCGAISSVLNDILSRLDKVEAEVQIDRLITCRLQSLQTYVTQQLIRAAEIRASANLAATKMSECVLGQSKRVDFCGKGYHLMSFPQSAPHGVVFLHVTYVPAQEKNFTTAPAICHDGKAHFPREGVFVSNGTHWFVTQRNFYEPQIITTDNTFVSGNCDVVIGIVNNTVYDPLQPELDSGGGGSDIIKLLNEQVNKEMQSSNLYMSMSSWCYTHSLDGAGLFLFDHAAEEYEHAKKLIIFLNENNVPVQLTSISAPEHKFEGLTQIFQKAYEHEQHISESINNIVDHAIKSKDHATFNFLQWYVAEQHEEEVLFKDILDKIELIGNENHGLYLADQYVKGIAKSRKS

SEQ ID NO: 9403 - protein, 1315 aa, Artificial Sequence
  SARS-CoV-2/Hong Kong/case85_VM20002868/2020__EPI_ISL_414519 spike protein (1-1147)(F970C_G999C) Ferritin construct
MFVFLVLVPLVSSQCVNLTTRTQLPPAYTNSFTRGVYYPDKVFRSSVLHSTQDLFLPFFSNVTWFHAIHVSGTNGTKRFDNPVLPFNDGVYFASTEKSNIIRGWIFGTTLDSKTQSLLIVNNATNVVIKVCEFQFCNDPFLGVYYHKNNKSWMESEFRVYSSANNCTFEYVSQPFLMDLEGKQGNFKNLREFVFKNIDGYFKIYSKHTPINLVRDLPQGFSALEPLVDLPIGINITRFQTLLALHRSYLTPGDSSSGWTAGAAAYYVGYLQPRTFLLKYNENGTITDAVDCALDPLSETKCTLKSFTVEKGIYQTSNFRVQPTESIVRFPNITNLCPFGEVFNATRFASVYAWNRKRISNCVADYSVLYNSASFSTFKCYGVSPTKLNDLCFTNVYADSFVIRGDEVRQIAPGQTGKIADYNYKLPDDFTGCVIAWNSNNLDSKVGGNYNYLYRLFRKSNLKPFERDISTEIYQAGSTPCNGVEGFNCYFPLQSYGFQPTNGVGYQPYRVVVLSFELLHAPATVCGPKKSTNLVKNKCVNFNFNGLTGTGVLTESNKKFLPFQQFGRDIADTTDAVRDPQTLEILDITPCSFGGVSVITPGTNTSNQVAVLYQDVNCTEVPVAIHADQLTPTWRVYSTGSNVFQTRAGCLIGAEHVNNSYECDIPIGAGICASYQTQTNSPRRARSVASQSIIAYTMSLGAENSVAYSNNSIAIPTNFTISVTTEILPVSMTKTSVDCTMYICGDSTECSNLLLQYGSFCTQLNRALTGIAVEQDKNTQEVFAQVKQIYKTPPIKDFGGFNFSQILPDPSKPSKRSFIEDLLFNKVTLADAGFIKQYGDCLGDIAARDLICAQKFNGLTVLPPLLTDEMIAQYTSALLAGTITSGWTFGAGAALQIPFAMQMAYRFNGIGVTQNVLYENQKLIANQFNSAIGKIQDSLSSTASALGKLQDVVNQNAQALNTLVKQLSSNCGAISSVLNDILSRLDKVEAEVQIDRLITCRLQSLQTYVTQQLIRAAEIRASANLAATKMSECVLGQSKRVDFCGKGYHLMSFPQSAPHGVVFLHVTYVPAQEKNFTTAPAICHDGKAHFPREGVFVSNGTHWFVTQRNFYEPQIITTDNTFVSGNCDVVIGIVNNTVYDPLQPELDSGGGGSDIIKLLNEQVNKEMQSSNLYMSMSSWCYTHSLDGAGLFLFDHAAEEYEHAKKLIIFLNENNVPVQLTSISAPEHKFEGLTQIFQKAYEHEQHISESINNIVDHAIKSKDHATFNFLQWYVAEQHEEEVLFKDILDKIELIGNENHGLYLADQYVKGIAKSRKS

SEQ ID NO: 9404 - protein, 1315 aa, Artificial Sequence; identical to SEQ ID NO: 9394
  SARS-CoV-2/England/200990660/2020__EPI_ISL_414523 spike protein (1-1147)(F970C_G999C) Ferritin construct

SEQ ID NO: 9405 - protein, 1315 aa, Artificial Sequence
  SARS-CoV-2/Australia/NSW09/2020__EPI_ISL_413595 spike protein (1-1147)(F970C_G999C) Ferritin construct
MFVFLVLLPLVSSQCVNLTTRTQLPPAYTNSFTRGVYYPDKVFRSSVLHSTQDLFLPFFSNVTWFHAIHVSGTNGTKRFDNPVLPFNDGVYFASTEKSNIIRGWIFGTTLDSKTQSLLIVNNATNVVIKVCEFQFCNDPFLGVYYHKNNKSWMESEFRVYSSANNCTFEYVSQPFLMDLEGKQGNFKNLREFVFKNIDGYFKIYSKHTPINLVRDLPQGFSALEPLVDLPIGINITRFQTLLALHRSYLTPGDSSSGWTAGAAAYYVGYLQPRTFLLKYNENGTITDAVDCALDPLSETKCTLKSFTVEKGIYQTSNFRVQPTESIVRFPNITNLCPFGEVFNATRFASVYAWNRKRISNCVADYSVLYNSASFSTFKCYGVSPTKLNDLCFTNVYADSFVIRGDEVRQIAPGQTGKIADYNYKLPDDFTGCVIAWNSNNLDSKVGGNYNYLYRLFRKSNLKPFERDISTEIYQAGSTPCNGVEGFNCYFPLQSYGFQPTNGVGYQPYRVVVLSFELLHAPATVCGPKKSTNLVKNKCVNFNFNGLTGTGVLTESNKKFLPFQQFGRDIADTTDAVRDPQTLEILDITPCSFGGVSVITPGTNTSNQVAVLYQDVNCTEVPVAIHADQLTPTWRVYSTGSNVFQTRAGCLIGAEHVNNSYECDIPIGAGICASYQTQTNSPRRARSVASQSIIAYTMSLGAENSVAYSNNSIAIPTNFTISVTTEILPVSMTKTSVDCTMYICGDSTECSNLLLQYGSFCTQLNRALTGIAVEQDKNTQEVFAQVKQIYKTPPIKDFGGFNFSQILPDPSKPSKRSFIEDLLFNKVTLADAGFIKQYGDCLGDIAARDLICAQKFNGLTVLPPLLTDEMIAQYTSALLAGTITSGWTFGAGAALQIPFAMQMAYRFNGIGVTQNVLYENQKLIANQFNSAIGKIQDSLSFTASALGKLQDVVNQNAQALNTLVKQLSSNCGAISSVLNDILSRLDKVEAEVQIDRLITCRLQSLQTYVTQQLIRAAEIRASANLAATKMSECVLGQSKRVDFCGKGYHLMSFPQSAPHGVVFLHVTYVPAQEKNFTTAPAICHDGKAHFPREGVFVSNGTHWFVTQRNFYEPQIITTDNTFVSGNCDVVIGIVNNTVYDPLQPELDSGGGGSDIIKLLNEQVNKEMQSSNLYMSMSSWCYTHSLDGAGLFLFDHAAEEYEHAKKLIIFLNENNVPVQLTSISAPEHKFEGLTQIFQKAYEHEQHISESINNIVDHAIKSKDHATFNFLQWYVAEQHEEEVLFKDILDKIELIGNENHGLYLADQYVKGIAKSRKS

SEQ ID NO: 9406 - protein, 1315 aa, Artificial Sequence; identical to SEQ ID NO: 9386
  SARS-CoV-2/Australia/NSW10/2020__EPI_ISL_413596 spike protein (1-1147)(F970C_G999C) Ferritin construct

SEQ ID NO: 9407 - protein, 1315 aa, Artificial Sequence
  SARS-CoV-2/Switzerland/1000477797/2020__EPI_ISL_413023 spike protein (1-1147)(F970C_G999C) Ferritin construct
MFVFLVLLPLVSSQCVNLTTRTQLPPAYTNSFTRGVYYPDKVFRSSVLHSTQDLFLPFFSNVTWFHAIHVSGTNGTKRFDNPVLPFNDGVYFASTEKSNIIRGWIFGTTLDSKTQSLLIVNNATNVVIKVCEFQFCNDPFLGVYYHKNNKSWMESEFRVYSSANNCTFEYVSQPFLMDLEGKQGNFKNLREFVFKNIDGYFNIYSKHTPINLVRDLPQGFSALEPLVDLPIGINITRFQTLLALHRSYLTPGDSSSGWTAGAAAYYVGYLQPRTFLLKYNENGTITDAVDCALDPLSETKCTLKSFTVEKGIYQTSNFRVQPTESIVRFPNITNLCPFGEVFNATRFASVYAWNRKRISNCVADYSVLYNSASFSTFKCYGVSPTKLNDLCFTNVYADSFVIRGDEVRQIAPGQTGKIADYNYKLPDDFTGCVIAWNSNNLDSKVGGNYNYLYRLFRKSNLKPFERDISTEIYQAGSTPCNGVEGFNCYFPLQSYGFQPTNGVGYQPYRVVVLSFELLHAPATVCGPKKSTNLVKNKCVNFNFNGLTGTGVLTESNKKFLPFQQFGRDIADTTDAVRDPQTLEILDITPCSFGGVSVITPGTNTSNQVAVLYQGVNCTEVPVAIHADQLTPTWRVYSTGSNVFQTRAGCLIGAEHVNNSYECDIPIGAGICASYQTQTNSPRRARSVASQSIIAYTMSLGAENSVAYSNNSIAIPTNFTISVTTEILPVSMTKTSVDCTMYICGDSTECSNLLLQYGSFCTQLNRALTGIAVEQDKNTQEVFAQVKQIYKTPPIKDFGGFNFSQILPDPSKPSKRSFIEDLLFNKVTLADAGFIKQYGDCLGDIAARDLICAQKFNGLTVLPPLLTDEMIAQYTSALLAGTITSGWTFGAGAALQIPFAMQMAYRFNGIGVTQNVLYENQKLIANQFNSAIGKIQDSLSSTASALGKLQDVVNQNAQALNTLVKQLSSNCGAISSVLNDILSRLDKVEAEVQIDRLITCRLQSLQTYVTQQLIRAAEIRASANLAATKMSECVLGQSKRVDFCGKGYHLMSFPQSAPHGVVFLHVTYVPAQEKNFTTAPAICHDGKAHFPREGVFVSNGTHWFVTQRNFYEPQIITTDNTFVSGNCDVVIGIVNNTVYDPLQPELDSGGGGSDIIKLLNEQVNKEMQSSNLYMSMSSWCYTHSLDGAGLFLFDHAAEEYEHAKKLIIFLNENNVPVQLTSISAPEHKFEGLTQIFQKAYEHEQHISESINNIVDHAIKSKDHATFNFLQWYVAEQHEEEVLFKDILDKIELIGNENHGLYLADQYVKGIAKSRKS

SEQ ID NO: 9408 - protein, 1315 aa, Artificial Sequence
  SARS-CoV-2/Belgium/BA-02291/2020__EPI_ISL_415159 spike protein (1-1147)(F970C_G999C) Ferritin construct
MFVFLVLLPLVSSQCVNLTTRTQLPPAYTNSFTRGVYYPDKVFRSSVLHSTQDLFLPFFSNVTWFHAIHVSGTNGTKRFDNPVLPFNDGVYFASTEKSNIIRGWIFGTTLDSKTQSLLIVNNATNVVIKVCEFQFCNDPFLGVYYHKNNKSWMESEFRVYSSANNCTFEYVSQPFLMDLEGKQGNFKNLREFVFKNIDGYFKIYSKHTPINLVRDLPQGFSALEPLVDLPIGINITRFQTLLALHRSYLTPGDSSSGWTAGAAAYYVGYLQPRTFLLKYNENGTITDAVDCALDPLSETKCTLKSFTVEKGIYQTSNFRVQPTESIVRFPNITNLCPFGEVFNATRFASVYAWNRKRISNCVADYSVLYNSASFSTFKCYGVSPTKLNDLCFTNVYADSFVIRGDEVRQIAPGQTGKIADYNYKLPDDFTGCVIAWNSNNLDSKVGGNYNYLYRLFRRSNLKPFERDISTEIYQAGSTPCNGVEGFNCYFPLQSYGFQPTNGVGYQPYRVVVLSFELLPAPATVCGPKKSTNLVKNKCVNFNFNGLTGTGVLTESNKKFLPFQQFGRDIADTTDAVRDPQTLEILDITPCSFGGVSVITPGTNTSNQVAVLYQGVNCTEVPVAIHADQLTPTWRVYSTGSNVFQTRAGCLIGAEHVNNSYECDIPIGAGICASYQTQTNSPRRARSVASQSIIAYTMSLGAENSVAYSNNSIAIPTNFTISVTTEILPVSMTKTSVDCTMYICGDSTECSNLLLQYGSFCTQLNRALTGIAVEQDKNTQEVFAQVKQIYKTPPIKDFGGFNFSQILPDPSKPSKRSFIEDLLFNKVTLADAGFIKQYGDCLGDIAARDLICAQKFNGLTVLPPLLTDEMIAQYTSALLAGTITSGWTFGAGAALQIPFAMQMAYRFNGIGVTQNVLYENQKLIANQFNSAIGKIQDSLSSAAPALGKLQDVVNQNAQALNTLVKQLSSNCGAISSVLNDILSRLDKVEAEVQIDRLITCRLQSLQTYVTQQLIRAAEIRASANLAATKMSECVLGQSKRVDFCGKGYHLMSFPQSAPHGVVFLHVTYVPAQEKNFTTAPAICHDGKAHFPREGVFVSNGTHWFVTQRNFYEPQIITTDNTFVSGNCDVVIGIVNNTVYDPLQPELDSGGGGSDIIKLLNEQVNKEMQSSNLYMSMSSWCYTHSLDGAGLFLFDHAAEEYEHAKKLIIFLNENNVPVQLTSISAPEHKFEGLTQIFQKAYEHEQHISESINNIVDHAIKSKDHATFNFLQWYVAEQHEEEVLFKDILDKIELIGNENHGLYLADQYVKGIAKSRKS

SEQ ID NO: 9409 - protein, 1315 aa, Artificial Sequence
  SARS-CoV-2/USA/WA8-UW5/2020__EPI_ISL_413486 spike protein (1-1147)(F970C_G999C) Ferritin construct
MFVFLVLLPLVSSQCVNLTTRTQLPPAYTNSFTRGVYYPDKVFRSSVLHSTQDLFLPFFSNVTWFHAIHVSGTNGTKRFDNPVLPFNDGVYFASTEKSNIIRGWIFGTTLDSKTQSLLIVNNATNVVIKVCEFQFCNDPFLGVYYHKNNKSWMESEFRVYSSANNCTFEYVSQPFLMDLEGKQGNFKNLREFVFKNIDGYFKIYSKHTPINLVRDLPQGFSALEPLVDLPIGINITRFQTLLALHRSYLTPGDSSSGWTAGAAAYYVGYLQPRTFLLKYNENGTITDAVDCALDPLSETKCTLKSFTVEKGIYQTSNFRVQPTESIVRFPNITNLCPFGEVFNATRFASVYAWNRKRISNCVADYSVLYNSASFSTFKCYGVSPTKLNDLCFTNVYADSFVIRGDEVRQIAPGQTGKIADYNYKLPDDFTGCVIAWNSNNLDSKVGGNYNYLYRLFRKSNLKPFERDISTEIYQAGSTPCNGVEGFNCYFPLQSYGFQPTNGVGYQPYRVVVLSFELLHAPATVCGPKKSTNLVKNKCVNFNFNGLTGTGVLTESNKKFLPFQQFGRDIADTTDAVRDPQTLEILDITPCSFGGVSVITPGTNTSNQVAVLYQDVNCTEVPVAIHADQLTPTWRVYSTGSNVFQTRAGCLIGAEYVNNSYECDIPIGAGICASYQTQTNSPRRARSVASQSIIAYTMSLGAENSVAYSNNSIAIPTNFTISVTTEILPVSMTKTSVDCTMYICGDSTECSNLLLQYGSFCTQLNRALTGIAVEQDKNTQEVFAQVKQIYKTPPIKDFGGFNFSQILPDPSKPSKRSFIEDLLFNKVTLADAGFIKQYGDCLGDIAARDLICAQKFNGLTVLPPLLTDEMIAQYTSALLAGTITSGWTFGAGAALQIPFAMQMAYRFNGIGVTQNVLYENQKLIANQFNSAIGKIQDSLSSTASALGKLQDVVNQNAQALNTLVKQLSSNCGAISSVLNDILSRLDKVEAEVQIDRLITCRLQSLQTYVTQQLIRAAEIRASANLAATKMSECVLGQSKRVDFCGKGYHLMSFPQSAPHGVVFLHVTYVPAQEKNFTTAPAICHDGKAHFPREGVFVSNGTHWFVTQRNFYEPQIITTDNTFVSGNCDVVIGIVNNTVYDPLQPELDSGGGGSDIIKLLNEQVNKEMQSSNLYMSMSSWCYTHSLDGAGLFLFDHAAEEYEHAKKLIIFLNENNVPVQLTSISAPEHKFEGLTQIFQKAYEHEQHISESINNIVDHAIKSKDHATFNFLQWYVAEQHEEEVLFKDILDKIELIGNENHGLYLADQYVKGIAKSRKS

SEQ ID NO: 9410 - protein, 1315 aa, Artificial Sequence
  SARS-CoV-2/England/20102000506/2020__EPI_ISL_415147 spike protein (1-1147)(F970C_G999C) Ferritin construct
MFVFLVLLPLVSSQCVNLTTRTQLPPAYTNSFTRGVYYPDKVFRSSVLHSTQDLFLPFFSNVTWFHAIHVSGTNGTKRFDNPVLPFNDGVYFASTEKSNIIRGWIFGTTLDSKTQSLLIVNNATNVVIKVCEFQFCNDPFLGVYYHKNNKSWMESEFRVYSSANNCTFEYVSQPFLMDLEGKQGNFKNLREFVFKNIDGYFKIYSKHTPINLVRDLPQGFSALEPLVDLPIGINITRFQTLLALHRSYLTPGDSSSGWTAGAAAYYVGYLQPRTFLLKYNENGTITDAVDCALDPLSETKCTLKSFTVEKGIYQTSNFRVQPTESIVRFPNITNLCPFGEVFNATRFASVYAWNRKRISNCVADYSVLYNSASFSTFKCYGVSPTKLNDLCFTNVYADSFVIRGDEVRQIAPGQTGKIADYNYKLPDDFTGCVIAWNSNNLDSKVGGNYNYLYRLFRKSNLKPFERDISTEIYQAGSTPCNGVEGFNCYFPLQSYGFQPTNGVGYQPYRVVVLSFELLHAPATVCGPKKSTNLVKNKCVNFNFNGLTGTGVLTESNKKFLPFQQFGRDIADTTDAVRDPQTLEILDITPCSFGGVSVITPGTNTSNQVAVLYQGVNCTEVPVAIHADQLTPTWRVYSTGSNVFQTRAGCLIGAEHVNNSYECDIPIGAGICASYQTQTNSPRRARSVASQSIIAYTMSLGAENSVAYSNNSIAIPTNFTISVTTEILPVSMTKTSVDCTMYICGDSTECSNLLLQYGSFCTQLNRALTGIAVEQDKNTQEVFAQVKQIYKTPPIKDFGGFNFSQILPDPSKPSKRSFIEDLLFNKVTLADAGFIKQYGYCLGDIAARDLICAQKFNGLTVLPPLLTDEMIAQYTSALLAGTITSGWTFGAGAALQIPFAMQMAYRFNGIGVTQNVLYENQKLIANQFNSAIGKIQDSLSSTASALGKLQDVVNQNAQALNTLVKQLSSNCGAISSVLNDILSRLDKVEAEVQIDRLITCRLQSLQTYVTQQLIRAAEIRASANLAATKMSECVLGQSKRVDFCGKGYHLMSFPQSAPHGVVFLHVTYVPAQEKNFTTAPAICHDGKAHFPREGVFVSNGTHWFVTQRNFYEPQIITTDNTFVSGNCDVVIGIVNNTVYDPLQPELDSGGGGSDIIKLLNEQVNKEMQSSNLYMSMSSWCYTHSLDGAGLFLFDHAAEEYEHAKKLIIFLNENNVPVQLTSISAPEHKFEGLTQIFQKAYEHEQHISESINNIVDHAIKSKDHATFNFLQWYVAEQHEEEVLFKDILDKIELIGNENHGLYLADQYVKGIAKSRKS

SEQ ID NO: 9411 - protein, 1315 aa, Artificial Sequence
  SARS-CoV-2/Belgium/VAG-03013/2020__EPI_ISL_415155 spike protein (1-1147)(F970C_G999C) Ferritin construct
MFVFLVLLPLVSSQCVNLTTRTQLPPAYTNSFTRGVYYPDKVFRSSVLHSTQDLFLPFFSNVTWFHAIHVSGTNGTKRFDNPVLPFNDGVYFASTEKSNIIRGWIFGTTLDSKTQSLLIVNNATNVVIKVCEFQFCNDPFLGVYYHKNNKSWMESEFRVYSSANNCTFEYVSQPFLMDLEGKQGNFKNLREFVFKNIDGYFKIYSKHTPINLVRDLPQGFSALEPLVDLPIGINITRFQTLLALHRSYLTPGDSSSGWTAGAAAYYVGYLQPRTFLLKYNENGTITDAVDCALDPLSETKCTLKSFTVEKGIYQTSNFRVQPTESIVRFPNITNLCPFGEVFNATRFASVYAWNRKRISNCVADYSVLYNSASFSTFKCYGVSPTKLNDLCFTNVYADSFVIRGDEVRQIAPGQTGKIADYNYKLPDDFTGCVIAWNSNNLDSKVGGNYNYLYRLFRKSNLKPFERDISTEIYQAGSTPCNGVEGFNCYFPLQSYGFQPTNGVGYQPYRVVVLSFELLHAPATVCGPKKSTNLVKNKCVNFNFNGLTGTGVLTESNKKFLPFQQFGRDIADTTDAVRDPQTLEILDITPCSFGGVSVITPGTNTSNQVAVLYQGVNCTEVPVAIHADQLTPTWRVYSTGSNVFQTRAGCLIGAEHVNNSYECDIPIGAGICASYQTQTNSPRRARSVASQSIIAYTMSLGAENSVAYSNNSIAIPTNFTISVTTEILPVSMTKTSVDCTMYICGDSTECSNLLLQYGSFCTQLNRALTGIAVEQDKNTQEVFAQVKQIYKTPPIKDFGGFNFSQILPDPSKPSKRSFIEDLLFNKVTLADAGFIKQYGDCLGDIAARDLICAQKFNGLTVLPPLLTDEMIAQYTSALLAGTITSGWTFGAGAALQIPFAMQMAYRFNGIGVTQNVLYENQKLIANQFNSAIGKIQDSLSSTATALGKLQDVVNQNAQALNTLVKQLSSNCGAISSVLNDILSRLDKVEAEVQIDRLITCRLQSLQTYVTQQLIRAAEIRASANLAATKMSECVLGQSKRVDFCGKGYHLMSFPQSAPHGVVFLHVTYVPAQEKNFTTAPAICHDGKAHFPREGVFVSNGTHWFVTQRNFYEPQIITTDNTFVSGNCDVVIGIVNNTVYDPLQPELDSGGGGSDIIKLLNEQVNKEMQSSNLYMSMSSWCYTHSLDGAGLFLFDHAAEEYEHAKKLIIFLNENNVPVQLTSISAPEHKFEGLTQIFQKAYEHEQHISESINNIVDHAIKSKDHATFNFLQWYVAEQHEEEVLFKDILDKIELIGNENHGLYLADQYVKGIAKSRKS

SEQ ID NO: 9412 - protein, 1315 aa, Artificial Sequence
  SARS-CoV-2/Belgium/BC-03016/2020__EPI_ISL_415157 spike protein (1-1147)(F970C_G999C) Ferritin construct
MFVFLVLLPLVSSQCVNLTTRTQLPPAYTNSFTRGVYYPDKVFRSSVLHSTQDLFLPFFSNVTWFHAIHVSGTNGTKRFDNPVLPFNDGVYFASTEKSNIIRGWIFGTTLDSKTQSLLIVNNATNVVIKVCEFQFCNDPFLGVYYHKNNKSWMESEFRVYSSANNCTFEYVSQPFLMDLEGKQGNFKNLREFVFKNIDGYFKIYSKHTPINLVRDLPQGFSALEPLVDLPIGINITRFQTLLALHRSYLTPGDSSSGWTAGAAAYYVGYLQPRTFLLKYNENGTITDAVDCALDPLSETKCTLKSFTVEKGIYQTSNFRVQPTESIVRFPNITNLCPFGEVFNATRFASVYAWNRKRISNCVADYSVLYNSASFSTFKCYGVSPTKLNDLCFTNVYADSFVIRGDEVRQIAPGQTGKIADYNYKLPDDFTGCVIAWNSNNLDSKVGGNYNYLYRLFRKSNLKPFERDISTEIYQAGSTPCNGVEGFNCYFPLQSYGFQPTNGVGYQPYRVVVLSFELLHAPATVCGPKKSTNLVKNKCVNFNFNGLTGTGVLTESNKKFLPFQQFGRDIADTTDAVRDPQTLEILDITPCSFGGVSVITPGTNTSNQVAVLYQGVNCTEVPVAIHADQLTPTWRVYSTGSNVFQTRAGCLIGAEHVNNSYECDIPIGAGICASYQTQTNSPRRARSVASQSIIAYTMSLGAENSVAYSNNSIAIPTNFTISVTTEILPVSMTKTSVDCTMYICGDSTECSNLLLQYGSFCTQLNRALTGIAVEQDKNTQEVFAQVKQIYKTPPIKDFGGFNFSQILPDPSKPSKRSFIEDLLFNKVTLADAGFIKQYGDCLGDIAARDLICAQKFNGLTVLPPLLTDEMIAQYTSALLAGTITSGWTFGAGAALQIPFAMQMAYRFNGIGVTQNVLYENQKLIANQFNSAIGKIQDSLSSTAPALGKLQDVVNQNAQALNTLVKQLSSNCGAISSVLNDILSRLDKVEAEVQIDRLITCRLQSLQTYVTQQLIRAAEIRASANLAATKMSECVLGQSKRVDFCGKGYHLMSFPQSAPHGVVFLHVTYVPAQEKNFTTAPAICHDGKAHFPREGVFVSNGTHWFVTQRNFYEPQIITTDNTFVSGNCDVVIGIVNNTVYDPLQPELDSGGGGSDIIKLLNEQVNKEMQSSNLYMSMSSWCYTHSLDGAGLFLFDHAAEEYEHAKKLIIFLNENNVPVQLTSISAPEHKFEGLTQIFQKAYEHEQHISESINNIVDHAIKSKDHATFNFLQWYVAEQHEEEVLFKDILDKIELIGNENHGLYLADQYVKGIAKSRKS

SEQ ID NO: 9413 - protein, 1315 aa, Artificial Sequence
  SARS-CoV-2/Germany/BavPat3/2020__EPI_ISL_414521 spike protein (1-1147)(F970C_G999C) Ferritin construct
MFVFLVLLPLVSSQCVNLTTRTQLPPAYTNSFTRGVYYPDKVFRSSVLHSTQDLFLPFFSNVTWFHAIHVSGTNGTKRFDNPVLPFNDGVYFASTEKSNIIRGWIFGTTLDSKTQSLLIVNNATNVVIKVCEFQFCNDPFLGVYYHKNNKSWMESEFRVYSSANNCTFEYVSQPFLMDLEGKQGNFKNLREFVFKNIDGYFKIYSKHTPINLVRDLPQGFSALEPLVDLPIGINITRFQTLLALHRSYLTPGDSSSGWTAGAAAYYVGYLQPRTFLLKYNENGTITDAVDCALDPLSETKCTLKSFTVEKGIYQTSNFRVQPTESIVRFPNITNLCPFGEVFNATRFASVYAWNRKRISNCVADYSVLYNSASFSTFKCYGVSPTKLNDLCFTNVYADSFVIRGDEVRQIAPGQTGKIADYNYKLPDDFTGCVIAWNSNNLDSKVGGNYNYLYRLFRKSNLKPFERDISTEIYQAGSTPCNGVEGFNCYFPLQSYGFQPTNGVGYQPYRVVVLSFELLHAPATVCGPKKSTNLVKNKCVNFNFNGLTGTGVLTESNKKFLPFQQFGRDIADTTDAVRDPQTLEILDITPCSFGGVSVITPGTNTSNQVAVLYQDVNCTEVPVAIHADQLTPTWRVYSTGSNVFQTRAGCLIGAEHVNNSYECDIPIGAGICASYQTQTNSPRRARSVASQSIIAYTMSLGAENSVAYSNNSIAIPTNFTISVTTEILPVSMTKTSVDCTMYICGDSTECSNLLLQYGSFCTQLNRALTGIAVEQDKNTQQVFAQVKQIYKTPPIKDFGGFNFSQILPDPSKPSKRSFIEDLLFNKVTLADAGFIKQYGDCLGDIAARDLICAQKFNGLTVLPPLLTDEMIAQYTSALLAGTITSGWTFGAGAALQIPFAMQMAYRFNGIGVTQNVLYENQKLIANQFNSAIGKIQDSLSSTASALGKLQDVVNQNAQALNTLVKQLSSNCGAISSVLNDILSRLDKVEAEVQIDRLITCRLQSLQTYVTQQLIRAAEIRASANLAATKMSECVLGQSKRVDFCGKGYHLMSFPQSAPHGVVFLHVTYVPAQEKNFTTAPAICHDGKAHFPREGVFVSNGTHWFVTQRNFYEPQIITTDNTFVSGNCDVVIGIVNNTVYDPLQPELDSGGGGSDIIKLLNEQVNKEMQSSNLYMSMSSWCYTHSLDGAGLFLFDHAAEEYEHAKKLIIFLNENNVPVQLTSISAPEHKFEGLTQIFQKAYEHEQHISESINNIVDHAIKSKDHATFNFLQWYVAEQHEEEVLFKDILDKIELIGNENHGLYLADQYVKGIAKSRKS

SEQ ID NO: 9414 - protein, 1315 aa, Artificial Sequence
  SARS-CoV-2/France/HF1805/2020__EPI_ISL_414628 spike protein (1-1147)(F970C_G999C) Ferritin construct
MFVFLVLLPLVSSQCVNLTTRTQLPPAYTNSFTRGVYYPDKVFRSSVLHSTQDLFLPFFSNVTWFHAIHVSGTNGTKRFDNPVLPFNDGVYFASTEKSNIIRGWIFGTTLDSKTQSLLIVNNATNVVIKVCEFQFCNDPFLGVYYHKNNKSWMESEFRVYSSANNCTFEYVSQPFLMDLEGKQGNFKNLREFVFKNIDGYFKIYSKHTPINLVRDLPQGFSALEPLVDLPIGINITRFQTLLALHRSYLTPGDSSSGWTAGAAAYYVGYLQPRTFLLKYNENGTITDAVDCALDPLSETKCTLKSFTVEKGIYQTSNFRVQPTESIVRFPNITNLCPFGEVFNATRFASVYAWNRKRISNCVADYSVLYNSASFSTFKCYGVSPTKLNDLCFTNVYADSFVIRGDEVRQIAPGQTGKIADYNYKLPDDFTGCVIAWNSNNLDSKVGGNYNYLYRLFRKSNLKPFERDISTEIYQAGSTPCNGVEGFNCYFPLQSYGFQPTNGVGYQPYRVVVLSFELLHAPATVCGPKKSTNLVKNKCVNFNFNGLTGTGVLTESNKKFLPFQQFGRDIADTTDAVRDPQTLEILDITPCSFGGVSVITPGTNTSNQVAVLYQGVNCTEVPVAIHADQLTPTWRVYSTGSNVFQTRAGCLIGAEHVNNSYECDIPIGAGICASYQTQTNSPRRARSVASQSIIAYTMSLGAENSVAYSNNSIAIPTNFTISVTTEILPVSMTKTSVDCTMYICGDSTECSNLLLQYGSFCTQLNRALTGIAVEQDKNTQEVFAQVKQIYKTPPIKDFGGFNFSQILPDPSKPSKRSFIEDLLFNKVTLADAGFIKQYGDCLGDIAARDLICAQKFNGLTVLPPLLTDEMIAQYTSALLAGTITSGWTFGAGAALQIPFAMQMAYRFNGIGVTQNVLYENQKLIANQFNSAIGKIQDSLSSTASALGKLQDVVNQNAQALNTLVKQLSSNCGAISSVLNDILSRLDKVEAEVQIDRLITCRLQSLQTYVTQQLIRAAEIRASANLAATKMSECVLGQSKRVDFCGKGYHLMSFPQSAPHGVVFLHVTYVPAQEKNFTTAPAICHDGKAHFPREGVFVSNGTHWFVTQRNFYEPQIITTDNTFVSGNCDVVIGVVNNTVYDPLQPELDSGGGGSDIIKLLNEQVNKEMQSSNLYMSMSSWCYTHSLDGAGLFLFDHAAEEYEHAKKLIIFLNENNVPVQLTSISAPEHKFEGLTQIFQKAYEHEQHISESINNIVDHAIKSKDHATFNFLQWYVAEQHEEEVLFKDILDKIELIGNENHGLYLADQYVKGIAKSRKS

SEQ ID NO: 9415 - protein, 1315 aa, Artificial Sequence
  SARS-CoV-2/Netherlands/ZuidHolland_9/2020__EPI_ISL_414445 spike protein (1-1147)(F970C_G999C) Ferritin construct
MFVFLVLLPLVSSQCVNLTTRTQLPPAYTNSFTRGVYYPDKVFRSSVLHSTQDLFLPFFSNVTWFHAIHVSGTNGTKRFDNPVLPFNDGVYFASTEKSNIIRGWIFGTTLDSKTQSLLIVNNATNVVIKVCEFQFCNDPFLGVYYHKNNKSWMESEFRVYSSANNCTFEYVSQPFLMDLEGKQGNFKNLREFVFKNIDGYFKIYSKHTPINLVRDLPQGFSALEPLVDLPIGINITRFQTLLALHRSYLTPGDSSSGWTAGAAAYYVGYLQPRTFLLKYNENGTITDAVDCALDPLSETKCTLKSFTVEKGIYQTSNFRVQPTESIVRFPNITNLCPFGEVFNATRFASVYAWNRKRISNCVADYSVLYNSASFSTFKCYGVSPTKLNDLCFTNVYADSFVIRGDEVRQIAPGQTGKIADYNYKLPDDFTGCVIAWNSNNLDSKVGGNYNYLYRLFRKSNLKPFERDISTEIYQAGSTPCNGVEGFNCYFPLQSYGFQPTNGVGYQPYRVVVLSFELLHAPATVCGPKKSTNLVKNKCVNFNFNGLTGTGVLTESNKKFLPFQQFGRDIADTTDAVRDPQTLEILDITPCSFGGVSVITPGTNTSNQVAVLYQGVNCTEVPVAIHADQLTPTWRVYSTGSNVFQTRAGCLIGAEHVNNSYECDIPIGAGICASYQTQTNSPRRARSVASQSIIAYTMSLGAENSVAYSNNSIAIPTNFTISVTTEILPVSMTKTSVDCTMYICGDSTECSNLLLQYGSFCTQLNRALTGIAVEQDKNTQEVFAQVKQIYKTPPIKDFGGFNFSQILPDPSKPSKRSFIEDLLFNKVTLADAGFIKQYGDCLGDIAARDLICVQKFNGLTVLPPLLTDEMIAQYTSALLAGTITSGWTFGAGAALQIPFAMQMAYRFNGIGVTQNVLYENQKLIANQFNSAIGKIQDSLSSTASALGKLQDVVNQNAQALNTLVKQLSSNCGAISSVLNDILSRLDKVEAEVQIDRLITCRLQSLQTYVTQQLIRAAEIRASANLAATKMSECVLGQSKRVDFCGKGYHLMSFPQSAPHGVVFLHVTYVPAQEKNFTTAPAICHDGKAHFPREGVFVSNGTHWFVTQRNFYEPQIITTDNTFVSGNCDVVIGIVNNTVYDPLQPELDSGGGGSDIIKLLNEQVNKEMQSSNLYMSMSSWCYTHSLDGAGLFLFDHAAEEYEHAKKLIIFLNENNVPVQLTSISAPEHKFEGLTQIFQKAYEHEQHISESINNIVDHAIKSKDHATFNFLQWYVAEQHEEEVLFKDILDKIELIGNENHGLYLADQYVKGIAKSRKS

SEQ ID NO: 9416 - protein, 1315 aa, Artificial Sequence
  SARS-CoV-2/Finland/FIN03032020A/2020__EPI_ISL_413602 spike protein (1-1147)(F970C_G999C) Ferritin construct
MFVFLVLLPLVSSQCVNLTTRTQLPPAYTNSFTRGVYYPDKVFRSSVLHSTQDLFLPFFSNVTWFHAIHVSGTNGTKRFDNPVLPFNDGVYFASTEKSNIIRGWIFGTTLDSKTQSLLIVNNATNVVIKVCEFQFCNDPFLGVYYHKNNKSWMESEFRVYSSANNCTFEYVSQPFLMDLEGKQGNFKNLREFVFKNIDGYFKIYSKHTPINLVRDLPQGFSALEPLVDLPIGINITRFQTLLALHRSYLTPGDSSSGWTAGAAAYYVGYLQPRTFLLKYNENGTITDAVDCALDPLSETKCTLKSFTVEKGIYQTSNFRVQPTESIVRFPNITNLCPFGEVFNATRFASVYAWNRKRISNCVADYSVLYNSASFSTFKCYGVSPTKLNDLCFTNVYADSFVIRGDEVRQIAPGQTGKIADYNYKLPDDFTGCVISWNSNNLDSKVGGNYNYLYRLFRKSNLKPFERDISTEIYQAGSTPCNGVEGFNCYFPLQSYGFQPTNGVGYQPYRVVVLSFELLHAPATVCGPKKSTNLVKNKCVNFNFNGLTGTGVLTESNKKFLPFQQFGRDIADTTDAVRDPQTLEILDITPCSFGGVSVITPGTNTSNQVAVLYQGVNCTEVPVAIHADQLTPTWRVYSTGSNVFQTRAGCLIGAEHVNNSYECDIPIGAGICASYQTQTNSPRRARSVASQSIIAYTMSLGAENSVAYSNNSIAIPTNFTISVTTEILPVSMTKTSVDCTMYICGDSTECSNLLLQYGSFCTQLNRALTGIAVEQDKNTQEVFAQVKQIYKTPPIKDFGGFNFSQILPDPSKPSKRSFIEDLLFNKVTLADAGFIKQYGDCLGDIAARDLICAQKFNGLTVLPPLLTDEMIAQYTSALLAGTITSGWTFGAGAALQIPFAMQMAYRFNGIGVTQNVLYENQKLIANQFNSAIGKIQDSLSSTASALGKLQDVVNQNAQALNTLVKQLSSNCGAISSVLNDILSRLDKVEAEVQIDRLITCRLQSLQTYVTQQLIRAAEIRASANLAATKMSECVLGQSKRVDFCGKGYHLMSFPQSAPHGVVFLHVTYVPAQEKNFTTAPAICHDGKAHFPREGVFVSNGTHWFVTQRNFYEPQIITTDNTFVSGNCDVVIGIVNNTVYDPLQPELDSGGGGSDIIKLLNEQVNKEMQSSNLYMSMSSWCYTHSLDGAGLFLFDHAAEEYEHAKKLIIFLNENNVPVQLTSISAPEHKFEGLTQIFQKAYEHEQHISESINNIVDHAIKSKDHATFNFLQWYVAEQHEEEVLFKDILDKIELIGNENHGLYLADQYVKGIAKSRKS

SEQ ID NO: 9417 - protein, 1315 aa, Artificial Sequence
  SARS-CoV-2/France/GE1977/2020__EPI_ISL_414632 spike protein (1-1147)(F970C_G999C) Ferritin construct
MFVFLVLLPLVSSQCVNLTTRTQLPPAYTNSFTRGVYYPDKVFRSSVLHSTQDLFLPFFSNVTWFHAIHVSGTNGTKRFDNPVLPFNDGVYFASTEKSNIIRGWIFGTTLDSKTQSLLIVNNATNVVIKVCEFQFCNDPFLGVYYHKNNKSWMESEFRVYSSANNCTFEYVSQPFLMDLEGKQGNFKNLREFVFKNIDGYFKIYSKHTPINLVRDLPQGFSALEPLVDLPIGINITRFQTLLALHRSYLTPGDSSSGWTAGAAAYYVGYLQPRTFLLKYNENGTITDAVDCALDPLSETKCTLKSFTVEKGIYQTSNFRVQPTESIVRFPNITNLCPFGEVFNATRFASVYAWNRKRISNCVADYSVLYNSASFSTFKCYGVSPTKLNDLCFTNVYADSFVIRGDEVRQIAPGQTGKIADYNYKLPDDFTGCVIAWNSNNLDSKVGGNYNYLYRLFRKSNLKPFERDISTEIYQAGSTPCNGVEGFNCYFPLQSYGFQPTNGVGYQPYRVVVLSFELLHAPATVCGPKKSTNLVKNKCVNFNFNGLTGTGVLTESNKKFLPFQQFGRDIADTTDAVRDPQTLEILDITPCSFGGVSVITPGTNTSNQVAVLYQGVNCTEVPVAIHADQLTPTWRVYSTGSNVFQTRAGCLIGAEHVNNSYECDIPIGAGICASYQTQTNSPRRARSVASQSIIAYTMSLGAENSVAYSNNSIAIPTNFTISVTTEILPVSMTKTSVDCTMYICGDSTECSNLLLQYGSFCTQLNRALTGIAVEQDKNTQEVFAQVKQIYKTPPIKDFGGFNFSQILPDPSKPSKRSFIEDLLFNKVTLADAGFIKQYGDCLGDIAARDLICAQKFNGLTVLPPLLTDEMIAQYTSALLAGTITSGWTFGAGAALQIPFAMQMAYRFNGIGVTQNVLYENQKLIANQFNSAIGKIQDSLFSTASALGKLQDVVNQNAQALNTLVKQLSSNCGAISSVLNDILSRLDKVEAEVQIDRLITCRLQSLQTYVTQQLIRAAEIRASANLAATKMSECVLGQSKRVDFCGKGYHLMSFPQSAPHGVVFLHVTYVPAQEKNFTTAPAICHDGKAHFPREGVFVSNGTHWFVTQRNFYEPQIITTDNTFVSGNCDVVIGIVNNTVYDPLQPELDSGGGGSDIIKLLNEQVNKEMQSSNLYMSMSSWCYTHSLDGAGLFLFDHAAEEYEHAKKLIIFLNENNVPVQLTSISAPEHKFEGLTQIFQKAYEHEQHISESINNIVDHAIKSKDHATFNFLQWYVAEQHEEEVLFKDILDKIELIGNENHGLYLADQYVKGIAKSRKS

SEQ ID NO: 9418 - protein, 1315 aa, Artificial Sequence
  SARS-CoV-2/Finland/FIN-313/2020__EPI_ISL_414641 spike protein (1-1147)(F970C_G999C) Ferritin construct
MFVFLVLLPLVSSQCVNLTTRTQLPPAYTNSFTRGVYYPDKVFRSSVLHSTQDLFLPFFSNVTWFHAIHVSGTNGTKRFDNPVLPFNDGVYFASTEKSNIIRGWIFGTTLDSKTQSLLIVNNATNVVIKVCEFQFCNDPFLGVYYHKNNKSWMESEFRVYSSANNCTFEYVSQPFLMDLEGKQGNFKNLREFVFKNIDGYFKIYSKHTPINLVRDLPQGFSALEPLVDLPIGINITRFKTLLALHRSYLTPGDSSSGWTAGAAAYYVGYLQPRTFLLKYNENGTITDAVDCALDPLSETKCTLKSFTVEKGIYQTSNFRVQPTESIVRFPNITNLCPFGEVFNATRFASVYAWNRKRISNCVADYSVLYNSASFSTFKCYGVSPTKLNDLCFTNVYADSFVIRGDEVRQIAPGQTGKIADYNYKLPDDFTGCVIAWNSNNLDSKVGGNYNYLYRLFRKSNLKPFERDISTEIYQAGSTPCNGVEGFNCYFPLQSYGFQPTNGVGYQPYRVVVLSFELLHAPATVCGPKKSTNLVKNKCVNFNFNGLTGTGVLTESNKKFLPFQQFGRDIADTTDAVRDPQTLEILDITPCSFGGVSVITPGTNTSNQVAVLYQGVNCTEVPVAIHADQLTPTWRVYSTGSNVFQTRAGCLIGAEHVNNSYECDIPIGAGICASYQTQTNSPRRARSVASQSIIAYTMSLGAENSVAYSNNSIAIPTNFTISVTTEILPVSMTKTSVDCTMYICGDSTECSNLLLQYGSFCTQLNRALTGIAVEQDKNTQEVFAQVKQIYKTPPIKDFGGFNFSQILPDPSKPSKRSFIEDLLFNKVTLADAGFIKQYGDCLGDIAARDLICAQKFNGLTVLPPLLTDEMIAQYTSALLAGTITSGWTFGAGAALQIPFAMQMAYRFNGIGVTQNVLYENQKLIANQFNSAIGKIQDSLSSTASALGKLQDVVNQNAQALNTLVKQLSSNCGAISSVLNDILSRLDKVEAEVQIDRLITCRLQSLQTYVTQQLIRAAEIRASANLAATKMSECVLGQSKRVDFCGKGYHLMSFPQSAPHGVVFLHVTYVPAQEKNFTTAPAICHDGKAHFPREGVFVSNGTHWFVTQRNFYEPQIITTDNTFVSGNCDVVIGIVNNTVYDPLQPELDSGGGGSDIIKLLNEQVNKEMQSSNLYMSMSSWCYTHSLDGAGLFLFDHAAEEYEHAKKLIIFLNENNVPVQLTSISAPEHKFEGLTQIFQKAYEHEQHISESINNIVDHAIKSKDHATFNFLQWYVAEQHEEEVLFKDILDKIELIGNENHGLYLADQYVKGIAKSRKS

SEQ ID NO: 9419 - protein, 1315 aa, Artificial Sequence
  SARS-CoV-2/Netherlands/ZuidHolland_2/2020__EPI_ISL_414556 spike protein (1-1147)(F970C_G999C) Ferritin construct
MFVFLVLLPLVSSQCVNLTTRTQLPPAYTNSFTRGVYYPDKVFRSSVLHSTQDLFLPFFSNVTWFHAIHVSGTNGTKRFDNPVLPFNDGVYFASTEKSNIIRGWIFGTTLDSKTQSLLIVNNATNVVIKVCEFQFCNDPFLGVYYHKNNKSWMESEFRVYSSANNCTFEYVSQPFLMDLEGKQGNFKNLREFVFKNIDGYFKIYSKHTPINLVRDLPQGFSALEPLVDLPIGINITRFQTLLALHRSYLTPGDSSSGWTAGAAAYYVGYLQPRTFLLKYNENGTITDAVDCALDPLSETKCTLKSFTVEKGIYQTSNFRVQPTESIVRFPNITNLCPFGEVFNATRFASVYAWNRKRISNCVADYSVLYNSASFSTFKCYGVSPTKLNDLCFTNVYADSFVIRGDEVRQIAPGQTGKIADYNYKLPDDFTGCVIAWNSNNLDSKVGGNYNYLYRLFRKSNLKPFERDISTEIYQAGSTPCNGVEGFNCYFPLQSYGFQPTNGVGYQPYRVVVLSFELLHAPATVCGPKKSTNLVKNKCVNFNFNGLTGTGVLTESNKKFLPFQQFGRDIADTTDAVRDPQTLEILDITPCSFGGVSVITPGTNTSNQVAVLYQGVNCTEVPVAIHADQLTPTWRVYSTGSNVFQTRAGCLIGAEHVNNSYECDIPIGAGICASYQTQTNSPRRARSVASQSIIAYTMSLGAENSVAYSNNSIAIPTNFTISVTTEILPVSMTKTSVDCTMYICGDSTECSNLLLQYGSFCTQLNRALTGIALEQDKNTQEVFAQVKQIYKTPPIKDFGGFNFSQILPDPSKPSKRSFIEDLLFNKVTLADAGFIKQYGDCLGDIAARDLICAQKFNGLTVLPPLLTDEMIAQYTSALLAGTITSGWTFGAGAALQIPFAMQMAYRFNGIGVTQNVLYENQKLIANQFNSAIGKIQDSLSSTASALGKLQDVVNQNAQALNTLVKQLSSNCGAISSVLNDILSRLDKVEAEVQIDRLITCRLQSLQTYVTQQLIRAAEIRASANLAATKMSECVLGQSKRVDFCGKGYHLMSFPQSAPHGVVFLHVTYVPAQEKNFTTAPAICHDGKAHFPREGVFVSNGTHWFVTQRNFYEPQIITTDNTFVSGNCDVVIGIVNNTVYDPLQPELDSGGGGSDIIKLLNEQVNKEMQSSNLYMSMSSWCYTHSLDGAGLFLFDHAAEEYEHAKKLIIFLNENNVPVQLTSISAPEHKFEGLTQIFQKAYEHEQHISESINNIVDHAIKSKDHATFNFLQWYVAEQHEEEVLFKDILDKIELIGNENHGLYLADQYVKGIAKSRKS

SEQ ID NO: 9420 - protein, 1315 aa, Artificial Sequence
  SARS-CoV-2/USA/WA-UW31/2020__EPI_ISL_414618 spike protein (1-1147)(F970C_G999C) Ferritin construct
MFVFLVLLPLVSSQCVNLTTRTQLPPAYTNSFTRGVYYPDKVFRSSVLHSTQDLFLPFFSNVTWFHAIHVSGTNGTKRFDNPVLPFNDGVYFASTEKSNIIRGWIFGTTLDSKTQSLLIVNNATNVVIKVCEFQFCNDPFLGVYYHKNNKSWMESEFRVYSSANNCTFEYVSQPFLMDLEGKQGNFKNLREFVFKNIDGYFKIYSKHTPINLVRDLPQGFSALEPLVDLPIGINITRFQTLLALHRSYLTPGDSSSGWTAGAAAYYVGYLQPRTFLLKYNENGTITDAVDCALDPLSETKCTLKSFTVEKGIYQTSNFRVQPTESIVRFPNITNLCPFGEVFNATRFASVYAWNRKRISNCVADYSVLYNSASFSTFKCYGVSPTKLNDLCFTNVYADSFVIRGDEVRQIAPGQTGKIADYNYKLPDDFTGCVIAWNSNNLDSKVGGNYNYLYRLFRKSNLKPFERDISTEIYQAGSTPCNGAEGFNCYFPLQSYGFQPTNGVGYQPYRVVVLSFELLHAPATVCGPKKSTNLVKNKCVNFNFNGLTGTGVLTESNKKFLPFQQFGRDIADTTDAVRDPQTLEILDITPCSFGGVSVITPGTNTSNQVAVLYQDVNCTEVPVAIHADQLTPTWRVYSTGSNVFQTRAGCLIGAEHVNNSYECDIPIGAGICASYQTQTNSPRRARSVASQSIIAYTMSLGAENSVAYSNNSIAIPTNFTISVTTEILPVSMTKTSVDCTMYICGDSTECSNLLLQYGSFCTQLNRALTGIAVEQDKNTQEVFAQVKQIYKTPPIKDFGGFNFSQILPDPSKPSKRSFIEDLLFNKVTLADAGFIKQYGDCLGDIAARDLICAQKFNGLTVLPPLLTDEMIAQYTSALLAGTITSGWTFGAGAALQIPFAMQMAYRFNGIGVTQNVLYENQKLIANQFNSAIGKIQDSLSSTASALGKLQDVVNQNAQALNTLVKQLSSNCGAISSVLNDILSRLDKVEAEVQIDRLITCRLQSLQTYVTQQLIRAAEIRASANLAATKMSECVLGQSKRVDFCGKGYHLMSFPQSAPHGVVFLHVTYVPAQEKNFTTAPAICHDGKAHFPREGVFVSNGTHWFVTQRNFYEPQIITTDNTFVSGNCDVVIGIVNNTVYDPLQPELDSGGGGSDIIKLLNEQVNKEMQSSNLYMSMSSWCYTHSLDGAGLFLFDHAAEEYEHAKKLIIFLNENNVPVQLTSISAPEHKFEGLTQIFQKAYEHEQHISESINNIVDHAIKSKDHATFNFLQWYVAEQHEEEVLFKDILDKIELIGNENHGLYLADQYVKGIAKSRKS

SEQ ID NO: 9421 - protein, 1315 aa, Artificial Sequence
  SARS-CoV-2/South Korea/SNU01/2020__EPI_ISL_411929 spike protein (1-1147)(F970C_G999C) Ferritin construct
MFVFLVLLPLVSSQCVNLTTRTQLPPAYTNSFTRGVYYPDKVFRSSVLHSTQDLFLPFFSNVTWFHAIHVSGTNGTKRFDNPVLPFNDGVYFASTEKSNIIRGWIFGTTLDSKTQSLLIVNNATNVVIKVCEFQFCNDPFLGVYYHKNNKSWMESEFRVYSSANNCTFEYVSQPFLMDLEGKQGNFKNLREFVFKNIDGYFKIYSKHTPINLVRDLPQGFWALEPLVDLPIGINITRFQTLLALHRSYLTPGDSSSGWTAGAAAYYVGYLQPRTFLLKYNENGTITDAVDCALDPLSETKCTLKSFTVEKGIYQTSNFRVQPTESIVRFPNITNLCPFGEVFNATRFASVYAWNRKRISNCVADYSVLYNSASFSTFKCYGVSPTKLNDLCFTNVYADSFVIRGDEVRQIAPGQTGKIADYNYKLPDDFTGCVIAWNSNNLDSKVGGNYNYLYRLFRKSNLKPFERDISTEIYQAGSTPCNGVEGFNCYFPLQSYGFQPTNGVGYQPYRVVVLSFELLHAPATVCGPKKSTNLVKNKCVNFNFNGLTGTGVLTESNKKFLPFQQFGRDIADTTDAVRDPQTLEILDITPCSFGGVSVITPGTNTSNQVAVLYQDVNCTEVPVAIHADQLTPTWRVYSTGSNVFQTRAGCLIGAEHVNNSYECDIPIGAGICASYQTQTNSPRRARSVASQSIIAYTMSLGAENSVAYSNNSIAIPTNFTISVTTEILPVSMTKTSVDCTMYICGDSTECSNLLLQYGSFCTQLNRALTGIAVEQDKNTQEVFAQVKQIYKTPPIKDFGGFNFSQILPDPSKPSKRSFIEDLLFNKVTLADAGFIKQYGDCLGDIAARDLICAQKFNGLTVLPPLLTDEMIAQYTSALLAGTITSGWTFGAGAALQIPFAMQMAYRFNGIGVTQNVLYENQKLIANQFNSAIGKIQDSLSSTASALGKLQDVVNQNAQALNTLVKQLSSNCGAISSVLNDILSRLDKVEAEVQIDRLITCRLQSLQTYVTQQLIRAAEIRASANLAATKMSECVLGQSKRVDFCGKGYHLMSFPQSAPHGVVFLHVTYVPAQEKNFTTAPAICHDGKAHFPREGVFVSNGTHWFVTQRNFYEPQIITTDNTFVSGNCDVVIGIVNNTVYDPLQPELDSGGGGSDIIKLLNEQVNKEMQSSNLYMSMSSWCYTHSLDGAGLFLFDHAAEEYEHAKKLIIFLNENNVPVQLTSISAPEHKFEGLTQIFQKAYEHEQHISESINNIVDHAIKSKDHATFNFLQWYVAEQHEEEVLFKDILDKIELIGNENHGLYLADQYVKGIAKSRKS

SEQ ID NO: 9422 - protein, 1315 aa, Artificial Sequence
  SARS-CoV-2/China/WF0004/2020__EPI_ISL_413694 spike protein (1-1147)(F970C_G999C) Ferritin construct
MFVFLVLLPLVSSQCVNLTTRTQLPPAYTNSFTRGVYYPDKVFRSSVLHSTQDLFLPFFSNVTWFHAIHVSGTNGTKRFDNPVLPFNDGVYFASTEKSNIIRGWIFGTTLDSKTQSLLIVNNATNVVIKVCEFQFCNDPFLGVYYHKNNKSWTESEFRVYSSANNCTFEYVSQPFLMDLEGKQGNFKNLREFVFKNIDGYFKIYSKHTPINLVRDLPQGFSALEPLVDLPIGINITRFQTLLALHRSYLTPGDSSSGWTAGAAAYYVGYLQPRTFLLKYNENGTITDAVDCALDPLSETKCTLKSFTVEKGIYQTSNFRVQPTESIVRFPNITNLCPFGEVFNATRFASVYAWNRKRISNCVADYSVLYNSASFSTFKCYGVSPTKLNDLCFTNVYADSFVIRGDEVRQIAPGQTGKIADYNYKLPDDFTGCVIAWNSNNLDSKVGGNYNYLYRLFRKSNLKPFERDISTEIYQAGSTPCNGVEGFNCYFPLQSYGFQPTNGVGYQPYRVVVLSFELLHAPATVCGPKKSTNLVKNKCVNFNFNGLTGTGVLTESNKKFLPFQQFGRDIADTTDAVRDPQTLEILDITPCSFGGVSVITPGTNTSNQVAVLYQDVNCTEVPVAIHADQLTPTWRVYSTGSNVFQTRAGCLIGAEHVNNSYECDIPIGAGICASYQTQTNSPRRARSVASQSIIAYTMSLGAENSVAYSNNSIAIPTNFTISVTTEILPVSMTKTSVDCTMYICGDSTECSNLLLQYGSFCTQLNRALTGIAVEQDKNTQEVFAQVKQIYKTPPIKDFGGFNFSQILPDPSKPSKRSFIEDLLFNKVTLADAGFIKQYGDCLGDIAARDLICAQKFNGLTVLPPLLTDEMIAQYTSALLAGTITSGWTFGAGAALQIPFAMQMAYRFNGIGVTQNVLYENQKLIANQFNSAIGKIQDSLSSTASALGKLQDVVNQNAQALNTLVKQLSSNCGAISSVLNDILSRLDKVEAEVQIDRLITCRLQSLQTYVTQQLIRAAEIRASANLAATKMSECVLGQSKRFDFCGKGYHLMSFPQSAPHGVVFLHVTYVPAQEKNFTTAPAICHDGKAHFPREGVFVSNGTHWFVTQRNFYEPQIITTDNTFVSGNCDVVIGIVNNTVYDPLQPELDSGGGGSDIIKLLNEQVNKEMQSSNLYMSMSSWCYTHSLDGAGLFLFDHAAEEYEHAKKLIIFLNENNVPVQLTSISAPEHKFEGLTQIFQKAYEHEQHISESINNIVDHAIKSKDHATFNFLQWYVAEQHEEEVLFKDILDKIELIGNENHGLYLADQYVKGIAKSRKS

SEQ ID NO: 9423 - protein, 1315 aa, Artificial Sequence
  SARS-CoV-2/China/WF0028/2020__EPI_ISL_413791 spike protein (1-1147)(F970C_G999C) Ferritin construct
MFVFLVLLPLVSSQCVNLTTRTQLPPAYTNSFTRGVYYPDKVFRSSVLHSTQDLFLPFFSNVTWFHAIHVSGTNGTKRFDNPVLPFNDGVYFASTEKSNIIRGWIFGTTLDSKTQSLLIVNNATNVVIKVCEFQFCNDPFLGVYYHKNNKSWMESEFRVYSSANNCTFEYVSQPFLMDLEGKQGNFKNLREFVFKNIDGYFKIYSKHTPINLVRDLPQGFSALEPLVDLPIGINITRFQTLLALHRSYLTPGDSSSGWTAGAAAYYVGYLQPRTFLLKYNENGTITDAVDCALDPLSETKCTLKSFTVEKGIYQTSNFRVQPTESIVRFPNITNLCPFGEVFNATRFASVYAWNRKRISNCVADYSVLYNSASFSTFKCYGVSPTKLNDLCFTNVYADSFVIRGDEVRQIAPGQTGKIADYNYKLPDDFTGCVIAWNSNNLDSKVGGNYNYLYRLFRKSNLKPFERDISTEIYQAGSTPCNGVEGFNCYFPLQSYGFQPTNGVGYQPYRVVVLSFELLHAPATVCGPKKSTNLVKNKCVNFNFNGLTGTGVLTESNKKFLPFQQFGRDIADTTDAVRDPQTLEILDITPCSFGGVSVITPGTNTSNQVAVLYQDVNCTEVPVAIHADQLTPTWRVYSTGSNVFQTRAGCLIGAEHVNNSYECDIPIGAGICASYQTQTNSPRRARSVASQSIIAYTMSLGAENSVAYSNNSIAIPTNFTISVTTEILPVSMTKTSVDCTMYICGDSTECSNLLLQYGSFCTQLNRALTGIAVEQDKNTQEVFAQVKQIYKTPPIKDFGGFNFSQILPDPSKPSKRSFIEDLLFNKVTLADAGFIKQYGDCLGDIAARDLICAQKFNGLTVLPPLLTDEMIAQYTSALLAGTITSGWTFGAGAALQIPFAMQMAYRFNGIGVTQNVLYENQKLIANQFNSAIGKIQDSLSSTASALGKLQDVVNQNAQALNTLVKQLSSNCGAISSVLNDILSRLDKVEAEVQIDRLITCRLQSLQTYVTQQLIRAAEIRASANLAATKMSECVLGQSKRVDFCGKGYHLMSFPQSAPHGVVFLHVTYVPAQEKNFTTAPAICHDGKAHFPREGVFVSNGTHWFVTQRNFYEPQIITTDNTFVSGNCDVVIGIVNNTVYDPLQPELESGGGGSDIIKLLNEQVNKEMQSSNLYMSMSSWCYTHSLDGAGLFLFDHAAEEYEHAKKLIIFLNENNVPVQLTSISAPEHKFEGLTQIFQKAYEHEQHISESINNIVDHAIKSKDHATFNFLQWYVAEQHEEEVLFKDILDKIELIGNENHGLYLADQYVKGIAKSRKS

SEQ ID NO: 9424 - protein, 1315 aa, Artificial Sequence
  SARS-CoV-2/2019-nCoV/USA-CruiseA-18/2020__MT159716.1 spike protein (1-1147)(F970C_G999C) Ferritin construct
MFVFLVLLPLVSSQCVNLTTRTQLPPAYTNSFTRGVYYPDKVFRSSVLHSTQDLFLPFFSNVTWFHAIHVSGTNGTKRFDNPVLPFNDGVYFASTEKSNIIRGWIFGTTLDSKTQSLLIVNNATNVVIKVCEFQFCNDPFLGVYYHKNNKSWMESELRVYSSANNCTFEYVSQPFLMDLEGKQGNFKNLREFVFKNIDGYFKIYSKHTPINLVRDLPQGFSALEPLVDLPIGINITRFQTLLALHRSYLTPGDSSSGWTAGAAAYYVGYLQPRTFLLKYNENGTITDAVDCALDPLSETKCTLKSFTVEKGIYQTSNFRVQPTESIVRFPNITNLCPFGEVFNATRFASVYAWNRKRISNCVADYSVLYNSASFSTFKCYGVSPTKLNDLCFTNVYADSFVIRGDEVRQIAPGQTGKIADYNYKLPDDFTGCVIAWNSNNLDSKVGGNYNYLYRLFRKSNLKPFERDISTEIYQAGSTPCNGVEGFNCYFPLQSYGFQPTNGVGYQPYRVVVLSFELLHAPATVCGPKKSTNLVKNKCVNFNFNGLTGTGVLTESNKKFLPFQQFGRDIADTTDAVRDPQTLEILDITPCSFGGVSVITPGTNTSNQVAVLYQDVNCTEVPVAIHADQLTPTWRVYSTGSNVFQTRAGCLIGAEHVNNSYECDIPIGAGICASYQTQTNSPRRARSVASQSIIAYTMSLGAENSVAYSNNSIAIPTNFTISVTTEILPVSMTKTSVDCTMYICGDSTECSNLLLQYGSFCTQLNRALTGIAVEQDKNTQEVFAQVKQIYKTPPIKDFGGFNFSQILPDPSKPSKRSFIEDLLFNKVTLADAGFIKQYGDCLGDIAARDLICAQKFNGLTVLPPLLTDEMIAQYTSALLAGTITSGWTFGAGAALQIPFAMQMAYRFNGIGVTQNVLYENQKLIANQFNSAIGKIQDSLSSTASALGKLQDVVNQNAQALNTLVKQLSSNCGAISSVLNDILSRLDKVEAEVQIDRLITCRLQSLQTYVTQQLIRAAEIRASANLAATKMSECVLGQSKRVDFCGKGYHLMSFPQSAPHGVVFLHVTYVPAQEKNFTTAPAICHDGKAHFPREGVFVSNGTHWFVTQRNFYEPQIITTDNTFVSGNCDVVIGIVNNTVYDPLQPELDSGGGGSDIIKLLNEQVNKEMQSSNLYMSMSSWCYTHSLDGAGLFLFDHAAEEYEHAKKLIIFLNENNVPVQLTSISAPEHKFEGLTQIFQKAYEHEQHISESINNIVDHAIKSKDHATFNFLQWYVAEQHEEEVLFKDILDKIELIGNENHGLYLADQYVKGIAKSRKS

SEQ ID NO: 9425 - protein, 1315 aa, Artificial Sequence
  SARS-CoV-2/SARS-CoV-2/Yunnan-01/human/2020/CHN__MT049951.1 spike protein (1-1147)(F970C_G999C) Ferritin construct
MFVFLVLLPLVSSQCVNLTTRTQLPPANTNSFTRGVYYPDKVFRSSVLHSTQDLFLPFFSNVTWFHAIHVSGTNGTKRFDNPVLPFNDGVYFASTEKSNIIRGWIFGTTLDSKTQSLLIVNNATNVVIKVCEFQFCNDPFLGVYYHKNNKSWMESEFRVYSSANNCTFEYVSQPFLMDLEGKQGNFKNLREFVFKNIDGYFKIYSKHTPINLVRDLPQGFSALEPLVDLPIGINITRFQTLLALHRSYLTPGDSSSGWTAGAAAYYVGYLQPRTFLLKYNENGTITDAVDCALDPLSETKCTLKSFTVEKGIYQTSNFRVQPTESIVRFPNITNLCPFGEVFNATRFASVYAWNRKRISNCVADYSVLYNSASFSTFKCYGVSPTKLNDLCFTNVYADSFVIRGDEVRQIAPGQTGKIADYNYKLPDDFTGCVIAWNSNNLDSKVGGNYNYLYRLFRKSNLKPFERDISTEIYQAGSTPCNGVEGFNCYFPLQSYGFQPTNGVGYQPYRVVVLSFELLHAPATVCGPKKSTNLVKNKCVNFNFNGLTGTGVLTESNKKFLPFQQFGRDIADTTDAVRDPQTLEILDITPCSFGGVSVITPGTNTSNQVAVLYQDVNCTEVPVAIHADQLTPTWRVYSTGSNVFQTRAGCLIGAEHVNNSYECDIPIGAGICASYQTQTNSPRRARSVASQSIIAYTMSLGAENSVAYSNNSIAIPTNFTISVTTEILPVSMTKTSVDCTMYICGDSTECSNLLLQYGSFCTQLNRALTGIAVEQDKNTQEVFAQVKQIYKTPPIKDFGGFNFSQILPDPSKPSKRSFIEDLLFNKVTLADAGFIKQYGDCLGDIAARDLICAQKFNGLTVLPPLLTDEMIAQYTSALLAGTITSGWTFGAGAALQIPFAMQMAYRFNGIGVTQNVLYENQKLIANQFNSAIGKIQDSLSSTASALGKLQDVVNQNAQALNTLVKQLSSNCGAISSVLNDILSRLDKVEAEVQIDRLITCRLQSLQTYVTQQLIRAAEIRASANLAATKMSECVLGQSKRVDFCGKGYHLMSFPQSAPHGVVFLHVTYVPAQEKNFTTAPAICHDGKAHFPREGVFVSNGTHWFVTQRNFYEPQIITTDNTFVSGNCDVVIGIVNNTVYDPLQPELDSGGGGSDIIKLLNEQVNKEMQSSNLYMSMSSWCYTHSLDGAGLFLFDHAAEEYEHAKKLIIFLNENNVPVQLTSISAPEHKFEGLTQIFQKAYEHEQHISESINNIVDHAIKSKDHATFNFLQWYVAEQHEEEVLFKDILDKIELIGNENHGLYLADQYVKGIAKSRKS

SEQ ID NO: 9426 - protein, 1315 aa, Artificial Sequence
  SARS-CoV-2/USA/WA-UW292/2020__EPI_ISL_418077 spike protein (1-1147)(F970C_G999C) Ferritin construct
MFVFLVLLPLVSSQCVNLTTRTQLPPAYTNSFTRGVYYPDKVFRSSVLHSTQDLFLPFFSNVTWFHAIHVSGTNGTKRFDNPVLPFNDGVYFASTEKSNIIRGWIFGTTLDSKTQSLLIVNNATNVVIKVCEFQFCNDPFLGVYYHKNNKSWMESEFRVYSSANNCTFEYVSQPFLMDLEGKQGNFKNLREFVFKNIDGYFKIYSKHTPINLVRDLPQGFSALEPLVDLPIGINITRFQTLLALHRSYLTPGDSSSGWTAGAAAYYVGYLQPRTFLLKYNENGTITDAVDCALDPLSETKCTLKSFTVEKGIYQTSNFRVQPTESIVRFPNITNLCPFGEVFNATRFASVYAWNRKRISNCVADYSVLYNSASFSTFKCYGVSPTKLNDLCFTNVYADSFVIRGDEVRQIAPGQTGKIADYNYKLPDDFTGCVIAWNSNNLDSKVGGNYNYLYRLFRKSNLKPFERDISTEIYQASSTPCNGVEGFNCYFPLQSYGFQPTNGVGYQPYRVVVLSFELLHAPATVCGPKKSTNLVKNKCVNFNFNGLTGTGVLTESNKKFLPFQQFGRDIADTTDAVRDPQTLEILDITPCSFGGVSVITPGTNTSNQVAVLYQDVNCTEVPVAIHADQLTPTWRVYSTGSNVFQTRAGCLIGAEHVNNSYECDIPIGAGICASYQTQTNSPRRARSVASQSIIAYTMSLGAENSVAYSNNSIAIPTNFTISVTTEILPVSMTKTSVDCTMYICGDSTECSNLLLQYGSFCTQLNRALTGIAVEQDKNTQEVFAQVKQIYKTPPIKDFGGFNFSQILPDPSKPSKRSFIEDLLFNKVTLADAGFIKQYGDCLGDIAARDLICAQKFNGLTVLPPLLTDEMIAQYTSALLAGTITSGWTFGAGAALQIPFAMQMAYRFNGIGVTQNVLYENQKLIANQFNSAIGKIQDSLSSTASALGKLQDVVNQNAQALNTLVKQLSSNCGAISSVLNDILSRLDKVEAEVQIDRLITCRLQSLQTYVTQQLIRAAEIRASANLAATKMSECVLGQSKRVDFCGKGYHLMSFPQSAPHGVVFLHVTYVPAQEKNFTTAPAICHDGKAHFPREGVFVSNGTHWFVTQRNFYEPQIITTDNTFVSGNCDVVIGIVNNTVYDPLQPELDSGGGGSDIIKLLNEQVNKEMQSSNLYMSMSSWCYTHSLDGAGLFLFDHAAEEYEHAKKLIIFLNENNVPVQLTSISAPEHKFEGLTQIFQKAYEHEQHISESINNIVDHAIKSKDHATFNFLQWYVAEQHEEEVLFKDILDKIELIGNENHGLYLADQYVKGIAKSRKS

SEQ ID NO: 9427 - protein, 1315 aa, Artificial Sequence
  SARS-CoV-2/Iceland/192/2020__EPI_ISL_417819 spike protein (1-1147)(F970C_G999C) Ferritin construct
MFVFFVLLPLVSSQCVNLTTRTQLPPAYTNSFTRGVYYPDKVFRSSVLHSTQDLFLPFFSNVTWFHAIHVSGTNGTKRFDNPVLPFNDGVYFASTEKSNIIRGWIFGTTLDSKTQSLLIVNNATNVVIKVCEFQFCNDPFLGVYYHKNNKSWMESEFRVYSSANNCTFEYVSQPFLMDLEGKQGNFKNLREFVFKNIDGYFKIYSKHTPINLVRDLPQGFSALEPLVDLPIGINITRFQTLLALHRSYLTPGDSSSGWTAGAAAYYVGYLQPRTFLLKYNENGTITDAVDCALDPLSETKCTLKSFTVEKGIYQTSNFRVQPTESIVRFPNITNLCPFGEVFNATRFASVYAWNRKRISNCVADYSVLYNSASFSTFKCYGVSPTKLNDLCFTNVYADSFVIRGDEVRQIAPGQTGKIADYNYKLPDDFTGCVIAWNSNNLDSKVGGNYNYLYRLFRKSNLKPFERDISTEIYQAGSTPCNGVEGFNCYFPLQSYGFQPTNGVGYQPYRVVVLSFELLHAPATVCGPKKSTNLVKNKCVNFNFNGLTGTGVLTESNKKFLPFQQFGRDIADTTDAVRDPQTLEILDITPCSFGGVSVITPGTNTSNQVAVLYQGVNCTEVPVAIHADQLTPTWRVYSTGSNVFQTRAGCLIGAEHVNNSYECDIPIGAGICASYQTQTNSPRRARSVASQSIIAYTMSLGAENSVAYSNNSIAIPTNFTISVTTEILPVSMTKTSVDCTMYICGDSTECSNLLLQYGSFCTQLNRALTGIAVEQDKNTQEVFAQVKQIYKTPPIKDFGGFNFSQILPDPSKPSKRSFIEDLLFNKVTLADAGFIKQYGDCLGDIAARDLICAQKFNGLTVLPPLLTDEMIAQYTSALLAGTITSGWTFGAGAALQIPFAMQMAYRFNGIGVTQNVLYENQKLIANQFNSAIGKIQDSLSSTASALGKLQDVVNQNAQALNTLVKQLSSNCGAISSVLNDILSRLDKVEAEVQIDRLITCRLQSLQTYVTQQLIRAAEIRASANLAATKMSECVLGQSKRVDFCGKGYHLMSFPQSAPHGVVFLHVTYVPAQEKNFTTAPAICHDGKAHFPREGVFVSNGTHWFVTQRNFYEPQIITTDNTFVSGNCDVVIGIVNNTVYDPLQPELDSGGGGSDIIKLLNEQVNKEMQSSNLYMSMSSWCYTHSLDGAGLFLFDHAAEEYEHAKKLIIFLNENNVPVQLTSISAPEHKFEGLTQIFQKAYEHEQHISESINNIVDHAIKSKDHATFNFLQWYVAEQHEEEVLFKDILDKIELIGNENHGLYLADQYVKGIAKSRKS

SEQ ID NO: 9428 - protein, 1315 aa, Artificial Sequence
  SARS-CoV-2/Belgium/ULG-6939/2020__EPI_ISL_417020 spike protein (1-1147)(F970C_G999C) Ferritin construct
MFVFLVLLPLVSSQCVNLTTRTQLPPAYTNSFTRGVYYPDKVFRSSVLHSTQDLFLPFFSNVTWFHAIHVSGTNGTKRFDNPVLPFNDGVYFASTEKSNIIRGWIFGTTLDSKTQSLLIVNNATNVVIKVCEFQFCNDPFLGVYYHKNNKSWMESEFRVYSSANNCTFEYVSQPFLMDLEGKQGNFKNLREFVFKNIDGYFKIYSKHTPINLVRDLPQGFSALEPLVDLPIGINITRFQTLLALHRSYLTPGDSSSGWTAGAAAYYVGYLQPRTFLLKYNENGTITDAVDCALDPLSETKCTLKSFTVEKGIYQTSNFRVQPTESIVRFPNITNLCPFGEVFNATRFASVYAWNRKRISNCVADYSVLYNSASFSTFKCYGVSPTKLNDLCFTNVYADSFVIRGDEVRQIAPGQTGKIADYNYKLPDDFTGCVIAWNSNNLDSKVGGNYNYLYRLFRKSNLKPFERDISTEIYQAGSTPCNGVEGFNCYFPLQSYGFQPTNGVGYQPYRVVVLSFELLHAPATVCGPKKSTNLVKNKCVNFNFNGLTGTGVLTESNKKFLPFQQFGRDIADTTDAVRDPQTLEILDITPCSFGGVSVITPGTNTSNQVAVLYQGVNCTEVPVAIHADQLTPTWRVYSTGSNVFQTRAGCLIGAEHVNNSYECDIPIGAGICASYQTQTNSPRRARSVASQSIIAYTMSLGAENSVVYSNNSIAIPTNFTISVTTEILPVSMTKTSVDCTMYICGDSTECSNLLLQYGSFCTQLNRALTGIAVEQDKNTQEVFAQVKQIYKTPPIKDFGGFNFSQILPDPSKPSKRSFIEDLLFNKVTLADAGFIKQYGDCLGDIAARDLICAQKFNGLTVLPPLLTDEMIAQYTSALLAGTITSGWTFGAGAALQIPFAMQMAYRFNGIGVTQNVLYENQKLIANQFNSAIGKIQDSLSSTASALGKLQDVVNQNAQALNTLVKQLSSNCGAISSVLNDILSRLDKVEAEVQIDRLITCRLQSLQTYVTQQLIRAAEIRASANLAATKMSECVLGQSKRVDFCGKGYHLMSFPQSAPHGVVFLHVTYVPAQEKNFTTAPAICHDGKAHFPREGVFVSNGTHWFVTQRNFYEPQIITTDNTFVSGNCDVVIGIVNNTVYDPLQPELDSGGGGSDIIKLLNEQVNKEMQSSNLYMSMSSWCYTHSLDGAGLFLFDHAAEEYEHAKKLIIFLNENNVPVQLTSISAPEHKFEGLTQIFQKAYEHEQHISESINNIVDHAIKSKDHATFNFLQWYVAEQHEEEVLFKDILDKIELIGNENHGLYLADQYVKGIAKSRKS

SEQ ID NO: 9429 - protein, 1315 aa, Artificial Sequence
  SARS-CoV-2/France/HF2496/2020__EPI_ISL_418231 spike protein (1-1147)(F970C_G999C) Ferritin construct
MFVFLVLLPLVSSQCVNLTTRTQLPPAYTNSFTRGVYYPDKVFRSSVLHSTQDLFLPFFSNVTWFHAIHVSGTNGTKRFDNPVLPFNDGVYFASTEKSNIIRGWIFGTTLDSKTQSLLIVNNATNVVIKVCEFQFCNDPFLGVYYHKNNKSWMESEFRVYSSANNCTFEYVSQPFLMDLEGKQGNFKNLREFVFKNIDGYFKIYSKHTPINLVRDLPQGFSALEPLVDLPIGINITRFQTLLALHRSYLTPGDSSSGWTAGAAAYYVGYLQPRTFLLKYNENGTITDAVDCALDPLSETKCTLKSFTVEKGIYQTSNFRVQPTESIVRFPNITNLCPFGEVFNATRFASVYAWNRKRISNCVADYSVLYNSASFSTFKCYGVSPTKLNDLCFTNVYADSFVIRGDEVRQIAPGQTGKIADYNYKLPDDFTGCVIAWNSNNLDSKVGGNYNYLYRLFRKSNLKPFERDISTEIYQAGSTPCNGVEGFNCYFPLQSYGFQPTNGVGYQPYRVVVLSFELLHAPATVCGPKKSTNLVKNKCVNFNFNGLTGTGVLTESNKKFLPFQQFGRDIADTTDAVRDPQTLEILDITPCSFGGVSVITPGTNTSNQVAVLYQGVNCTEVPVAIHADQLTPTWRVYSTGSNVFQTRAGCLIGAEHVNNSYECDIPIGAGICASYQTQTNSPRRARSVASQSIIAYTMSLGAENSVAYSNNSIAIPTNFTISVTTEILPVSMTKTSVDCTMYICGDSTECSNLLLQYGSFCTQLNRALTGIAVEQDKNTQEVFAQVKQIYKTPPIKDFGGFNFSQILPDPSKPSKRSFIEDLLFNKVTLADAGFIKQYGDCLGDIVARDLICAQKFNGLTVLPPLLTDEMIAQYTSALLAGTITSGWTFGAGAALQIPFAMQMAYRFNGIGVTQNVLYENQKLIANQFNSAIGKIQDSLSSTASALGKLQDVVNQNAQALNTLVKQLSSNCGAISSVLNDILSRLDKVEAEVQIDRLITCRLQSLQTYVTQQLIRAAEIRASANLAATKMSECVLGQSKRVDFCGKGYHLMSFPQSAPHGVVFLHVTYVPAQEKNFTTAPAICHDGKAHFPREGVFVSNGTHWFVTQRNFYEPQIITTDNTFVSGNCDVVIGIVNNTVYDPLQPELDSGGGGSDIIKLLNEQVNKEMQSSNLYMSMSSWCYTHSLDGAGLFLFDHAAEEYEHAKKLIIFLNENNVPVQLTSISAPEHKFEGLTQIFQKAYEHEQHISESINNIVDHAIKSKDHATFNFLQWYVAEQHEEEVLFKDILDKIELIGNENHGLYLADQYVKGIAKSRKS

SEQ ID NO: 9430 - protein, 1315 aa, Artificial Sequence
  SARS-CoV-2/USA/WA-UW291/2020__EPI_ISL_418076 spike protein (1-1147)(F970C_G999C) Ferritin construct
MFVFLVLLPLVSSQCVNLTTRTQLPPAYTNSFTRGVYYPDKVFRSSVLHSTQDLFLPFFSNVTWFHAIHVSGTNGTKRFDNPVLPFNDGVYFASTEKSNIIRGWIFGTTLDSKTQSLLIVNNATNVVIKVCEFQFCNDPFLGVYYHKNNKSWMESEFRVYSSANNCTFEYVSQPFLMDLEGKQGNFKNLREFVFKNIDGYFKIYSKHTPINLVRDLPQGFSALEPLVDLPIGINITRFQTLLALHRSYLTPGDSSSGWTAGAAAYYVGYLQPRTFLLKYNENGTITDAVDCALDPLSETKCTLKSFTVEKGIYQTSNFRVQPTESIVRFPNITNLCPFGEVFNATRFASVYAWNRKRISNCVADYSVLYNSASFSTFKCYGVSPTKLNDLCFTNVYADSFVIRGDEVRQIAPGQTGKIADYNYKLPDDFTGCVIAWNSNNLDSKVGGNYNYLYRLFRKSNLKPFERDISTEIYQAGSTPCNGVEGFNCYFPLQSYGFQPTNGVGYQPYRVVVLSFELLHAPATVCGPKKSTNLVKNKCVNFNFNGLTGTGVLTESNKKFLPFQQFGRDIADTTDAVRDPQTLEILDITPCSFGGVSVITPGTNTSNQVAVLYQGVNCTEVPVAIHADQLTPTWRVYSTGSNVFQTRAGCLIGAEHVNNSYECDIPIGAGICASYQTQTNSPRRARSVASQSIIAYTMSLGAENSVAYSNNSIAIPTNFTISVTTEILPVSMTKTSVDCTMYICGDSTECSNLLLQYGSFCTQLNRALTGIAVEQDKNTQEVFAQVKQIYKTPPIKDFGGFNFSQILPDPSKPSKRSFIEDLLFNKVTLADAGFIKQYGDCLGDIAARDLICAQKFNGLTVLPPLLTDEMIAQYTSALLAGTITSGWTFGAGAALQIPFAMQMAYRFNGIGVTQNVLYENQKLIANQFNSAIGKIQYSLSSTASALGKLQDVVNQNAQALNTLVKQLSSNCGAISSVLNDILSRLDKVEAEVQIDRLITCRLQSLQTYVTQQLIRAAEIRASANLAATKMSECVLGQSKRVDFCGKGYHLMSFPQSAPHGVVFLHVTYVPAQEKNFTTAPAICHDGKAHFPREGVFVSNGTHWFVTQRNFYEPQIITTDNTFVSGNCDVVIGIVNNTVYDPLQPELDSGGGGSDIIKLLNEQVNKEMQSSNLYMSMSSWCYTHSLDGAGLFLFDHAAEEYEHAKKLIIFLNENNVPVQLTSISAPEHKFEGLTQIFQKAYEHEQHISESINNIVDHAIKSKDHATFNFLQWYVAEQHEEEVLFKDILDKIELIGNENHGLYLADQYVKGIAKSRKS

SEQ ID NO: 9431 - protein, 1315 aa, Artificial Sequence; identical to SEQ ID NO: 9394
  SARS-CoV-2/Portugal/PT0034/2020__EPI_ISL_418019 spike protein (1-1147)(F970C_G999C) Ferritin construct

SEQ ID NO: 9432 - protein, 1315 aa, Artificial Sequence; identical to SEQ ID NO: 9386
  SARS-CoV-2/Iceland/202/2020__EPI_ISL_417750 spike protein (1-1147)(F970C_G999C) Ferritin construct

SEQ ID NO: 9433 - protein, 1315 aa, Artificial Sequence
  SARS-CoV-2/USA/WA-UW261/2020__EPI_ISL_418046 spike protein (1-1147)(F970C_G999C) Ferritin construct
MFVFLVLLPLVSSQCVNLTTRTQLPPAYTNSFTRGVYYPDKVFRSSVLHSTQDLFLPFFSNVTWFHAIHVSGTNGTKRFDNPVLPFNDGVYFASTEKSNIIRGWIFGTTLDSKTQSLLIVNNATNVVIKVCEFQFCNDPFLGVYYHKNNKSWMESEFRVYSSANNCTFEYVSQPFLMDLEGKQGNFKNLREFVFKNIDGYFKIYSKHTPINLVRDLPQGFSALEPLVDLPIGINITRFQTLLALHRSYLTPGDSSSGWTAGAAAYYVGYLQPRTFLLKYNENGTITDAVDCALDPLSETKCTLKSFTVEKGIYQTSNFRVQPTESIVRFPNITNLCPFGEVFNATRFTSVYAWNRKRISNCVADYSVLYNSASFSTFKCYGVSPTKLNDLCFTNVYADSFVIRGDEVRQIAPGQTGKIADYNYKLPDDFTGCVIAWNSNNLDSKVGGNYNYLYRLFRKSNLKPFERDISTEIYQAGSTPCNGVEGFNCYFPLQSYGFQPTNGVGYQPYRVVVLSFELLHAPATVCGPKKSTNLVKNKCVNFNFNGLTGTGVLTESNKKFLPFQQFGRDIADTTDAVRDPQTLEILDITPCSFGGVSVITPGTNTSNQVAVLYQDVNCTEVPVAIHADQLTPTWRVYSTGSNVFQTRAGCLIGAEHVNNSYECDIPIGAGICASYQTQTNSPRRARSVASQSIIAYTMSLGAENSVAYSNNSIAIPTNFTISVTTEILPVSMTKTSVDCTMYICGDSTECSNLLLQYGSFCTQLNRALTGIAVEQDKNTQEVFAQVKQIYKTPPIKDFGGFNFSQILPDPSKPSKRSFIEDLLFNKVTLADAGFIKQYGDCLGDIAARDLICAQKFNGLTVLPPLLTDEMIAQYTSALLAGTITSGWTFGAGAALQIPFAMQMAYRFNGIGVTQNVLYENQKLIANQFNSAIGKIQDSLSSTASALGKLQDVVNQNAQALNTLVKQLSSNCGAISSVLNDILSRLDKVEAEVQIDRLITCRLQSLQTYVTQQLIRAAEIRASANLAATKMSECVLGQSKRVDFCGKGYHLMSFPQSAPHGVVFLHVTYVPAQEKNFTTAPAICHDGKAHFPREGVFVSNGTHWFVTQRNFYEPQIITTDNTFVSGNCDVVIGIVNNTVYDPLQPELDSGGGGSDIIKLLNEQVNKEMQSSNLYMSMSSWCYTHSLDGAGLFLFDHAAEEYEHAKKLIIFLNENNVPVQLTSISAPEHKFEGLTQIFQKAYEHEQHISESINNIVDHAIKSKDHATFNFLQWYVAEQHEEEVLFKDILDKIELIGNENHGLYLADQYVKGIAKSRKS

SEQ ID NO: 9434 - protein, 1315 aa, Artificial Sequence
  SARS-CoV-2/Portugal/PT0035/2020__EPI_ISL_418020 spike protein (1-1147)(F970C_G999C) Ferritin construct
MFVFLVLLPLVSSQCVNLTTRTQLPPAYTNSFTRGVYYPDKVFRSSVLHSTQDLFLPFFSNVTWFHAIHVSGTNGTKRFDNPVLPFNDGVYFASTEKSNIIRGWIFGTTLDSKTQSLLIVNNATNVVIKVCEFQFCNDPFLGVYYHKNNKSWMESEFRVYSSANNCTFEYVSQPFLMDLEGKQGNFKNLREFVFKNIDGYFKIYSKHTPINLVRDLPQGFSALEPLVDLPIGINITRFQTLLALHRSYLTPGDSSSGWTAGAAAYYVGYLQPRTFLLKYNENGTITDAVDCALDPLSETKCTLKSFTVEKGIYQTSNFRVQPTESIVRFPNITNLCPFGEVFNATRFASVYAWNRKRISNCVADYSVLYNSASFSTFKCYGVSPTKLNDLCFTNVYADSFVIRGDEVRQIAPGQTGKIADYNYKLPDDFTGCVIAWNSNNLDSKVGGNYNYLYRLFRKSNLKPFERDISTEIYQAGSTPCNGVEGFNCYFPLQSYGFQPTNGVGYQPYRVVVLSFELLHAPATVCGPKKSTNLVKNKCVNFNFNGLTGTGVLTESNKKFLPFQQFGRDIADTTDAVRDPQTLEILDITPCSFGGVSVITPGTNTSNQVAVLYQDVNCTEVPVAIHADQLTPTWRVYSTGSNVFQTRAGCLIGAEHVNNSYECDIPIGAGICASYQTQTNSPRRARSVASQSIIAYTMSLGAENSVAYSNNSIAIPTNFTISVTTEILPVSMTKTSVDCTMYICGDSTECSNLLLQYGSFCTQLNRALTGIAVEQDKNTQEVFAQVKQIYKTPPIKDFGGFNFSQILPDPSKPSKRSFIEDLLFNKVTLADAGFIKQYGDCLGDISARDLICAQKFNGLTVLPPLLTDEMIAQYTSALLAGTITSGWTFGAGAALQIPFAMQMAYRFNGIGVTQNVLYENQKLIANQFNSAIGKIQDSLSSTASALGKLQDVVNQNAQALNTLVKQLSSNCGAISSVLNDILSRLDKVEAEVQIDRLITCRLQSLQTYVTQQLIRAAEIRASANLAATKMSECVLGQSKRVDFCGKGYHLMSFPQSAPHGVVFLHVTYVPAQEKNFTTAPAICHDGKAHFPREGVFVSNGTHWFVTQRNFYEPQIITTDNTFVSGNCDVVIGIVNNTVYDPLQPELDSGGGGSDIIKLLNEQVNKEMQSSNLYMSMSSWCYTHSLDGAGLFLFDHAAEEYEHAKKLIIFLNENNVPVQLTSISAPEHKFEGLTQIFQKAYEHEQHISESINNIVDHAIKSKDHATFNFLQWYVAEQHEEEVLFKDILDKIELIGNENHGLYLADQYVKGIAKSRKS

SEQ ID NO: 9435 - protein, 1315 aa, Artificial Sequence
  SARS-CoV-2/USA/NY-NYUMC7/2020__EPI_ISL_418192 spike protein (1-1147)(F970C_G999C) Ferritin construct
MFVFLVLLPLVSSQCVNLTTRTQLPPAYTNSFTRGVYYPDKVFRSSVLHSTQDLFLPFFSNVTWFHAIHVSGTNGTKRFDNPVLPFNDGVYFASTEKSNIIRGWIFGTTLDSKTQSLLIVNNATNVVIKVCEFQFCNDPFLGVYHHKNNKSWMESEFRVYSSANNCTFEYVSQPFLMDLEGKQGNFKNLREFVFKNIDGYFKIYSKHTPINLVRDLPQGFSALEPLVDLPIGINITRFQTLLALHRSYLTPGDSSSGWTAGAAAYYVGYLQPRTFLLKYNENGTITDAVDCALDPLSETKCTLKSFTVEKGIYQTSNFRVQPTESIVRFPNITNLCPFGEVFNATRFASVYAWNRKRISNCVADYSVLYNSASFSTFKCYGVSPTKLNDLCFTNVYADSFVIRGDEVRQIAPGQTGKIADYNYKLPDDFTGCVIAWNSNNLDSKVGGNYNYLYRLFRKSNLKPFERDISTEIYQAGSTPCNGVEGFNCYFPLQSYGFQPTNGVGYQPYRVVVLSFELLHAPATVCGPKKSTNLVKNKCVNFNFNGLTGTGVLTESNKKFLPFQQFGRDIADTTDAVRDPQTLEILDITPCSFGGVSVITPGTNTSNQVAVLYQGVNCTEVPVAIHADQLTPTWRVYSTGSNVFQTRAGCLIGAEHVNNSYECDIPIGAGICASYQTQTNSPRRARSVASQSIIAYTMSLGAENSVAYSNNSIAIPTNFTISVTTEILPVSMTKTSVDCTMYICGDSTECSNLLLQYGSFCTQLNRALTGIAVEQDKNTQEVFAQVKQIYKTPPIKDFGGFNFSQILPDPSKPSKRSFIEDLLFNKVTLADAGFIKQYGDCLGDIAARDLICAQKFNGLTVLPPLLTDEMIAQYTSALLAGTITSGWTFGAGAALQIPFAMQMAYRFNGIGVTQNVLYENQKLIANQFNSAIGKIQDSLSSTASALGKLQDVVNQNAQALNTLVKQLSSNCGAISSVLNDILSRLDKVEAEVQIDRLITCRLQSLQTYVTQQLIRAAEIRASANLAATKMSECVLGQSKRVDFCGKGYHLMSFPQSAPHGVVFLHVTYVPAQEKNFTTAPAICHDGKAHFPREGVFVSNGTHWFVTQRNFYEPQIITTDNTFVSGNCDVVIGIVNNTVYDPLQPELDSGGGGSDIIKLLNEQVNKEMQSSNLYMSMSSWCYTHSLDGAGLFLFDHAAEEYEHAKKLIIFLNENNVPVQLTSISAPEHKFEGLTQIFQKAYEHEQHISESINNIVDHAIKSKDHATFNFLQWYVAEQHEEEVLFKDILDKIELIGNENHGLYLADQYVKGIAKSRKS

SEQ ID NO: 9436 - protein, 1315 aa, Artificial Sequence
  SARS-CoV-2/Iceland/189/2020__EPI_ISL_417709 spike protein (1-1147)(F970C_G999C) Ferritin construct
MFVFLVLLPLVSSQCVNLTTRTQLPPAYTNSFTRGVYYPDKVFRSSVLHSTQDLFLPFFSNVTWFHAIHVSGTNGTKRFDNPVLPFNDGVYFASTEKSNIIRGWIFGTTLDSKTQSLLIVNNATNVVIKVCEFQFCNDPFLGVYYHKNNKSWMESEFRVYSSANNCTFEYVSQPFLMDLEGKQGNFKNLREFVFKNIDGYFKIYSKHTPINLVRDLPQGFSALEPLVDLPIGINITRFQTLLALHRSYLTPGDSSSGWTAGAAAYYVGYLQPRTFLLKYNENGTITDAVDCALDPLSETKCTLKSFTVEKGIYQTSNFRVQPTESIVRFPNITNLCPFGEVFNATRFASVYAWNRKRISNCVADYSVLYNSASFSTFKCYGVSPTKLNDLCFTNVYADSFVIRGDEVRQIAPGQTGKIADYNYKLPDDFTGCVIAWNSNNLDSKVGGNYNYLYRLFRKSNLKPFERDISTEIYQAGSTPCNGVEGFNCYFPLQSYGFQPTNGVGYQPYRVVVLSFELLHAPATVCGPKKSTNLVKNKCVNFNFNGLTGTGVLTESNKKFLPFQQFGRDIADTTDAVRDPQTLEILDITPCSFGGVSVITPGTNTSNQVAVLYQGVNCTEVPVAIHADQLTPTWRVYSTGSNVFQTRAGCLIGAEHVNNSYECDIPIGAGICASYQTQTNSPRRARSVASQSIIAYTMSLGAENSVAYSNNSIAIPTNFTISVTTEILPVSMTKTSVDCTMYICGDSTECSNLLLQYGSFCTQLNRALTGIAVEQDKNTQEVFAQVKQIYKTPPIKDFGGFNFSQILPDPSKPSKRSFIEDLLFNKVTLADAGFTKQYGDCLGDIAARDLICAQKFNGLTVLPPLLTDEMIAQYTSALLAGTITSGWTFGAGAALQIPFAMQMAYRFNGIGVTQNVLYENQKLIANQFNSAIGKIQDSLSSTASALGKLQDVVNQNAQALNTLVKQLSSNCGAISSVLNDILSRLDKVEAEVQIDRLITCRLQSLQTYVTQQLIRAAEIRASANLAATKMSECVLGQSKRVDFCGKGYHLMSFPQSAPHGVVFLHVTYVPAQEKNFTTAPAICHDGKAHFPREGVFVSNGTHWFVTQRNFYEPQIITTDNTFVSGNCDVVIGIVNNTVYDPLQPELDSGGGGSDIIKLLNEQVNKEMQSSNLYMSMSSWCYTHSLDGAGLFLFDHAAEEYEHAKKLIIFLNENNVPVQLTSISAPEHKFEGLTQIFQKAYEHEQHISESINNIVDHAIKSKDHATFNFLQWYVAEQHEEEVLFKDILDKIELIGNENHGLYLADQYVKGIAKSRKS

SEQ ID NO: 9437 - protein, 1315 aa, Artificial Sequence
  SARS-CoV-2/Australia/NSW56/2020__EPI_ISL_417408 spike protein (1-1147)(F970C_G999C) Ferritin construct
MFVFLVLLPLVSSQCVNLTTRTQLPPAYTNSFTRGVYYPDKVFRSSVLHSTQDLFLPFFSNVTWFHAIHVSGTNGTKRFDNPVLPFNDGVYFASTEKSNIIRGWIFGTTLDSKTQSLLIVNNATNVVIKVCEFQFCNDPFLGVYYHKNNKSWMESEFRVYSSANNCTFEYVSQPFLMDLEGKQGNFKNLREFVFKNIDGYFKIYSKHTPINLVRDLPQGFSALEPLVDLPIGINITRFQTLLALHRSYLTPGDSSSGWTAGAAAYYVGYLQPRTFLLKYNENGTITDAVDCALDPLSETKCTLKSFTVEKGIYQTSNFRVQPTESIVRFPNITNLCPFGEVFNATRFASVYAWNRKRISNCVADYSVLYNSASFSTFKCYGVSPTKLNDLCFTNVYADSFVIRGDEVRQIAPGQTGKIADYNYKLPDDFTGCVIAWNSNNLDSKVGGNYNYLYRLFRKSNLKPFERDISTEIYQAGSTPCNGVEGFNCYFPLQSYGFQPTNGVGYQPYRVVVLSFELLHAPATVCGPKKSTNLVKNKCVNFNFNGLTGTGVLTESNKKFLPFQQFGRDIADTTDAVRDPQTLEILDITPCSFGGVSVITPGTNTSNQVAVLYQDVNCTEVPVAIHADQLTPTWRVYSTGSNVFQTRAGCLIGAEHVNNSYECDIPIGAGICASYQTQTNSPRRARSVASQSIIAYTMSLGAENSVAYSNNSIAIPTNFTISVTTEILPVSMTKTSVDCTMYICGDSTECSNLLLQYGSFCTQLNRALTGIAVEQDKNTQEVFAQVKQIYKTPPIKDFGGFNFSQILPDSSKPSKRSFIEDLLFNKVTLADAGFIKQYGDCLGDIAARDLICAQKFNGLTVLPPLLTDEMIAQYTSALLAGTITSGWTFGAGAALQIPFAMQMAYRFNGIGVTQNVLYENQKLIANQFNSAIGKIQDSLSSTASALGKLQDVVNQNAQALNTLVKQLSSNCGAISSVLNDILSRLDKVEAEVQIDRLITCRLQSLQTYVTQQLIRAAEIRASANLAATKMSECVLGQSKRVDFCGKGYHLMSFPQSAPHGVVFLHVTYVPAQEKNFTTAPAICHDGKAHFPREGVFVSNGTHWFVTQRNFYEPQIITTDNTFVSGNCDVVIGIVNNTVYDPLQPELDSGGGGSDIIKLLNEQVNKEMQSSNLYMSMSSWCYTHSLDGAGLFLFDHAAEEYEHAKKLIIFLNENNVPVQLTSISAPEHKFEGLTQIFQKAYEHEQHISESINNIVDHAIKSKDHATFNFLQWYVAEQHEEEVLFKDILDKIELIGNENHGLYLADQYVKGIAKSRKS

SEQ ID NO: 9438 - protein, 1315 aa, Artificial Sequence
  SARS-CoV-2/Iceland/280/2020__EPI_ISL_417608 spike protein (1-1147)(F970C_G999C) Ferritin construct
MFVFLVLLPLVSSQCVNLTTRTQLPPAYTNSFTRGVYYPDKVFRSSVLHSTQDLFLPFFSNVTWFHAIHVSGTNGTKRFDNPVLPFNDGVYFASTEKSNIIRGWIFGTTLDSKTQSLLIVNNATNVVIKVCEFQFCNDPFLGVYYHKNNKSWMESEFRVYSSANNCTFEYVSQPFLMDLEGKQGNFKNLREFVFKNIDGYFKIYSKHTPINLVRDLPQGFSALEPLVDLPIGINITRFQTLLALHRSYLTPGDSSSGWTAGAAAYYVGYLQPRTFLLKYNENGTITDAVDCALDPLSETKCTLKSFTVEKGIYQTSNFRVQPTESIVRFPNITNLCPFGEVFNATRFASVYAWNRKRISNCVADYSVLYNSASFSTFKCYGVSPTKLNDLCFTNVYADSFVIRGDEVRQIAPGQTGKIADYNYKLPDDFTGCVIAWNSNNLDSKVGGNYNYLYRLFRKSNLKPFERDISTEIYQAGSTPCNGVEGFNCYFPLQSYGFQPTNGVGYQPYRVVVLSFELLHAPATVCGPKKSTNLVKNKCVNFNFNGLTGTGVLTESNKKFLPFQQFGRDIADTTDAVRDPQTLEILDITPCSFGGVSVITPGTNTSNQVAVLYQGVNCTEVPVAIHADQLTPTWRVYSTGSNVFQTRAGCLIGAEHVNNSYECDIPIGAGICASYHTQTNSPRRARSVASQSIIAYTMSLGAENSVAYSNNSIAIPTNFTISVTTEILPVSMTKTSVDCTMYICGDSTECSNLLLQYGSFCTQLNRALTGIAVEQDKNTQEVFAQVKQIYKTPPIKDFGGFNFSQILPDPSKPSKRSFIEDLLFNKVTLADAGFIKQYGDCLGDIAARDLICAQKFNGLTVLPPLLTDEMIAQYTSALLAGTITSGWTFGAGAALQIPFAMQMAYRFNGIGVTQNVLYENQKLIANQFNSAIGKIQDSLSSTASALGKLQDVVNQNAQALNTLVKQLSSNCGAISSVLNDILSRLDKVEAEVQIDRLITCRLQSLQTYVTQQLIRAAEIRASANLAATKMSECVLGQSKRVDFCGKGYHLMSFPQSAPHGVVFLHVTYVPAQEKNFTTAPAICHDGKAHFPREGVFVSNGTHWFVTQRNFYEPQIITTDNTFVSGNCDVVIGIVNNTVYDPLQPELDSGGGGSDIIKLLNEQVNKEMQSSNLYMSMSSWCYTHSLDGAGLFLFDHAAEEYEHAKKLIIFLNENNVPVQLTSISAPEHKFEGLTQIFQKAYEHEQHISESINNIVDHAIKSKDHATFNFLQWYVAEQHEEEVLFKDILDKIELIGNENHGLYLADQYVKGIAKSRKS

SEQ ID NO: 9439 - protein, 1315 aa, Artificial Sequence; identical to SEQ ID NO: 9394
  SARS-CoV-2/Iceland/247/2020__EPI_ISL_417575 spike protein (1-1147)(F970C_G999C) Ferritin construct

SEQ ID NO: 9440 - protein, 1315 aa, Artificial Sequence
  SARS-CoV-2/Iceland/238/2020__EPI_ISL_417566 spike protein (1-1147)(F970C_G999C) Ferritin construct
MFVFLVLLPLVSSQCVNLTTRTQLPPAYTNSFTRGVYYPDKVFRSSVLHSTQDLFLPFFSNVTWFHAIHVSGTNGTKRFDNPVLPFNDGVYFASTEKSNIIRGWIFGTTLDSKTQSLLIVNNATNVVIKVCEFQFCNDPFLGVYYHKNNKSWMESEFRVYSSANNCTFEYVSQPFLMDLEGKQGNFKNLREFVFKNIDGYFKIYSKHTPINLVRDLPQGFSALEPLVDLPIGINITRFQTLLALHRSYLTPGDSSSGWTAGAAAYYVGYLQPRTFLLKYNENGTITDAVDCALDPLSETKCTLKSFTVEKGIYQTSNFRVQPTESIVRFPNITNLCPFGEVFNATRFASVYAWNRKRISNCVADYSVLYNSASFSTFKCYGVSPTKLNDLCFTNVYADSFVIRGDEVRQIAPGQTGKIADYNYKLPDDFTGCVIAWNSNNLDSKVGGNYNYLYRLFRKSNLKPFERDISTEIYQAGSTPCNGVEGFNCYFPLQSYGFQPTNGVGYQPYRVVVLSFELLHAPATVCGPKKSTNLVKNKCVNFNFNGLTGTGVLTESNKKFLPFQQFGRDIADTTDAVRDPQTLEILDITPCSFGGVSVITPGTNTSNQVAVLYQGVNCTEVPVAIHADQLTPTWRVYSTGSNVFQTRAGCLIGAEHVNNSYECDIPIGAGICASYQTQTNSPRRARSVASQSIIAYTMSLGAENSVAYSNNSIAIPTNFTISVTTEILPVSMTKTSVDCTMYICGDSTECSNLLLQYGSFCTQLNRALTGIAVEQDKNTQEVFAQVKQIYKTPPIKDFGGFNFSQILPDPSKPSKRSFIEDLLFNKVTLADVGFIKQYGDCLGDIAARDLICAQKFNGLTVLPPLLTDEMIAQYTSALLAGTITSGWTFGAGAALQIPFAMQMAYRFNGIGVTQNVLYENQKLIANQFNSAIGKIQDSLSSTASALGKLQDVVNQNAQALNTLVKQLSSNCGAISSVLNDILSRLDKVEAEVQIDRLITCRLQSLQTYVTQQLIRAAEIRASANLAATKMSECVLGQSKRVDFCGKGYHLMSFPQSAPHGVVFLHVTYVPAQEKNFTTAPAICHDGKAHFPREGVFVSNGTHWFVTQRNFYEPQIITTDNTFVSGNCDVVIGIVNNTVYDPLQPELDSGGGGSDIIKLLNEQVNKEMQSSNLYMSMSSWCYTHSLDGAGLFLFDHAAEEYEHAKKLIIFLNENNVPVQLTSISAPEHKFEGLTQIFQKAYEHEQHISESINNIVDHAIKSKDHATFNFLQWYVAEQHEEEVLFKDILDKIELIGNENHGLYLADQYVKGIAKSRKS

SEQ ID NO: 9441 - protein, 1315 aa, Artificial Sequence
  SARS-CoV-2/Greece/16/2020__EPI_ISL_418265 spike protein (1-1147)(F970C_G999C) Ferritin construct
MFVFLVLLPLVSSQCVNLTTRTQLPPAYTNSFTRGVYYPDKVFRSSVLHSTQDLFLPFFSNVTWFHAIHVSGTNGTKRFDNPVLPFNDGVYFASTEKSNIIRGWIFGTTLDSKTQSLLIVNNATNVVIKVCEFQFCNDPFLGVYYHKNNKSWMESEFRVYSSANNCTFEYVSQPFLMDLEGKQGNFKNLREFVFKNVDGYFKIYSKHTPINLVRDLPQGFSALEPLVDLPIGINITRFQTLLALHRSYLTPGDSSSGWTAGAAAYYVGYLQPRTFLLKYNENGTITDAVDCALDPLSETKCTLKSFTVEKGIYQTSNFRVQPTESIVRFPNITNLCPFGEVFNATRFASVYAWNRKRISNCVADYSVLYNSASFSTFKCYGVSPTKLNDLCFTNVYADSFVIRGDEVRQIAPGQTGKIADYNYKLPDDFTGCVIAWNSNNLDSKVGGNYNYLYRLFRKSNLKPFERDISTEIYQAGSTPCNGVEGFNCYFPLQSYGFQPTNGVGYQPYRVVVLSFELLHAPATVCGPKKSTNLVKNKCVNFNFNGLTGTGVLTESNKKFLPFQQFGRDIADTTDAVRDPQTLEILDITPCSFGGVSVITPGTNTSNQVAVLYQDVNCTEVPVAIHADQLTPTWRVYSTGSNVFQTRAGCLIGAEHVNNSYECDIPIGAGICASYQTQTNSPRRARSVASQSIIAYTMSLGAENSVAYSNNSIAIPTNFTISVTTEILPVSMTKTSVDCTMYICGDSTECSNLLLQYGSFCTQLNRALTGIAVEQDKNTQEVFAQVKQIYKTPPIKDFGGFNFSQILPDPSKPSKRSFIEDLLFNKVTLADAGFIKQYGDCLGDIAARDLICAQKFNGLTVLPPLLTDEMIAQYTSALLAGTITSGWTFGAGAALQIPFAMQMAYRFNGIGVTQNVLYENQKLIANQFNSAIGKIQDSLSSTASALGKLQDVVNQNAQALNTLVKQLSSNCGAISSVLNDILSRLDKVEAEVQIDRLITCRLQSLQTYVTQQLIRAAEIRASANLAATKMSECVLGQSKRVDFCGKGYHLMSFPQSAPHGVVFLHVTYVPAQEKNFTTAPAICHDGKAHFPREGVFVSNGTHWFVTQRNFYEPQIITTDNTFVSGNCDVVIGIVNNTVYDPLQPELDSGGGGSDIIKLLNEQVNKEMQSSNLYMSMSSWCYTHSLDGAGLFLFDHAAEEYEHAKKLIIFLNENNVPVQLTSISAPEHKFEGLTQIFQKAYEHEQHISESINNIVDHAIKSKDHATFNFLQWYVAEQHEEEVLFKDILDKIELIGNENHGLYLADQYVKGIAKSRKS

SEQ ID NO: 9442 - protein, 1315 aa, Artificial Sequence
  SARS-CoV-2/Iceland/319/2020__EPI_ISL_417648 spike protein (1-1147)(F970C_G999C) Ferritin construct
MFVFLVLLPLVSSQCVNLTTRTQLPPAYTNSFTRGVYYPDKVFRSSVLHSTQDLFLPFFSNVTWFHAIHVSGTNGTKRFDNPVLPFNDGVYFASTEKSNIIRGWIFGTTLDSKTQSLLIVNNATNVVIKVCEFQFCNDPFLGVYYHKNNKSWMESEFRVYSSANNCTFEYVSQPFLIDLEGKQGNFKNLREFVFKNIDGYFKIYSKHTPINLVRDLPQGFSALEPLVDLPIGINITRFQTLLALHRSYLTPGDSSSGWTAGAAAYYVGYLQPRTFLLKYNENGTITDAVDCALDPLSETKCTLKSFTVEKGIYQTSNFRVQPTESIVRFPNITNLCPFGEVFNATRFASVYAWNRKRISNCVADYSVLYNSASFSTFKCYGVSPTKLNDLCFTNVYADSFVIRGDEVRQIAPGQTGKIADYNYKLPDDFTGCVIAWNSNNLDSKVGGNYNYLYRLFRKSNLKPFERDISTEIYQAGSTPCNGVEGFNCYFPLQSYGFQPTNGVGYQPYRVVVLSFELLHAPATVCGPKKSTNLVKNKCVNFNFNGLTGTGVLTESNKKFLPFQQFGRDIADTTDAVRDPQTLEILDITPCSFGGVSVITPGTNTSNQVAVLYQGVNCTEVPVAIHADQLTPTWRVYSTGSNVFQTRAGCLIGAEHVNNSYECDIPIGAGICASYQTQTNSPRRARSVASQSIIAYTMSLGAENSVAYSNNSIAIPTNFTISVTTEILPVSMTKTSVDCTMYICGDSTECSNLLLQYGSFCTQLNRALTGIAVEQDKNTQEVFAQVKQIYKTPPIKDFGGFNFSQILPDPSKPSKRSFIEDLLFNKVTLADAGFIKQYGDCLGDIAARDLICAQKFNGLTVLPPLLTDEMIAQYTSALLAGTITSGWTFGAGAALQIPFAMQMAYRFNGIGVTQNVLYENQKLIANQFNSAIGKIQDSLSSTASALGKLQDVVNQNAQALNTLVKQLSSNCGAISSVLNDILSRLDKVEAEVQIDRLITCRLQSLQTYVTQQLIRAAEIRASANLAATKMSECVLGQSKRVDFCGKGYHLMSFPQSAPHGVVFLHVTYVPAQEKNFTTAPAICHDGKAHFPREGVFVSNGTHWFVTQRNFYEPQIITTDNTFVSGNCDVVIGIVNNTVYDPLQPELDSGGGGSDIIKLLNEQVNKEMQSSNLYMSMSSWCYTHSLDGAGLFLFDHAAEEYEHAKKLIIFLNENNVPVQLTSISAPEHKFEGLTQIFQKAYEHEQHISESINNIVDHAIKSKDHATFNFLQWYVAEQHEEEVLFKDILDKIELIGNENHGLYLADQYVKGIAKSRKS

SEQ ID NO: 9443 - protein, 1315 aa, Artificial Sequence
  SARS-CoV-2/Congo/94/2020__EPI_ISL_417947 spike protein (1-1147)(F970C_G999C) Ferritin construct
MFVFLVLLPLVSSQCVNLTTRTQLPPAYTNSFTRGVYYPDKVFRSSVLHSTQDLFLPFFSNVTWFHAIHVSGTNGTKRFDNPVLPFNDGVYFASTEKSNIIRGWIFGTTLDSKTQSLLIVNNATNVVIKVCEFQFCNDPFLGVYYHKNNKSWMESEFRVYSSANNCTFEYVSQPFLMDLEGKQGNFKNLREFVFKNIDGYFKIYSKHTPINLVRDLPQGFSALEPLVDLPIGINITRFQTLLALHRSYLTPGDSSSGWTAGAAAYYVGYLQPRTFLLKYNENGTITDAVDCALDPLSETKCTLKSFTVEKGIYQTSNFRVQPTESIVRFPNITNLCPFGEVFNATRFASVYAWNRKRISNCVADYSVLYNSASFSTFKCYGVSPTKLNDLCFTNVYADSFVIRGDEVRQIAPGQTGKIADYNYKLPDDFTGCVIAWNSNNLDSKVGGNYNYLYRLFRKSNLKPFERDISTEIYQAGSTPCNGVEGFNCYFPLQSYGFQPTNGVGYQPYRVVVLSFELLHAPATVCGPKKSTNLVKNKCVNFNFNGLTGTGVLTESNKKFLPFQQFGRDIADTTDAVRDPQTLEILDITPCSFGGVSVITPGTNTSNQVAVLYQGVNCTEVPVAIHADQLTPTWRVYSTGSNVFQTRAGCLIGAEHVNNSYECDIPIGAGICASYQTQTNSPRRARSVASQSIIAYTMSLGAENSVAYSNNSIAIPTNFTISVTTEILPVSMTKTSVDCTMYICGDSTECSNLLLQYGSFCTQLNRALTGIAVEQDKNTQEVFAQVKQIYKTPPIKDFGGFNFSQILPDPSKPSKRSFIEDILFNKVTLADAGFIKQYGDCLGDIAARDLICAQKFNGLTVLPPLLTDEMIAQYTSALLAGTITSGWTFGAGAALQIPFAMQMAYRFNGIGVTQNVLYENQKLIANQFNSAIGKIQDSLSSTASALGKLQDVVNQNAQALNTLVKQLSSNCGAISSVLNDILSRLDKVEAEVQIDRLITCRLQSLQTYVTQQLIRAAEIRASANLAATKMSECVLGQSKRVDFCGKGYHLMSFPQSAPHGVVFLHVTYVPAQEKNFTTAPAICHDGKAHFPREGVFVSNGTHWFVTQRNFYEPQIITTDNTFVSGNCDVVIGIVNNTVYDPLQPELDSGGGGSDIIKLLNEQVNKEMQSSNLYMSMSSWCYTHSLDGAGLFLFDHAAEEYEHAKKLIIFLNENNVPVQLTSISAPEHKFEGLTQIFQKAYEHEQHISESINNIVDHAIKSKDHATFNFLQWYVAEQHEEEVLFKDILDKIELIGNENHGLYLADQYVKGIAKSRKS

SEQ ID NO: 9444 - protein, 1315 aa, Artificial Sequence
  SARS-CoV-2/Congo/158/2020__EPI_ISL_417950 spike protein (1-1147)(F970C_G999C) Ferritin construct
MFVFLVLLPLVSSQCVNLTTRTQLPPAYTNSFTRGVYYPDKVFRSSVLHSTQDLFLPFFSNVTWFHAIHVSGTNGTKRFDNPVLPFNDGVYFASTEKSNIIRGWIFGTTLDSKTQSLLIVNNATNVVIKVCEFQFCNDPFLGVYYHKNNKSWMESEFRVYSSANNCTFEYVSQPFLMDLEGKQGNFKNLREFVFKNIDGYFKIYSKHTPINLVRDLPQGFSALEPLVDLPIGINITRFQTLLALHRSYLTPGDSSSGWTAGAAAYYVGYLQPRTFLLKYNENGTITDAVDCALDPLSETKCTLKSFTVEKGIYQTSNFRVQPTESIVRFPNITNLCPFGEVFNATRFASVYAWNRKRISNCVADYSVLYNSASFSTFKCYGVSPTKLNDLCFTNVYADSFVIRGDEVRQIAPGQTGKIADYNYKLPDDFTGCVIAWNSNNLDSKVGGNYNYLYRLFRKSNLKPFERDISTEIYQAGSTPCNGVEGFNCYFPLQSYGFQPTNGVGYQPYRVVVLSFELLHAPATVCGPKKSTNLVKNKCVNFNFNGLTGTGVLTESNKKFLPFQQFGRDIADTTDAVRDPQTLEILDITPCSFGGVSVITPGTNTSNQVAVLYQDVNCTEVPVAIHADQLTPTWRVYSTGSNVFQTRAGCLIGAEHVNNSYECDIPIGAGICASYQTQTNSPRRARSVASQSIIAYTMSLGAENSVAYSNNSIAIPTNFTISVTTEILPVSMTKTSVDCTMYICGDSTECSNLLLQYGSFCTQLNRALTGIAVEQDKNTQEVFAQVKQIYKTPPIKDFGGFNFSQILPDPSKPSKRSFIEDLLFNKVTLADAGFIKQYGDCLGDIAARDLICAQKFNGLTVLPPLLTDEMIAQYTSALLAGTITSGWTFGAGAALQIPFAMQMAYRFNGIGVTQNVLYENQKLIANQFNSAIGKIQDSLSSTASALGKLQDVVNQNAQALNTLVKQLSSNCGAISSVLNDILSRLDKVEAEVQIDRLITCRLQSLQTYVTQQLIRAAEIRASANLAATKMSECVLGQSKRVDFCGKGYHLMSFPQSAPHGVVFLHVTYVPAQEKNFTTAPAICHDGKAHFPREGVFVSNGTHWFVTQRNFYEPQIITTDNTFLSGNCDVVIGIVNNTVYDPLQPELDSGGGGSDIIKLLNEQVNKEMQSSNLYMSMSSWCYTHSLDGAGLFLFDHAAEEYEHAKKLIIFLNENNVPVQLTSISAPEHKFEGLTQIFQKAYEHEQHISESINNIVDHAIKSKDHATFNFLQWYVAEQHEEEVLFKDILDKIELIGNENHGLYLADQYVKGIAKSRKS

SEQ ID NO: 9445 - protein, 1315 aa, Artificial Sequence
  SARS-CoV-2/USA/UT-00034/2020__EPI_ISL_417977 spike protein (1-1147)(F970C_G999C) Ferritin construct
MFVFLVLLPLVSSQCVNLTTRTQLPPAYTNSFTRGVYYPDKVFRSSVLHSTQDLFLPFFSNVTWFHAIHVSGTNGTKRFDNPVLPFNDGVYFASTEKSNIIRGWIFGTTLDSKTQSLLIVNNATNVVIKVCEFQFCNDPFLGVYYYKNNKSWMESEFRVYSSANNCTFEYVSQPFLMDLEGKQGNFKNLREFVFKNIDGYFKIYSKHTPINLVRDLPQGFSALEPLVDLPIGINITRFQTLLALHRSYLTPGDSSSGWTAGAAAYYVGYLQPRTFLLKYNENGTITDAVDCALDPLSETKCTLKSFTVEKGIYQTSNFRVQPTESIVRFPNITNLCPFGEVFNATRFASVYAWNRKRISNCVADYSVLYNSASFSTFKCYGVSPTKLNDLCFTNVYADSFVIRGDEVRQIAPGQTGKIADYNYKLPDDFTGCVIAWNSNNLDSKVGGNYNYLYRLFRKSNLKPFERDISTEIYQAGSTPCNGVEGFNCYFPLQSYGFQPTNGVGYQPYRVVVLSFELLHAPATVCGPKKSTNLVKNKCVNFNFNGLTGTGVLTESNKKFLPFQQFGRDIADTTDAVRDPQTLEILDITPCSFGGVSVITPGTNTSNQVAVLYQGVNCTEVPVAIHADQLTPTWRVYSTGSNVFQTRAGCLIGAEHVNNSYECDIPIGAGICASYQTQTNSPRRARSVASQSIIAYTMSLGAENSVAYSNNSIAIPTNFTISVTTEILPVSMTKTSVDCTMYICGDSTECSNLLLQYGSFCTQLNRALTGIAVEQDKNTQEVFAQVKQIYKTPPIKDFGGFNFSQILPDPSKPSKRSFIEDLLFNKVTLADAGFIKQYGDCLGDIAARDLICAQKFNGLTVLPPLLTDEMIAQYTSALLAGTITSGWTFGAGAALQIPFAMQMAYRFNGIGVTQNVLYENQKLIANQFNSAIGKIQDSLSSTASALGKLQDVVNQNAQALNTLVKQLSSNCGAISSVLNDILSRLDKVEAEVQIDRLITCRLQSLQTYVTQQLIRAAEIRASANLAATKMSECVLGQSKRVDFCGKGYHLMSFPQSAPHGVVFLHVTYVPAQEKNFTTAPAICHDGKAHFPREGVFVSNGTHWFVTQRNFYEPQIITTDNTFVSGNCDVVIGIVNNTVYDPLQPELDSGGGGSDIIKLLNEQVNKEMQSSNLYMSMSSWCYTHSLDGAGLFLFDHAAEEYEHAKKLIIFLNENNVPVQLTSISAPEHKFEGLTQIFQKAYEHEQHISESINNIVDHAIKSKDHATFNFLQWYVAEQHEEEVLFKDILDKIELIGNENHGLYLADQYVKGIAKSRKS

SEQ ID NO: 9446 - protein, 1315 aa, Artificial Sequence
  SARS-CoV-2/USA/UT-00033/2020__EPI_ISL_417976 spike protein (1-1147)(F970C_G999C) Ferritin construct
MFVFLVLLPLVSSQCVNLTTRTQLPPAYTNSFTRGVYYPDKVFRSSVLHSTQDLFLPFFSNVTWFHAIHVSGTNGTKRFDNPVLPFNDGVYFASTEKSNIIRGWIFGTTLDSKTQSLLIVNNATNVVIKVCEFQFCNDPFLGVYYHKNNKSWMESEFRVYSSANNCTFEYVSQPFLMDLEGKQGNFKNLREFVFKNIDGYFKIYSKHTPINLVRDLPQGFSALEPLVDLPIGINITRFQTLLALHRSYLTPGDSSSGLTAGAAAYYVGYLQPRTFLLKYNENGTITDAVDCALDPLSETKCTLKSFTVEKGIYQTSNFRVQPTESIVRFPNITNLCPFGEVFNATRFASVYAWNRKRISNCVADYSVLYNSASFSTFKCYGVSPTKLNDLCFTNVYADSFVIRGDEVRQIAPGQTGKIADYNYKLPDDFTGCVIAWNSNNLDSKVGGNYNYLYRLFRKSNLKPFERDISTEIYQAGSTPCNGVEGFNCYFPLQSYGFQPTNGVGYQPYRVVVLSFELLHAPATVCGPKKSTNLVKNKCVNFNFNGLTGTGVLTESNKKFLPFQQFGRDIADTTDAVRDPQTLEILDITPCSFGGVSVITPGTNTSNQVAVLYQGVNCTEVPVAIHADQLTPTWRVYSTGSNVFQTRAGCLIGAEHVNNSYECDIPIGAGICASYQTQTNSPRRARSVASQSIIAYTMSLGAENSVAYSNNSIAIPTNFTISVTTEILPVSMTKTSVDCTMYICGDSTECSNLLLQYGSFCTQLNRALTGIAVEQDKNTQEVFAQVKQIYKTPPIKDFGGFNFSQILPDPSKPSKRSFIEDLLFNKVTLADAGFIKQYGDCLGDIAARDLICAQKFNGLTVLPPLLTDEMIAQYTSALLAGTITSGWTFGAGAALQIPFAMQMAYRFNGIGVTQNVLYENQKLIANQFNSAIGKIQDSLSSTASALGKLQDVVNQNAQALNTLVKQLSSNCGAISSVLNDILSRLDKVEAEVQIDRLITCRLQSLQTYVTQQLIRAAEIRASANLAATKMSECVLGQSKRVDFCGKGYHLMSFPQSAPHGVVFLHVTYVPAQEKNFTTAPAICHDGKAHFPREGVFVSNGTHWFVTQRNFYEPQIITTDNTFVSGNCDVVIGIVNNTVYDPLQPELDSGGGGSDIIKLLNEQVNKEMQSSNLYMSMSSWCYTHSLDGAGLFLFDHAAEEYEHAKKLIIFLNENNVPVQLTSISAPEHKFEGLTQIFQKAYEHEQHISESINNIVDHAIKSKDHATFNFLQWYVAEQHEEEVLFKDILDKIELIGNENHGLYLADQYVKGIAKSRKS

SEQ ID NO: 9447 - protein, 1315 aa, Artificial Sequence
  SARS-CoV-2/USA/WI-13/2020__EPI_ISL_417516 spike protein (1-1147)(F970C_G999C) Ferritin construct
MFVFLVLLPLVSSQCVNLTTRTQLPPAYTNSFTRGVYYPDKVFRSSVLHSTQDLFLPFFSNVTWFHAIHVSGTNGTKRFDNPVLPFNDGVYFASTEKSNIIRGWIFGTTLDSKTQSLLIVNNATNVVIKVCEFQFCNDPFLGVYYHKNNKSWMESEFRVYSSANNCTFEYVSQPFLMDLEGKQGNFKNLREFVFKNIDGYFKIYSKHTPINLVRDLPQGFSALEPLVDLPIGINITRFQTLLALHRSYLTPGDSSSGWTAGAAAYYVGYLQPRTFLLKYNENGTITDAVDCALDPLSETKCTLKSFTVEKGIYQTSNFRVLPTESIVRFPNITNLCPFGEVFNATRFASVYAWNRKRISNCVADYSVLYNSASFSTFKCYGVSPTKLNDLCFTNVYADSFVIRGDEVRQIAPGQTGKIADYNYKLPDDFTGCVIAWNSNNLDSKVGGNYNYLYRLFRKSNLKPFERDISTEIYQAGSTPCNGVEGFNCYFPLQSYGFQPTNGVGYQPYRVVVLSFELLHAPATVCGPKKSTNLVKNKCVNFNFNGLTGTGVLTESNKKFLPFQQFGRDIADTTDAVRDPQTLEILDITPCSFGGVSVITPGTNTSNQVAVLYQGVNCTEVPVAIHADQLTPTWRVYSTGSNVFQTRAGCLIGAEHVNNSYECDIPIGAGICASYQTQTNSPRRARSVASQSIIAYTMSLGAENSVAYSNNSIAIPTNFTISVTTEILPVSMTKTSVDCTMYICGDSTECSNLLLQYGSFCTQLNRALTGIAVEQDKNTQEVFAQVKQIYKTPPIKDFGGFNFSQILPDPSKPSKRSFIEDLLFNKVTLADAGFIKQYGDCLGDIAARDLICAQKFNGLTVLPPLLTDEMIAQYTSALLAGTITSGWTFGAGAALQIPFAMQMAYRFNGIGVTQNVLYENQKLIANQFNSAIGKIQDSLSSTASALGKLQDVVNQNAQALNTLVKQLSSNCGAISSVLNDILSRLDKVEAEVQIDRLITCRLQSLQTYVTQQLIRAAEIRASANLAATKMSECVLGQSKRVDFCGKGYHLMSFPQSAPHGVVFLHVTYVPAQEKNFTTAPAICHDGKAHFPREGVFVSNGTHWFVTQRNFYEPQIITTDNTFVSGNCDVVIGIVNNTVYDPLQPELDSGGGGSDIIKLLNEQVNKEMQSSNLYMSMSSWCYTHSLDGAGLFLFDHAAEEYEHAKKLIIFLNENNVPVQLTSISAPEHKFEGLTQIFQKAYEHEQHISESINNIVDHAIKSKDHATFNFLQWYVAEQHEEEVLFKDILDKIELIGNENHGLYLADQYVKGIAKSRKS

SEQ ID NO: 9448 - protein, 1314 aa, Artificial Sequence
  SARS-CoV-2/India/1-27/2020__EPI_ISL_413522 spike protein (1-1146)(F969C_G998C) Ferritin construct
MFVFLVLLPLVSSQCVNLTTRTQLPPAYTNSFTRGVYYPDKVFRSSVLHSTQDLFLPFFSNVTWFHAIHVSGTNGTKRFDNPVLPFNDGVYFASTEKSNIIRGWIFGTTLDSKTQSLLIVNNATNVVIKVCEFQFCNDPFLGVYHKNNKSWMESEFRVYSSANNCTFEYVSQPFLMDLEGKQGNFKNLREFVFKNIDGYFKIYSKHTPINLVRDLPQGFSALEPLVDLPIGINITRFQTLLALHRSYLTPGDSSSGWTAGAAAYYVGYLQPRTFLLKYNENGTITDAVDCALDPLSETKCTLKSFTVEKGIYQTSNFRVQPTESIVRFPNITNLCPFGEVFNATRFASVYAWNRKRISNCVADYSVLYNSASFSTFKCYGVSPTKLNDLCFTNVYADSFVIRGDEVIQIAPGQTGKIADYNYKLPDDFTGCVIAWNSNNLDSKVGGNYNYLYRLFRKSNLKPFERDISTEIYQAGSTPCNGVEGFNCYFPLQSYGFQPTNGVGYQPYRVVVLSFELLHAPATVCGPKKSTNLVKNKCVNFNFNGLTGTGVLTESNKKFLPFQQFGRDIADTTDAVRDPQTLEILDITPCSFGGVSVITPGTNTSNQVAVLYQDVNCTEVPVAIHADQLTPTWRVYSTGSNVFQTRAGCLIGAEHVNNSYECDIPIGAGICASYQTQTNSPRRARSVASQSIIAYTMSLGAENSVAYSNNSIAIPTNFTISVTTEILPVSMTKTSVDCTMYICGDSTECSNLLLQYGSFCTQLNRALTGIAVEQDKNTQEVFAQVKQIYKTPPIKDFGGFNFSQILPDPSKPSKRSFIEDLLFNKVTLADAGFIKQYGDCLGDIAARDLICAQKFNGLTVLPPLLTDEMIAQYTSALLAGTITSGWTFGAGAALQIPFAMQMAYRFNGIGVTQNVLYENQKLIANQFNSAIGKIQDSLSSTASALGKLQDVVNQNAQALNTLVKQLSSNCGAISSVLNDILSRLDKVEAEVQIDRLITCRLQSLQTYVTQQLIRAAEIRASANLAATKMSECVLGQSKRVDFCGKGYHLMSFPQSAPHGVVFLHVTYVPAQEKNFTTAPAICHDGKAHFPREGVFVSNGTHWFVTQRNFYEPQIITTDNTFVSGNCDVVIGIVNNTVYDPLQPELDSGGGGSDIIKLLNEQVNKEMQSSNLYMSMSSWCYTHSLDGAGLFLFDHAAEEYEHAKKLIIFLNENNVPVQLTSISAPEHKFEGLTQIFQKAYEHEQHISESINNIVDHAIKSKDHATFNFLQWYVAEQHEEEVLFKDILDKIELIGNENHGLYLADQYVKGIAKSRKS

SEQ ID NO: 9449 - protein, 1309 aa, Artificial Sequence
  SARS-CoV-2/pangolin/Guangxi/P4L/2017__EPI_ISL_410538 spike protein (1-1141)(F964C_G993C) Ferritin construct
MFVFLFVLPLVSSQCVNLTTRTGIPPGYTNSSTRGVYYPDKVFRSSILHLTQDLFLPFFSNVTWFNTINYQGGFKKFDNPVLPFNDGVYFASTEKSNIIRGWIFGTTLDARTQSLLIVNNATNVVIKVCEFQFCTDPFLGVYYHNNNKTWVENEFRVYSSANNCTFEYISQPFLMDLEGKQGNFKNLREFVFKNVDGYFKIYSKHTPIDLVRDLPRGFAALEPLVDLPIGINITRFQTLLALHRSYLTPGNLESGWTTGAAAYYVGYLQQRTFLLSYNQNGTITDAVDCSLDPLSETKCTLKSLTVEKGIYQTSNFRVQPTISIVRFPNITNLCPFGEVFNASKFASVYAWNRKRISNCVADYSVLYNSTSFSTFKCYGVSPTKLNDLCFTNVYADSFVVKGDEVRQIAPGQTGVIADYNYKLPDDFTGCVIAWNSVKQDALTGGNYGYLYRLFRKSKLKPFERDISTEIYQAGSTPCNGQVGLNCYYPLERYGFHPTTGVNYQPFRVVVLSFELLNGPATVCGPKLSTTLVKDKCVNFNFNGLTGTGVLTTSKKQFLPFQQFGRDISDTTDAVRDPQTLEILDITPCSFGGVSVITPGTNTSNQVAVLYQDVNCTEVPMAIHAEQLTPAWRVYSAGANVFQTRAGCLVGAEHVNNSYECDIPVGAGICASYHSMSSLRSVNQRSIIAYTMSLGAENSVAYSNNSIAIPTNFTISVTTEILPVSMTKTSVDCTMYICGDSIECSNLLLQYGSFCTQLNRALTGIAVEQDKNTQEVFAQVKQIYKTPPIKDFGGFNFSQILPDPSKPSKRSFIEDLLFNKVTLADAGFIKQYGDCLGDIAARDLICAQKFNGLTVLPPLLTDEMIAQYTSALLAGTITSGWTFGAGAALQIPFAMQMAYRFNGIGVTQNVLYENQKLIANQFNSAIGKIQDSLSSTASALGKLQDVVNQNAQALNTLVKQLSSNCGAISSVLNDILSRLDKVEAEVQIDRLITCRLQSLQTYVTQQLIRAAEIRASANLAATKMSECVLGQSKRVDFCGKGYHLMSFPQSAPHGVVFLHVTYVPAQEKNFTTAPAICHEGKAHFPREGVFVSNGTHWFITQRNFYEPQIITTDNTFVSGSCDVVIGIVNNTVYDPLQPELDSGGGGSDIIKLLNEQVNKEMQSSNLYMSMSSWCYTHSLDGAGLFLFDHAAEEYEHAKKLIIFLNENNVPVQLTSISAPEHKFEGLTQIFQKAYEHEQHISESINNIVDHAIKSKDHATFNFLQWYVAEQHEEEVLFKDILDKIELIGNENHGLYLADQYVKGIAKSRKS

SEQ ID NO: 9450 - protein, 1309 aa, Artificial Sequence
  SARS-CoV-2/pangolin/Guangxi/P5L/2017__EPI_ISL_410540 spike protein (1-1141)(F964C_G993C) Ferritin construct
MFVFLFVLPLVSSQCVNLTTRTGIPPGYTNSSTRGVYYPDKVFRSSILHLTQDLFLPFFSNVTWFNTINYQGGFKKFDNPVLPFNDGVYFASTEKSNIIRGWIFGTTLDARTQSLLIVNNATNVVIKVCEFQFCTDPFLGVYYHNNNKTWVENEFRVYSSANNCTFEYISQPFLMDLEGKQGNFKNLREFVFKNVDGYFKIYSKHTPIDLVRDLPRGFAALEPLVDLPIGINITRFQTLLALHRSYLTPGKLESGWTTGAAAYYVGYLQQRTFLLSYNQNGTITDAVDCSLDPLSETKCTLKSLTVEKGIYQTSNFRVQPTISIVRFPNITNLCPFGEVFNASKFASVYAWNRKRISNCVADYSVLYNSTSFSTFKCYGVSPTKLNDLCFTNVYADSFVVKGDEVRQIAPGQTGVIADYNYKLPDDFTGCVIAWNSVKQDALTGGNYGYLYRLFRKSKLKPFERDISTEIYQAGSTPCNGQVGLNCYYPLERYGFHPTTGVNYQPFRVVVLSFELLNGPATVCGPKLSTTLVKDKCVNFNFNGLTGTGVLTTSKKQFLPFQQFGRDISDTTDAVRDPQTLEILDITPCSFGGVSVITPGTNTSNQVAVLYQDVNCTEVPMAIHAEQLTPAWRVYSAGANVFQTRAGCLVGAEHVNNSYECDIPVGAGICASYHSMSSFRSVNQRSIIAYTMSLGAENSVAYSNNSIAIPTNFTISVTTEILPVSMTKTSVDCTMYICGDSIECSNLLLQYGSFCTQLNRALTGIAVEQDKNTQEVFAQVKQIYKTPPIKDFGGFNFSQILPDPSKPSKRSFIEDLLFNKVTLADAGFIKQYGDCLGDIAARDLICAQKFNGLTVLPPLLTDEMIAQYTSALLAGTITSGWTFGAGAALQIPFAMQMAYRFNGIGVTQNVLYENQKLIANQFNSAIGKIQDSLSSTASALGKLQDVVNQNAQALNTLVKQLSSNCGAISSVLNDILSRLDKVEAEVQIDRLITCRLQSLQTYVTQQLIRAAEIRASANLAATKMSECVLGQSKRVDFCGKGYHLMSFPQSAPHGVVFLHVTYVPAQEKNFTTAPAICHEGKAHFPREGVFVSNGTHWFITQRNFYEPQIITTDNTFVSGSCDVVIGIVNNTVYDPLQPELDSGGGGSDIIKLLNEQVNKEMQSSNLYMSMSSWCYTHSLDGAGLFLFDHAAEEYEHAKKLIIFLNENNVPVQLTSISAPEHKFEGLTQIFQKAYEHEQHISESINNIVDHAIKSKDHATFNFLQWYVAEQHEEEVLFKDILDKIELIGNENHGLYLADQYVKGIAKSRKS

SEQ ID NO: 9451 - protein, 1309 aa, Artificial Sequence
  SARS-CoV-2/pangolin/Guangxi/P5E/2017__EPI_ISL_410541 spike protein (1-1141)(F964C_G993C) Ferritin construct
MFVFLFVLPLVSSQCVNLTTRTGIPPGYTNSSTRGVYYPDKVFRSSILHLTQDLFLPFFSNVTWFNTITYQGGSKKFDNPVLPFNDGVYFASTEKSNIIRGWIFGTTLDARTQSLLIVNNATNVVIKVCEFQFCTDPFLGVYYHNNNKTWVENEFRVYSSANNCTFEYISQPFLMDLEGKQGNFKNLREFVFKNVDGYFKIYSKHTPIDLVRDLPRGFAALEPLVDLPIGINITRFQTLLALHRSYLTPGKLESGWTTGAAAYYVGYLQQRTFLLSYNQNGTITDAVDCSLDPLSETKCTLKSLTVEKGIYQTSNFRVQPTISIVRFPNITNLCPFGEVFNASKFASVYAWNRKRISNCVADYSVLYNSTSFSTFKCYGVSPTKLNDLCFTNVYADSFVVKGDEVRQIAPGQTGVIADYNYKLPDDFTGCVIAWNSVKQDALTGDNYGYLYRLFRKSKLKPFERDISTEIYQAGSTPCNGQVGLNCYYPLERYGFHPTTGVNYQPFRVVVLSFELLNGPATVCGPKLSTTLVKDKCVNFNFNGLTGTGVLTTSKKQFLPFQQFGRDISDTTDAVRDPQTLEILDITPCSFGGVSVITPGTNTSNQVAVLYQDVNCTEVPMAIHAEQLTPAWRVYSAGANVFQTRAGCLVGAEHVNNSYECDIPVGAGICASYHSMSSFRSVNQRSIIAYTMSLGAENSVAYSNNSIAIPTNFTISVTTEILPVSMTKTSVDCTMYICGDSIECSNLLLQYGSFCTQLNRALTGIAVEQDKNTQEVFAQVKQIYKTPPIKDFGGFNFSQILPDPSKPSKRSFIEDLLFNKVTLADAGFIKQYGDCLGDIAARDLICAQKFNGLTVLPPLLTDEMIAQYTSALLAGTITSGWTFGAGAALQIPFAMQMAYRFNGIGVTQNVLYENQKLIANQFNSAIGKIQDSLSSTASALGKLQDVVNQNAQALNTLVKQLSSNCGAISSVLNDILSRLDKVEAEVQIDRLITCRLQSLQTYVTQQLIRAAEIRASANLAATKMSECVLGQSKRVDFCGKGYHLMSFPQSAPHGVVFLHVTYVPAQEKNFTTAPAICHEGKAHFPREGVFVSNGTHWFITQRNFYEPQIITTDNTFVSGSCDVVIGIVNNTVYDPLQPELDSGGGGSDIIKLLNEQVNKEMQSSNLYMSMSSWCYTHSLDGAGLFLFDHAAEEYEHAKKLIIFLNENNVPVQLTSISAPEHKFEGLTQIFQKAYEHEQHISESINNIVDHAIKSKDHATFNFLQWYVAEQHEEEVLFKDILDKIELIGNENHGLYLADQYVKGIAKSRKS

SEQ ID NO: 9452 - protein, 1307 aa, Artificial Sequence
  SARS-CoV-2/pangolin/Guangxi/P1E/2017__EPI_ISL_410539 spike protein (1-1139)(F962C_G991C) Ferritin construct
MFVFLFVLPLVSSQCVNLTTRTGIQPGYTNSSTRGVYYPDKVFRSSILHLTQDLFLPFFSNVTWFNTINYQGGFKKFDNPVLPFNDGVYFASTEKSNIIRGWIFGTTLDARTQSLLIVNNATNVVIKVCEFQFCTDPFLGVYYHNNNKTWVENEFRVYSSANNCTFEYISQPFLMDLEGKQGNFKNLREFVFKNVDGYFKIYSKHTPIDLVRDLPRGFAALEPLVDLPIGINITRFQTLLALHRSYLTPGKLESGWTTGAAAYYVGYLQQRTFLLSYNQNGTITDAVDCSLDPLSETKCTLKSLTVEKGIYQTSNFRVQPTISIVRFPNITNLCPFGEVFNASKFASVYAWNRKRISNCVADYSVLYNSTSFSTFKCYGVSPTKLNDLCFTNVYADSFVVKGDEVRQIAPGQTGVIADYNYKLPDDFTGCVIAWNSVKQDALTGGNYLYRLFRKSKLKPFERDISTEIYQAGSTPCNGQVGLNCYYPLERYGFHPTTGVNYQPFRVVVLSFELLNGPATVCGPKLSTTLVKDKCVNFNFNGLTGTGVLTTSKKQFLPFQQFGRDISDTTDAVRDPQTLEILDITPCSFGGVSVITPGTNTSNQVAVLYQDVNCTEVPMAIHAEQLTPAWRVYSAGANVFQTRAGCLVGAEHVNNSYECDIPVGAGICASYHSMSSLRSVNQRSIIAYTMSLGAENSVAYSNNSIAIPTNFTISVTTEILPVSMTKTSVDCTMYICGDSIECSNLLLQYGSFCTQLNRALTGIAVEQDKNTQEVFAQVKQIYKTPPIKDFGGFNFSQILPDPSKPSKRSFIEDLLFNKVTLADAGFIKQYGDCLGDIAARDLICAQKFNGLTVLPPLLTDEMIAQYTSALLAGTITSGWTFGAGAALQIPFAMQMAYRFNGIGVTQNVLYENQKLIANQFNSAIGKIQDSLSSTASALGKLQDVVNQNAQALNTLVKQLSSNCGAISSVLNDILSRLDKVEAEVQIDRLITCRLQSLQTYVTQQLIRAAEIRASANLAATKMSECVLGQSKRVDFCGKGYHLMSFPQSAPHGVVFLHVTYVPAQEKNFTTAPAICHEGKAHFPREGVFVSNGTHWFITQRNFYEPQIITTDNTFVSGSCDVVIGIVNNTVYDPLQPELDSGGGGSDIIKLLNEQVNKEMQSSNLYMSMSSWCYTHSLDGAGLFLFDHAAEEYEHAKKLIIFLNENNVPVQLTSISAPEHKFEGLTQIFQKAYEHEQHISESINNIVDHAIKSKDHATFNFLQWYVAEQHEEEVLFKDILDKIELIGNENHGLYLADQYVKGIAKSRKS

SEQ ID NO: 9453 - protein, 1315 aa, Artificial Sequence
  SARS-CoV-2/Wuhan/WIV05/2019__EPI_ISL_402128 spike protein (1-1147)(A972C_R995C) Ferritin construct
MFVFLVLLPLVSSQCVNLTTRTQLPPAYTNSFTRGVYYPDKVFRSSVLHSTQDLFLPFFSNVTWFHAIHVSGTNGTKRFDNPVLPFNDGVYFASTEKSNIIRGWIFGTTLDSKTQSLLIVNNATNVVIKVCEFQFCNDPFLGVYYHKNNKSWMESEFRVYSSANNCTFEYVSQPFLMDLEGKQGNFKNLREFVFKNIDGYFKIYSKHTPINLVRDLPQGFSALEPLVDLPIGINITRFQTLLALHRSYLTPGDSSSGWTAGAAAYYVGYLQPRTFLLKYNENGTITDAVDCALDPLSETKCTLKSFTVEKGIYQTSNFRVQPTESIVRFPNITNLCPFGEVFNATRFASVYAWNRKRISNCVADYSVLYNSASFSTFKCYGVSPTKLNDLCFTNVYADSFVIRGDEVRQIAPGQTGKIADYNYKLPDDFTGCVIAWNSNNLDSKVGGNYNYLYRLFRKSNLKPFERDISTEIYQAGSTPCNGVEGFNCYFPLQSYGFQPTNGVGYQPYRVVVLSFELLHAPATVCGPKKSTNLVKNKCVNFNFNGLTGTGVLTESNKKFLPFQQFGRDIADTTDAVRDPQTLEILDITPCSFGGVSVITPGTNTSNQVAVLYQDVNCTEVPVAIHADQLTPTWRVYSTGSNVFQTRAGCLIGAEHVNNSYECDIPIGAGICASYQTQTNSPRRARSVASQSIIAYTMSLGAENSVAYSNNSIAIPTNFTISVTTEILPVSMTKTSVDCTMYICGDSTECSNLLLQYGSFCTQLNRALTGIAVEQDKNTQEVFAQVKQIYKTPPIKDFGGFNFSQILPDPSKPSKRSFIEDLLFNKVTLADAGFIKQYGDCLGDIAARDLICAQKFNGLTVLPPLLTDEMIAQYTSALLAGTITSGWTFGAGAALQIPFAMQMAYRFNGIGVTQNVLYENQKLIANQFNSAIGKIQDSLSSTASALGKLQDVVNQNAQALNTLVKQLSSNFGCISSVLNDILSRLDKVEAEVQIDCLITGRLQSLQTYVTQQLIRAAEIRASANLAATKMSECVLGQSKRVDFCGKGYHLMSFPQSAPHGVVFLHVTYVPAQEKNFTTAPAICHDGKAHFPREGVFVSNGTHWFVTQRNFYEPQIITTDNTFVSGNCDVVIGIVNNTVYDPLQPELDSGGGGSDIIKLLNEQVNKEMQSSNLYMSMSSWCYTHSLDGAGLFLFDHAAEEYEHAKKLIIFLNENNVPVQLTSISAPEHKFEGLTQIFQKAYEHEQHISESINNIVDHAIKSKDHATFNFLQWYVAEQHEEEVLFKDILDKIELIGNENHGLYLADQYVKGIAKSRKS

SEQ ID NO: 9454 - protein, 1311 aa, Artificial Sequence
  SARS-CoV-2/bat/Yunnan/RaTG13/2013__EPI_ISL_402131 spike protein (1-1143)(A968C_R991C) Ferritin construct
MFVFLVLLPLVSSQCVNLTTRTQLPPAYTNSSTRGVYYPDKVFRSSVLHLTQDLFLPFFSNVTWFHAIHVSGTNGIKRFDNPVLPFNDGVYFASTEKSNIIRGWIFGTTLDSKTQSLLIVNNATNVVIKVCEFQFCNDPFLGVYYHKNNKSWMESEFRVYSSANNCTFEYVSQPFLMDLEGKQGNFKNLREFVFKNIDGYFKIYSKHTPINLVRDLPPGFSALEPLVDLPIGINITRFQTLLALHRSYLTPGDSSSGWTAGAAAYYVGYLQPRTFLLKYNENGTITDAVDCALDPLSETKCTLKSFTVEKGIYQTSNFRVQPTDSIVRFPNITNLCPFGEVFNATTFASVYAWNRKRISNCVADYSVLYNSTSFSTFKCYGVSPTKLNDLCFTNVYADSFVITGDEVRQIAPGQTGKIADYNYKLPDDFTGCVIAWNSKHIDAKEGGNFNYLYRLFRKANLKPFERDISTEIYQAGSKPCNGQTGLNCYYPLYRYGFYPTDGVGHQPYRVVVLSFELLNAPATVCGPKKSTNLVKNKCVNFNFNGLTGTGVLTESNKKFLPFQQFGRDIADTTDAVRDPQTLEILDITPCSFGGVSVITPGTNASNQVAVLYQDVNCTEVPVAIHADQLTPTWRVYSTGSNVFQTRAGCLIGAEHVNNSYECDIPIGAGICASYQTQTNSRSVASQSIIAYTMSLGAENSVAYSNNSIAIPTNFTISVTTEILPVSMTKTSVDCTMYICGDSTECSNLLLQYGSFCTQLNRALTGIAVEQDKNTQEVFAQVKQIYKTPPIKDFGGFNFSQILPDPSKPSKRSFIEDLLFNKVTLADAGFIKQYGDCLGDIAARDLICAQKFNGLTVLPPLLTDEMIAQYTSALLAGTITSGWTFGAGAALQIPFAMQMAYRFNGIGVTQNVLYENQKLIANQFNSAIGKIQDSLSSTASALGKLQDVVNQNAQALNTLVKQLSSNFGCISSVLNDILSRLDKVEAEVQIDCLITGRLQSLQTYVTQQLIRAAEIRASANLAATKMSECVLGQSKRVDFCGKGYHLMSFPQSAPHGVVFLHVTYVPAQEKNFTTAPAICHDGKAHFPREGVFVSNGTHWFVTQRNFYEPQIITTDNTFVSGSCDVVIGIVNNTVYDPLQPELDSGGGGSDIIKLLNEQVNKEMQSSNLYMSMSSWCYTHSLDGAGLFLFDHAAEEYEHAKKLIIFLNENNVPVQLTSISAPEHKFEGLTQIFQKAYEHEQHISESINNIVDHAIKSKDHATFNFLQWYVAEQHEEEVLFKDILDKIELIGNENHGLYLADQYVKGIAKSRKS

SEQ ID NO: 9455 - protein, 1315 aa, Artificial Sequence
  SARS-CoV-2/Wuhan/HBCDC-HB-01/2019__EPI_ISL_402132 spike protein (1-1147)(A972C_R995C) Ferritin construct
MFVFLVLLPLVSSQCVNLTTRTQLPPAYTNSITRGVYYPDKVFRSSVLHSTQDLFLPFFSNVTWFHAIHVSGTNGTKRFDNPVLPFNDGVYFASTEKSNIIRGWIFGTTLDSKTQSLLIVNNATNVVIKVCEFQFCNDPFLGVYYHKNNKSWMESEFRVYSSANNCTFEYVSQPFLMDLEGKQGNFKNLREFVFKNIDGYFKIYSKHTPINLVRDLPQGFSALEPLVDLPIGINITRFQTLLALHRSYLTPGDSSSGWTAGAAAYYVGYLQPRTFLLKYNENGTITDAVDCALDPLSETKCTLKSFTVEKGIYQTSNFRVQPTESIVRFPNITNLCPFGEVFNATRFASVYAWNRKRISNCVADYSVLYNSASFSTFKCYGVSPTKLNDLCFTNVYADSFVIRGDEVRQIAPGQTGKIADYNYKLPDDFTGCVIAWNSNNLDSKVGGNYNYLYRLFRKSNLKPFERDISTEIYQAGSTPCNGVEGFNCYFPLQSYGFQPTNGVGYQPYRVVVLSFELLHAPATVCGPKKSTNLVKNKCVNFNFNGLTGTGVLTESNKKFLPFQQFGRDIADTTDAVRDPQTLEILDITPCSFGGVSVITPGTNTSNQVAVLYQDVNCTEVPVAIHADQLTPTWRVYSTGSNVFQTRAGCLIGAEHVNNSYECDIPIGAGICASYQTQTNSPRRARSVASQSIIAYTMSLGAENSVAYSNNSIAIPTNFTISVTTEILPVSMTKTSVDCTMYICGDSTECSNLLLQYGSFCTQLNRALTGIAVEQDKNTQEVFAQVKQIYKTPPIKDFGGFNFSQILPDPSKPSKRSFIEDLLFNKVTLADAGFIKQYGDCLGDIAARDLICAQKFNGLTVLPPLLTDEMIAQYTSALLAGTITSGWTFGAGAALQIPFAMQMAYRFNGIGVTQNVLYENQKLIANQFNSAIGKIQDSLSSTASALGKLQDVVNQNAQALNTLVKQLSSNFGCISSVLNDILSRLDKVEAEVQIDCLITGRLQSLQTYVTQQLIRAAEIRASANLAATKMSECVLGQSKRVDFCGKGYHLMSFPQSAPHGVVFLHVTYVPAQEKNFTTAPAICHDGKAHFPREGVFVSNGTHWFVTQRNFYEPQIITTDNTFVSGNCDVVIGIVNNTVYDPLQPELDSGGGGSDIIKLLNEQVNKEMQSSNLYMSMSSWCYTHSLDGAGLFLFDHAAEEYEHAKKLIIFLNENNVPVQLTSISAPEHKFEGLTQIFQKAYEHEQHISESINNIVDHAIKSKDHATFNFLQWYVAEQHEEEVLFKDILDKIELIGNENHGLYLADQYVKGIAKSRKS

SEQ ID NO: 9456 - protein, 1315 aa, Artificial Sequence
  SARS-CoV-2/Guangdong/20SF028/2020__EPI_ISL_403936 spike protein (1-1147)(A972C_R995C) Ferritin construct
MFVFLVLLPLVSSQCVNLTTRTQLPPAYTNSFTRGVYYPDKVFRSSVLYSTQDLFLPFFSNVTWFHAIHVSGTNGTKRFDNPVLPFNDGVYFASTEKSNIIRGWIFGTTLDSKTQSLLIVNNATNVVIKVCEFQFCNDPFLGVYYHKNNKSWMESEFRVYSSANNCTFEYVSQPFLMDLEGKQGNFKNLREFVFKNIDGYFKIYSKHTPINLVRDLPQGFSALEPLVDLPIGINITRFQTLLALHRSYLTPGDSSSGWTAGAAAYYVGYLQPRTFLLKYNENGTITDAVDCALDPLSETKCTLKSFTVEKGIYQTSNFRVQPTESIVRFPNITNLCPFGEVFNATRFASVYAWNRKRISNCVADYSVLYNSASFSTFKCYGVSPTKLNDLCFTNVYADSFVIRGDEVRQIAPGQTGKIADYNYKLPDDFTGCVIAWNSNNLDSKVGGNYNYLYRLFRKSNLKPFERDISTEIYQAGSTPCNGVEGFNCYFPLQSYGFQPTNGVGYQPYRVVVLSFELLHAPATVCGPKKSTNLVKNKCVNFNFNGLTGTGVLTESNKKFLPFQQFGRDIADTTDAVRDPQTLEILDITPCSFGGVSVITPGTNTSNQVAVLYQDVNCTEVPVAIHADQLTPTWRVYSTGSNVFQTRAGCLIGAEHVNNSYECDIPIGAGICASYQTQTNSPRRARSVASQSIIAYTMSLGAENSVAYSNNSIAIPTNFTISVTTEILPVSMTKTSVDCTMYICGDSTECSNLLLQYGSFCTQLNRALTGIAVEQDKNTQEVFAQVKQIYKTPPIKDFGGFNFSQILPDPSKPSKRSFIEDLLFNKVTLADAGFIKQYGDCLGDIAARDLICAQKFNGLTVLPPLLTDEMIAQYTSALLAGTITSGWTFGAGAALQIPFAMQMAYRFNGIGVTQNVLYENQKLIANQFNSAIGKIQDSLSSTASALGKLQDVVNQNAQALNTLVKQLSSNFGCISSVLNDILSRLDKVEAEVQIDCLITGRLQSLQTYVTQQLIRAAEIRASANLAATKMSECVLGQSKRVDFCGKGYHLMSFPQSAPHGVVFLHVTYVPAQEKNFTTAPAICHDGKAHFPREGVFVSNGTHWFVTQRNFYEPQIITTDNTFVSGNCDVVIGIVNNTVYDPLQPELDSGGGGSDIIKLLNEQVNKEMQSSNLYMSMSSWCYTHSLDGAGLFLFDHAAEEYEHAKKLIIFLNENNVPVQLTSISAPEHKFEGLTQIFQKAYEHEQHISESINNIVDHAIKSKDHATFNFLQWYVAEQHEEEVLFKDILDKIELIGNENHGLYLADQYVKGIAKSRKS

SEQ ID NO: 9457 - protein, 1315 aa, Artificial Sequence
  SARS-CoV-2/Shenzhen/SZTH-001/2020__EPI_ISL_406592 spike protein (1-1147)(A972C_R995C) Ferritin construct
MFVFLVLLPLVSSQCVNLTTRTQLPPAYTNSFTRGVYYPDKVFRSSVLHSTQDLFLPFFSNVTWFHAIHVSGTNGTKRFDNPVLPFNDGVYFASTEKSNIIRGWIFGTTLDSKTQSLLIVNNATNVVIKVCEFQFCNDPFLGVYYHKNNKSWMESEFRVYSSANNCTFEYVSQPFLMDLEGKQGNFKNLREFVFKNIDGYFKIYSKHTPINLVRDLPQGFSALEPLVDLPIGINITRFQTLLALHRSYLTPGDSSSGWTAGAAAYYVGYLQPRTFLLKYNENGTITDAVDCALDPLSETKCTLKSFTVEKGIYQTSNFRVQPTESIVRFPNITNLCPFGEVFNATRFASVYAWNRKRISNCVADYSVLYNSASFSTFKCYGVSPTKLNDLCFTNVYADSFVIRGDEVRQIAPGQTGKIADYNYKLPDDFTGCVIAWNSNNLDSKVGGNYNYLYRLFRKSNLKPFERDISTEIYQAGSTPCNGVEGFNCYFPLQSYGFQPTNGVGYQPYRVVVLSFELLHAPATVCGPKKSTNLVKNKCVNFNFNGLTGTGVLTESNKKFLPFQQFGRDIADTTDAVRDPQTLEILDITPCSFGGVSVITPGTNTSNQVAVLYQDVNCTEVPVAIHADQLTPTWRVYSTGSNVFQTRAGCLIGAEHVNNSYECDIPIGAGICASYQTQTNSPRRARSVASQSIIAYTMSLGAENSVAYSNNSIAIPTNFTISVTTEILPVSMTKTSVDCTMYICGDSTECSNLLLQYGSFCTQLNRALTGIAVEQDKNTQEVFAQVKQIYKTPPIKDFGGFNFSQILPDPSKPSKRSFIEDLLFNKVTLADAGFIKQYGDCLGDIAARDLICAQKFNGLTVLPPLLTDEMIAQYTSALLAGTITSGWTFGAGAALQIPFAMQMAYRFNGIGVTQNVLYENQKLIANQFNSAIGKIQDSLSSTASALGKLQDVVNQNAQALNTLVKQLSSNFGCISSVLNDILSRLDKVEAEVQIDCLITGRLQSLQTYVTQQLIRAAEIRASANLAATKMSECVLGQSKRVDFCGKGYHLMSFPQSAPHGVVFLHVTYVPAQEKNFTTAPAICHDGKAHFPREGVFVSNGTHWFVTQRNFYEPQIITTDNTFVSGNCDVLIGIVNNTVYDPLQPELDSGGGGSDIIKLLNEQVNKEMQSSNLYMSMSSWCYTHSLDGAGLFLFDHAAEEYEHAKKLIIFLNENNVPVQLTSISAPEHKFEGLTQIFQKAYEHEQHISESINNIVDHAIKSKDHATFNFLQWYVAEQHEEEVLFKDILDKIELIGNENHGLYLADQYVKGIAKSRKS

SEQ ID NO: 9458 - protein, 1315 aa, Artificial Sequence
  SARS-CoV-2/Shenzhen/SZTH-004/2020__EPI_ISL_406595 spike protein (1-1147)(A972C_R995C) Ferritin construct
MFVFLVLLPLVSSQCVNLTTRTQLPPAYTNSFTRGVYYPDKVFRSSVLHSTQDLFLPFFSNVTWFHAIHVSGTNGTKRFDNPVLPFNDGVYFASTEKSNIIRGWIFGTTLDSKTQSLLIVNNATNVVIKVCEFQFCNDPFLGVYYHKNNKSWMESEFRVYSSANNCTFEYVSQPFLMDLEGKQGNFKNLREFVFKNIDGYFKIYSKHTPINLVRDLPQGFSALEPLVDLPIGINITRFQTLLALHRSYLTPGDSSSGWTAGAAAYYVGYLQPRTFLLKYNENGTITDAVDCALDPLSETKCTLKSFTVEKGIYQTSNFRVQPTESIVRFPNITNLCPFGEVFNATRFASVYAWDRKRISNCVAYYSVLYNSASFSTFKCYGVSPTKLNDLCFTNVYADSFVIRGDEVRQIAPGQTGKIADYNYKLPDDFTGCVIAWNSNNLDSKVGGNYNYLYRLFRKSNLKPFERDISTEIYQAGSTPCNGVEGFNCYFPLQSYGFQPTNGVGYQPYRVVVLSFELLHAPATVCGPKKSTNLVKNKCVNFNFNGLTGTGVLTESNKKFLPFQQFGRDIADTTDAVRDPQTLEILDITPCSFGGVSVITPGTNTSNQVAVLYQDVNCTEVPVAIHADQLTPTWRVYSTGSNVFQTRAGCLIGAEHVNNSYECDIPIGAGICASYQTQTNSPRRARSVASQSIIAYTMSLGAENSVAYSNNSIAIPTNFTISVTTEILPVSMTKTSVDCTMYICGDSTECSNLLLQYGSFCTQLNRALTGIAVEQDKNTQEVFAQVKQIYKTPPIKDFGGFNFSQILPDPSKPSKRSFIEDLLFNKVTLADAGFIKQYGDCLGDIAARDLICAQKFNGLTVLPPLLTDEMIAQYTSALLAGTITSGWTFGAGAALQIPFAMQMAYRFNGIGVTQNVLYENQKLIANQFNSAIGKIQDSLSSTASALGKLQDVVNQNAQALNTLVKQLSSNFGCISSVLNDILSRLDKVEAEVQIDCLITGRLQSLQTYVTQQLIRAAEIRASANLAATKMSECVLGQSKRVDFCGKGYHLMSFPQSAPHGVVFLHVTYVPAQEKNFTTAPAICHDGKAHFPREGVFVSNGTHWFVTQRNFYEPQIITTDNTFVSGNCDVVIGIVNNTVYDPLQPELDSGGGGSDIIKLLNEQVNKEMQSSNLYMSMSSWCYTHSLDGAGLFLFDHAAEEYEHAKKLIIFLNENNVPVQLTSISAPEHKFEGLTQIFQKAYEHEQHISESINNIVDHAIKSKDHATFNFLQWYVAEQHEEEVLFKDILDKIELIGNENHGLYLADQYVKGIAKSRKS

SEQ ID NO: 9459 - protein, 1315 aa, Artificial Sequence
  SARS-CoV-2/France/IDF0372/2020__EPI_ISL_406596 spike protein (1-1147)(A972C_R995C) Ferritin construct
MFVFLVLLPLVSSQCVNLTTRTQLPPAYTNSFTRGVYYPDKVFRSSVLHSTQDLFLPFFSNVTWFHAIHVSGTNGTKRFDNPVLPFNDGVYFASTEKSNIIRGWIFGTTLDSKTQSLLIVNNATNVVIKVCEFQFCNDPFLGVYYHKNNKSWMESEFRVYSSANNCTFEYVSQPFLMDLEGKQGNFKNLREFVFKNIDGYFKIYSKHTPINLVRDLPQGFSALEPLVDLPIGINITRFQTLLALHRSYLTPGDSSSGWTAGAAAYYVGYLQPRTFLLKYNENGTITDAVDCALDPLSETKCTLKSFTVEKGIYQTSNFRVQPTESIVRFPNITNLCPFGEVFNATRFASVYAWNRKRISNCVADYSFLYNSASFSTFKCYGVSPTKLNDLCFTNVYADSFVIRGDEVRQIAPGQTGKIADYNYKLPDDFTGCVIAWNSNNLDSKVGGNYNYLYRLFRKSNLKPFERDISTEIYQAGSTPCNGVEGFNCYFPLQSYGFQPTNGVGYQPYRVVVLSFELLHAPATVCGPKKSTNLVKNKCVNFNFNGLTGTGVLTESNKKFLPFQQFGRDIADTTDAVRDPQTLEILDITPCSFGGVSVITPGTNTSNQVAVLYQDVNCTEVPVAIHADQLTPTWRVYSTGSNVFQTRAGCLIGAEHVNNSYECDIPIGAGICASYQTQTNSPRRARSVASQSIIAYTMSLGAENSVAYSNNSIAIPTNFTISVTTEILPVSMTKTSVDCTMYICGDSTECSNLLLQYGSFCTQLNRALTGIAVEQDKNTQEVFAQVKQIYKTPPIKDFGGFNFSQILPDPSKPSKRSFIEDLLFNKVTLADAGFIKQYGDCLGDIAARDLICAQKFNGLTVLPPLLTDEMIAQYTSALLAGTITSGWTFGAGAALQIPFAMQMAYRFNGIGVTQNVLYENQKLIANQFNSAIGKIQDSLSSTASALGKLQDVVNQNAQALNTLVKQLSSNFGCISSVLNDILSRLDKVEAEVQIDCLITGRLQSLQTYVTQQLIRAAEIRASANLAATKMSECVLGQSKRVDFCGKGYHLMSFPQSAPHGVVFLHVTYVPAQEKNFTTAPAICHDGKAHFPREGVFVSNGTHWFVTQRNFYEPQIITTDNTFVSGNCDVVIGIVNNTVYDPLQPELDSGGGGSDIIKLLNEQVNKEMQSSNLYMSMSSWCYTHSLDGAGLFLFDHAAEEYEHAKKLIIFLNENNVPVQLTSISAPEHKFEGLTQIFQKAYEHEQHISESINNIVDHAIKSKDHATFNFLQWYVAEQHEEEVLFKDILDKIELIGNENHGLYLADQYVKGIAKSRKS

SEQ ID NO: 9460 - protein, 1315 aa, Artificial Sequence
  SARS-CoV-2/Australia/VIC01/2020__EPI_ISL_406844 spike protein (1-1147)(A972C_R995C) Ferritin construct
MFVFLVLLPLVSSQCVNLTTRTQLPPAYTNSFTRGVYYPDKVFRSSVLHSTQDLFLPFFSNVTWFHAIHVSGTNGTKRFDNPVLPFNDGVYFASTEKSNIIRGWIFGTTLDSKTQSLLIVNNATNVVIKVCEFQFCNDPFLGVYYHKNNKSWMESEFRVYSSANNCTFEYVSQPFLMDLEGKQGNFKNLREFVFKNIDGYFKIYSKHTPINLVRDLPQGFSALEPLVDLPIGINITRFQTLLALHRRYLTPGDSSSGWTAGAAAYYVGYLQPRTFLLKYNENGTITDAVDCALDPLSETKCTLKSFTVEKGIYQTSNFRVQPTESIVRFPNITNLCPFGEVFNATRFASVYAWNRKRISNCVADYSVLYNSASFSTFKCYGVSPTKLNDLCFTNVYADSFVIRGDEVRQIAPGQTGKIADYNYKLPDDFTGCVIAWNSNNLDSKVGGNYNYLYRLFRKSNLKPFERDISTEIYQAGSTPCNGVEGFNCYFPLQSYGFQPTNGVGYQPYRVVVLSFELLHAPATVCGPKKSTNLVKNKCVNFNFNGLTGTGVLTESNKKFLPFQQFGRDIADTTDAVRDPQTLEILDITPCSFGGVSVITPGTNTSNQVAVLYQDVNCTEVPVAIHADQLTPTWRVYSTGSNVFQTRAGCLIGAEHVNNSYECDIPIGAGICASYQTQTNSPRRARSVASQSIIAYTMSLGAENSVAYSNNSIAIPTNFTISVTTEILPVSMTKTSVDCTMYICGDSTECSNLLLQYGSFCTQLNRALTGIAVEQDKNTQEVFAQVKQIYKTPPIKDFGGFNFSQILPDPSKPSKRSFIEDLLFNKVTLADAGFIKQYGDCLGDIAARDLICAQKFNGLTVLPPLLTDEMIAQYTSALLAGTITSGWTFGAGAALQIPFAMQMAYRFNGIGVTQNVLYENQKLIANQFNSAIGKIQDSLSSTASALGKLQDVVNQNAQALNTLVKQLSSNFGCISSVLNDILSRLDKVEAEVQIDCLITGRLQSLQTYVTQQLIRAAEIRASANLAATKMSECVLGQSKRVDFCGKGYHLMSFPQSAPHGVVFLHVTYVPAQEKNFTTAPAICHDGKAHFPREGVFVSNGTHWFVTQRNFYEPQIITTDNTFVSGNCDVVIGIVNNTVYDPLQPELDSGGGGSDIIKLLNEQVNKEMQSSNLYMSMSSWCYTHSLDGAGLFLFDHAAEEYEHAKKLIIFLNENNVPVQLTSISAPEHKFEGLTQIFQKAYEHEQHISESINNIVDHAIKSKDHATFNFLQWYVAEQHEEEVLFKDILDKIELIGNENHGLYLADQYVKGIAKSRKS

SEQ ID NO: 9461 - protein, 1315 aa, Artificial Sequence
  SARS-CoV-2/Germany/BavPat1/2020__EPI_ISL_406862 spike protein (1-1147)(A972C_R995C) Ferritin construct
MFVFLVLLPLVSSQCVNLTTRTQLPPAYTNSFTRGVYYPDKVFRSSVLHSTQDLFLPFFSNVTWFHAIHVSGTNGTKRFDNPVLPFNDGVYFASTEKSNIIRGWIFGTTLDSKTQSLLIVNNATNVVIKVCEFQFCNDPFLGVYYHKNNKSWMESEFRVYSSANNCTFEYVSQPFLMDLEGKQGNFKNLREFVFKNIDGYFKIYSKHTPINLVRDLPQGFSALEPLVDLPIGINITRFQTLLALHRSYLTPGDSSSGWTAGAAAYYVGYLQPRTFLLKYNENGTITDAVDCALDPLSETKCTLKSFTVEKGIYQTSNFRVQPTESIVRFPNITNLCPFGEVFNATRFASVYAWNRKRISNCVADYSVLYNSASFSTFKCYGVSPTKLNDLCFTNVYADSFVIRGDEVRQIAPGQTGKIADYNYKLPDDFTGCVIAWNSNNLDSKVGGNYNYLYRLFRKSNLKPFERDISTEIYQAGSTPCNGVEGFNCYFPLQSYGFQPTNGVGYQPYRVVVLSFELLHAPATVCGPKKSTNLVKNKCVNFNFNGLTGTGVLTESNKKFLPFQQFGRDIADTTDAVRDPQTLEILDITPCSFGGVSVITPGTNTSNQVAVLYQGVNCTEVPVAIHADQLTPTWRVYSTGSNVFQTRAGCLIGAEHVNNSYECDIPIGAGICASYQTQTNSPRRARSVASQSIIAYTMSLGAENSVAYSNNSIAIPTNFTISVTTEILPVSMTKTSVDCTMYICGDSTECSNLLLQYGSFCTQLNRALTGIAVEQDKNTQEVFAQVKQIYKTPPIKDFGGFNFSQILPDPSKPSKRSFIEDLLFNKVTLADAGFIKQYGDCLGDIAARDLICAQKFNGLTVLPPLLTDEMIAQYTSALLAGTITSGWTFGAGAALQIPFAMQMAYRFNGIGVTQNVLYENQKLIANQFNSAIGKIQDSLSSTASALGKLQDVVNQNAQALNTLVKQLSSNFGCISSVLNDILSRLDKVEAEVQIDCLITGRLQSLQTYVTQQLIRAAEIRASANLAATKMSECVLGQSKRVDFCGKGYHLMSFPQSAPHGVVFLHVTYVPAQEKNFTTAPAICHDGKAHFPREGVFVSNGTHWFVTQRNFYEPQIITTDNTFVSGNCDVVIGIVNNTVYDPLQPELDSGGGGSDIIKLLNEQVNKEMQSSNLYMSMSSWCYTHSLDGAGLFLFDHAAEEYEHAKKLIIFLNENNVPVQLTSISAPEHKFEGLTQIFQKAYEHEQHISESINNIVDHAIKSKDHATFNFLQWYVAEQHEEEVLFKDILDKIELIGNENHGLYLADQYVKGIAKSRKS

SEQ ID NO: 9462 - protein, 1315 aa, Artificial Sequence
  SARS-CoV-2/Wuhan/HBCDC-HB-02/2020__EPI_ISL_412978 spike protein (1-1147)(A972C_R995C) Ferritin construct
MFVFLVLLPLVSSQCVNLTTRTQLPPAYTNSFTRGVYYPDKVFRSSVLHSTQDLFLPFFSNVTWFHAIHVSGTNGTKRFDNPVLPFNDGVYFASTEKSNIIRGWIFGTTLDSKTQSLLIVNNATNVVIKVCEFQFCNDPFLGVYYHKNNKSWMESEFRVYSSANNCTFEYVSQPFLMDLEGKQGNFKNLREFVFKNIDGYFKIYSKHTPINLVRDLPQGFSALEPLVDLPIGINITRFQTLLALHRSYLTPGDSSSGWTAGAAAYYVGYLQPRTFLLKYNENGTITDAVDCALDPLSETKCTLKSFTVEKGIYQTSNFRVQPTESIVRFPNITNLCPFGEVFNATRFASVYAWNRKRISNCVADYSVLYNSASFSTFKCYGVSPTKLNDLCFTNVYADSFVIRGDEVRQIAPGQTGKIADYNYKLPDDFTGCVIAWNSNNLDSKVGGNYNYLYRLFRKSNLKPFERDISTEIYQAGSTPCNGVEGFNCYFPLQSYGFQPTNGVGYQPYRVVVLSFELLHAPATVCGPKKSTNLVKNKCVNFNFNGLTGTGVLTESNKKFLPFQQFGRDIADTTDAVRDPQTLEILDITPCSFGGVSVITPGTNTSNQVAVLYQDVNCTEVPVAIHADQLTPTWRVYSTGSNVFQTRAGCLIGAEHVNNSYECDIPIGAGICASYQTQTNSPRRARSVASQSIIAYTMSLGAENSVAYSNNSIAIPTNFTISVTTEILPVSMTKTSVDCTMYICGDSTECSNFLLQYGSFCTQLNRALTGIAVEQDKNTQEVFAQVKQIYKTPPIKDFGGFNFSQILPDPSKPSKRSFIEDLLFNKVTLADAGFIKQYGDCLGDIAARDLICAQKFNGLTVLPPLLTDEMIAQYTSALLAGTITSGWTFGAGAALQIPFAMQMAYRFNGIGVTQNVLYENQKLIANQFNSAIGKIQDSLSSTASALGKLQDVVNQNAQALNTLVKQLSSNFGCISSVLNDILSRLDKVEAEVQIDCLITGRLQSLQTYVTQQLIRAAEIRASANLAATKMSECVLGQSKRVDFCGKGYHLMSFPQSAPHGVVFLHVTYVPAQEKNFTTAPAICHDGKAHFPREGVFVSNGTHWFVTQRNFYEPQIITTDNTFVSGNCDVVIGIVNNTVYDPLQPELDSGGGGSDIIKLLNEQVNKEMQSSNLYMSMSSWCYTHSLDGAGLFLFDHAAEEYEHAKKLIIFLNENNVPVQLTSISAPEHKFEGLTQIFQKAYEHEQHISESINNIVDHAIKSKDHATFNFLQWYVAEQHEEEVLFKDILDKIELIGNENHGLYLADQYVKGIAKSRKS

SEQ ID NO: 9463 - protein, 1315 aa, Artificial Sequence
  SARS-CoV-2/Australia/QLD02/2020__EPI_ISL_407896 spike protein (1-1147)(A972C_R995C) Ferritin construct
MFVFLVLLPLVSSQCVNLTTRTQLPPAYTNSFTRGVYYPDKVFRSSVLHSTQDLFLPFFSNVTWFHAIHVSGTNGTKRFDNPVLPFNDGVYFASTEKSNIIRGWIFGTTLDSKTQSLLIVNNATNVVIKVCEFQFCNDPFLGVYYHKNNKSWMESEFRVYSSANNCTFEYVSQPFLMDLEGKQGNFKNLREFVFKNIDGYFKIYSKHTPINLVRDLPQGFSALEPLVDLPIGINITRFQTLLALHRSYLTPGDSSSGWTAGAAAYYVGYLQPRTFLLKYNENGTITDAVDCALDPLSETKCTLKSFTVEKGIYQTSNFRVQPTESIVRFPNITNLCPFGEVFNATRFASVYAWNRKRISNCVADYSVLYNSASFSTFKCYGVSPTKLNDLCFTNVYADSFVIRGDEVRQIAPGQTGKIADYNYKLPDDFTGCVIAWNSNNLDSKVGGNYNYLYRLFRKSNLKPFERDISTEIYQAGSTPCNGVEGFNCYFPLQSYGFQPTNGVGYQPYRVVVLSFELLHAPATVCGPKKSTNLVKNKCVNFNFNGLTGTGVLTESNKKFLPFQQFGRDIADTTDAVRDPQTLEILDITPCSFGGVSVITPGTNTSNQVAVLYQDVNCTEVPVAIHADQLTPTWRVYSTGSNVFQTRAGCLIGAEHVNNSYECDIPIGAGICASYQTQTNSPRRARSVASQSIIAYTMSLGAENSVAYSNNSIAIPTNFTISVTTEILPVSMTKTSVDCTMYICGDSTECSNLLLQYGSFCTQLNRALTGIAVEQDKNTQEVFAQVKQIYKTPPIKDFGGFNFSQILPDPSKPSKRSFIEDLLFNKVTLADAGFIKQYGDCLGDIAARDLICAQKFNGLTVLPPLLTDEMIAQYTSALLAGTITSGWTFGAGAALQIPFAMQMAYRFNGIGVTQNVLYENQKLIANQFNSAIGKIQDSLSSTASALGKLQDVVNQNAQALNTLVKQLSSNFGCISSVLNDILSRLDKVEAEVQIDCLITGRLQSLQTYVTQQLIRAAEIRASANLAATKMSECVLGQSKRVDFCGKGYHLMSFPQSAPHGVVFLHVTYVPAQEKNFTTAPAICHDGKAHFPREGVFVSNGTHWFVTQRNFYEPQIITTDNTFVSGNCDVVIGIVNNTVYDPLQLELDSGGGGSDIIKLLNEQVNKEMQSSNLYMSMSSWCYTHSLDGAGLFLFDHAAEEYEHAKKLIIFLNENNVPVQLTSISAPEHKFEGLTQIFQKAYEHEQHISESINNIVDHAIKSKDHATFNFLQWYVAEQHEEEVLFKDILDKIELIGNENHGLYLADQYVKGIAKSRKS

SEQ ID NO: 9464 - protein, 1315 aa, Artificial Sequence
  SARS-CoV-2/India/1-31/2020__EPI_ISL_413523 spike protein (1-1147)(A972C_R995C) Ferritin construct
MFVFLVLLPLVSSQCVNLTTRTQLPPAYTNSFTRGVYYPDKVFRSSVLHSTQDLFLPFFSNVTWFHAIHVSGTNGTKRFDNPVLPFNDGVYFASTEKSNIIRGWIFGTTLDSKTQSLLIVNNATNVVIKVCEFQFCNDPFLGVYYHKNNKSWMESEFRVYSSANNCTFEYVSQPFLMDLEGKQGNFKNLREFVFKNIDGYFKIYSKHTPINLVRDLPQGFSALEPLVDLPIGINITRFQTLLALHRSYLTPGDSSSGWTAGAAAYYVGYLQPRTFLLKYNENGTITDAVDCALDPLSETKCTLKSFTVEKGIYQTSNFRVQPTESIVRFPNITNLCPFGEVFNATRFASVYAWNRKRISNCVADYSVLYNSASFSTFKCYGVSPTKLNDLCFTNVYADSFVIRGDEVRQIAPGQTGKIADYNYKLPDDFTGCVIAWNSNNLDSKVGGNYNYLYRLFRKSNLKPFERDISTEIYQAGSTPCNGVEGFNCYFPLQSYGFQPTNGVGYQPYRVVVLSFELLHAPATVCGPKKSTNLVKNKCVNFNFNGLTGTGVLTESNKKFLPFQQFGRDIADTTDAVRDPQTLEILDITPCSFGGVSVITPGTNTSNQVAVLYQDVNCTEVPVAIHADQLTPTWRVYSTGSNVFQTRAGCLIGAEHVNNSYECDIPIGAGICASYQTQTNSPRRARSVASQSIIAYTMSLGAENSVAYSNNSIAIPTNFTISVTTEILPVSMTKTSVDCTMYICGDSTECSNLLLQYGSFCTQLNRALTGIAVEQDKNTQEVFAQVKQIYKTPPIKDFGGFNFSQILPDPSKPSKRSFIEDLLFNKVTLADAGFIKQYGDCLGDIAARDLICAQKFNGLTVLPPLLTDEMIAQYTSALLAGTITSGWTFGAGAALQIPFAMQMAYRFNGIGVTQNVLYENQKLIANQFNSVIGKIQDSLSSTASALGKLQDVVNQNAQALNTLVKQLSSNFGCISSVLNDILSRLDKVEAEVQIDCLITGRLQSLQTYVTQQLIRAAEIRASANLAATKMSECVLGQSKRVDFCGKGYHLMSFPQSAPHGVVFLHVTYVPAQEKNFTTAPAICHDGKAHFPREGVFVSNGTHWFVTQRNFYEPQIITTDNTFVSGNCDVVIGIVNNTVYDPLQPELDSGGGGSDIIKLLNEQVNKEMQSSNLYMSMSSWCYTHSLDGAGLFLFDHAAEEYEHAKKLIIFLNENNVPVQLTSISAPEHKFEGLTQIFQKAYEHEQHISESINNIVDHAIKSKDHATFNFLQWYVAEQHEEEVLFKDILDKIELIGNENHGLYLADQYVKGIAKSRKS

SEQ ID NO: 9465 - protein, 1315 aa, Artificial Sequence
  SARS-CoV-2/Guangdong/GD2020087-P0008/2020__EPI_ISL_413863 spike protein (1-1147)(A972C_R995C) Ferritin construct
MFVFLVLLPLVSSQCVNLTTRTQLPPAYTNSFTRGVYYPDKVFRSSVLHSTQDLFLPFFSNVTWFHAIHVSGTNGTKRFDNPVLPFNDGVYFASTEKSNIIRGWIFGTTLDSKTQSLLIVNNATNVVIKVCEFQFCNDPFLGVYYHKNNKSWMESEFRVYSSANNCTFEYVSQPFLMDLEGKQGNFKNLREFVFKNIDGYFKIYSKHTPINLVRDLPQGFSALEPLVDLPIGINITRFQTLLALHRSYLTPGDSSSGWTAGAAAYYVGYLQPRTFLLKYNENGTITDAVDCALDPLSETKCTLKSFTVEKGIYQTSNFRVQPTESIVRFPNITNLCPFGEVFNATRFASVYAWNRKRISNCVADYSVLYNSASFSTFKCYGVSPTKLNDLCFTNVYADSFVIRGDEVREIAPGQTGKIADYNYKLPDDFTGCVIAWNSNNLDSKVGGNYNYLYRLFRKSNLKPFERDISTEIYQAGSTPCNGVEGFNCYFPLQSYGFQPTNGVGYQPYRVVVLSFELLHAPATVCGPKKSTNLVKNKCVNFNFNGLTGTGVLTESNKKFLPFQQFGRDIADTTDAVRDPQTLEILDITPCSFGGVSVITPGTNTSNQVAVLYQDVNCTEVPVAIHADQLTPTWRVYSTGSNVFQTRAGCLIGAEHVNNSYECDIPIGAGICASYQTQTNSPRRARSVASQSIIAYTMSLGAENSVAYSNNSIAIPTNFTISVTTEILPVSMTKTSVDCTMYICGDSTECSNLLLQYGSFCTQLNRALTGIAVEQDKNTQEVFAQVKQIYKTPPIKDFGGFNFSQILPDPSKPSKRSFIEDLLFNKVTLADAGFIKQYGDCLGDIAARDLICAQKFNGLTVLPPLLTDEMIAQYTSALLAGTITSGWTFGAGAALQIPFAMQMAYRFNGIGVTQNVLYENQKLIANQFNSAIGKIQDSLSSTASALGKLQDVVNQNAQALNTLVKQLSSNFGCISSVLNDILSRLDKVEAEVQIDCLITGRLQSLQTYVTQQLIRAAEIRASANLAATKMSECVLGQSKRVDFCGKGYHLMSFPQSAPHGVVFLHVTYVPAQEKNFTTAPAICHDGKAHFPREGVFVSNGTHWFVTQRNFYEPQIITTDNTFVSGNCDVVIGIVNNTVYDPLQPELDSGGGGSDIIKLLNEQVNKEMQSSNLYMSMSSWCYTHSLDGAGLFLFDHAAEEYEHAKKLIIFLNENNVPVQLTSISAPEHKFEGLTQIFQKAYEHEQHISESINNIVDHAIKSKDHATFNFLQWYVAEQHEEEVLFKDILDKIELIGNENHGLYLADQYVKGIAKSRKS

SEQ ID NO: 9466 - protein, 1315 aa, Artificial Sequence
  SARS-CoV-2/Sweden/01/2020__EPI_ISL_411951 spike protein (1-1147)(A972C_R995C) Ferritin construct
MFVFLVLLPLVSSQCVNLTTRTQLPPAYTNSFTRGVYYPDKVFRSSVLHSTQDLFLPFFSNVTWFHAIHVSGTNGTKRFDNPVLPFNDGVYFASTEKSNIIRGWIFGTTLDSKTQSLLIVNNATNVVIKVCEFQFCNDPFLGVYYHKNNKSWMESEFRVYSSANNCTFEYVSQPFLMDLEGKQGNFKNLREFVFKNIDGYFKIYSKHTPINLVRDLPQGFSALEPLVDLPIGINITRFQTLLALHRSYLTPGDSSSGWTAGAAAYYVGYLQPRTFLLKYNENGTITDAVDCALDPLSETKCTLKSFTVEKGIYQTSNFRVQPTESIVRFPNITNLCPFGEVFNATRFASVYAWNRKRISNCVADYSVLYNSASFSTFKCYGVSPTKLNDLCFTNVYADSFVIRGDEVRQIAPGQTGKIADYNYKLPDDFTGCVIAWNSNNLDSKVGGNYNYLYRLFRKSNLKPFERDISTEIYQAGSTPCNGVEGFNCYFPLQSYGFQPTNGVGYQPYRVVVLSFELLHAPATVCGPKKSTNLVKNKCVNFNFNGLTGTGVLTESNKKFLPFQQFGRDIADTTDAVRDPQTLEILDITPCSFGGVSVITPGTNTSNQVAVLYQDVNCTEVPVAIHADQLTPTWRVYSTGSNVFQTRAGCLIGAEHVNNSYECDIPIGAGICASYQTQTNSPRRARSVASQSIIAYTMSLGAENSVAYSNNSIAIPTNFTISVTTEILPVSMTKTSVDCTMYICGDSTECSNLLLQYGSFCTQLNRALTGIAVEQDKNTQEVFAQVKQIYKTPPIKDCGGFNFSQILPDPSKPSKRSFIEDLLFNKVTLADAGFIKQYGDCLGDIAARDLICAQKFNGLTVLPPLLTDEMIAQYTSALLAGTITSGWTFGAGAALQIPFAMQMAYRFNGIGVTQNVLYENQKLIANQFNSAIGKIQDSLSSTASALGKLQDVVNQNAQALNTLVKQLSSNFGCISSVLNDILSRLDKVEAEVQIDCLITGRLQSLQTYVTQQLIRAAEIRASANLAATKMSECVLGQSKRVDFCGKGYHLMSFPQSAPHGVVFLHVTYVPAQEKNFTTAPAICHDGKAHFPREGVFVSNGTHWFVTQRNFYEPQIITTDNTFVSGNCDVVIGIVNNTVYDPLQPELDSGGGGSDIIKLLNEQVNKEMQSSNLYMSMSSWCYTHSLDGAGLFLFDHAAEEYEHAKKLIIFLNENNVPVQLTSISAPEHKFEGLTQIFQKAYEHEQHISESINNIVDHAIKSKDHATFNFLQWYVAEQHEEEVLFKDILDKIELIGNENHGLYLADQYVKGIAKSRKS

SEQ ID NO: 9467 - protein, 1315 aa, Artificial Sequence
  SARS-CoV-2/Tianmen/HBCDC-HB-07/2020__EPI_ISL_412983 spike protein (1-1147)(A972C_R995C) Ferritin construct
MFVFLVLLPLVSSQCVNLTTRTQLPPAYTNSFTRGVYYPDKVFRSSVLHSTQDLFLPFFSNVTWFHAIHVSGTNGTKRFDNPVLPFNDGVYFASTEKSNIIRGWIFGTTLDSKTQSLLIVNNATNVVIKVCEFQFCNDPFLGVYYHKNNKSWMESEFRVYSSANNCTFEYVSQPFLMDLEGKQGNFKNLREFVFKNIDGYFKIYSKHTPINLVRDLPQGFSALEPLVDLPIGINITRFQTLLALHRSYLTPGDSSSGWTAGAAAYYVGYLQPRTFLLKYNENGTITDAVDCALDPLSETKCTLKSFTVEKGIYQTSNFRVQPTESIVRFPNITNLCPFGEVFNATRFASVYAWNRKRISNCVADYSVLYNSASFSTFKCYGVSPTKLNDLCFTNVYADSFVIRGDEVRQIAPGQTGKIADYNYKLPDDFTGCVIAWNSNNLDSKVGGNYNYLYRLFRKSNLKPFERDISTEIYQAGSTPCNGVEGFNCYFPLQSYGFQPTNGVGYQPYRVVVLSFELLHAPATVCGPKKSTNLVKNKCVNFNFNGLTGTGVLTESNKKFLPFQQFGRDIADTTDAVRDPQTLEILDITPCSFGGVSVITPGTNTSNQVAVLYQDLNCTEVPVAIHADQLTPTWRVYSTGSNVFQTRAGCLIGAEHVNNSYECDIPIGAGICASYQTQTNSPRRARSVASQSIIAYTMSLGAENSVAYSNNSIAIPTNFTISVTTEILPVSMTKTSVDCTMYICGDSTECSNLLLQYGSFCTQLNRALTGIAVEQDKNTQEVFAQVKQIYKTPPIKDFGGFNFSQILPDPSKPSKRSFIEDLLFNKVTLADAGFIKQYGDCLGDIAARDLICAQKFNGLTVLPPLLTDEMIAQYTSALLAGTITSGWTFGAGAALQIPFAMQMAYRFNGIGVTQNVLYENQKLIANQFNSAIGKIQDSLSSTASALGKLQDVVNQNAQALNTLVKQLSSNFGCISSVLNDILSRLDKVEAEVQIDCLITGRLQSLQTYVTQQLIRAAEIRASANLAATKMSECVLGQSKRVDFCGKGYHLMSFPQSAPHGVVFLHVTYVPAQEKNFTTAPAICHDGKAHFPREGVFVSNGTHWFVTQRNFYEPQIITTDNTFVSGNCDVVIGIVNNTVYDPLQPELDSGGGGSDIIKLLNEQVNKEMQSSNLYMSMSSWCYTHSLDGAGLFLFDHAAEEYEHAKKLIIFLNENNVPVQLTSISAPEHKFEGLTQIFQKAYEHEQHISESINNIVDHAIKSKDHATFNFLQWYVAEQHEEEVLFKDILDKIELIGNENHGLYLADQYVKGIAKSRKS

SEQ ID NO: 9468 - protein, 1315 aa, Artificial Sequence
  SARS-CoV-2/Hong Kong/case42_VM20002493/2020__EPI_ISL_414527 spike protein (1-1147)(A972C_R995C) Ferritin construct
MFVFLVLLPLVSSQCVNLTTRTQLPPAYTNSFTRGVYYPDKVFRSSVLHSTQDLFLPFFSNVTWFHAIHVSGTNGTKRFDNPVLPFNDGVYFASTEKSNIIRGWIFGTTLDSKTQSLLIVNNATNVVIKVCEFQFCNDPFLGVYYHKNNKSWMESEFRVYSSANNCTFEYVSQPFLMDLEGKQGNFKNLREFVFKNIDGYFKIYSKHTPINLVRDLPQGFSALEPLVDLPIGINITRFQTLLALHRSYLTPGDSSSGWTAGAAAYYVGYLQPRTFLLKYNENGTITDAVDCALDPLSETKCTLKSFTVEKGIYQTSNFRVQPTESIVRFPNITNLCPFGEVFNATRFASVYAWNRKRISNCVADYSVLYNSASFSTFKCYGVSPTKLNDLCFTNVYADSFVIRGDEVRQIAPGQTGKIADYNYKLPDDFTGCVIAWNSNNLDSKVGGNYNYLYRLFRKSNLKPFERDISTEIYQAGSTPCNGVEGFNCYFPLQSYGFQPTNGVGYQPYRVVVLSFELLHAPATVCGPKKSTNLVKNKCVNFNFNGLTGTGVLTESNKKFLPFQQFGRDIADTTDAVRDPQTLEILDITPCSFGGVSVITPGTNTSNQVAVLYQDVNCTEVPVAIHADQLTPTWRVYSTGSNVFQTRAGCLIGAEHVNNSYECDIPIGAGICASYQTQTNSPRRARSVASQSIIAYTMSLGAENSVAYSNNSIAIPTNFAISVTTEILPVSMTKTSVDCTMYICGDSTECSNLLLQYGSFCTQLNRALTGIAVEQDKNTQEVFAQVKQIYKTPPIKDFGGFNFSQILPDPSKPSKRSFIEDLLFNKVTLADAGFIKQYGDCLGDIAARDLICAQKFNGLTVLPPLLTDEMIAQYTSALLAGTITSGWTFGAGAALQIPFAMQMAYRFNGIGVTQNVLYENQKLIANQFNSAIGKIQDSLSSTASALGKLQDVVNQNAQALNTLVKQLSSNFGCISSVLNDILSRLDKVEAEVQIDCLITGRLQSLQTYVTQQLIRAAEIRASANLAATKMSECVLGQSKRVDFCGKGYHLMSFPQSAPHGVVFLHVTYVPAQEKNFTTAPAICHDGKAHFPREGVFVSNGTHWFVTQRNFYEPQIITTDNTFVSGNCDVVIGIVNNTVYDPLQPELDSGGGGSDIIKLLNEQVNKEMQSSNLYMSMSSWCYTHSLDGAGLFLFDHAAEEYEHAKKLIIFLNENNVPVQLTSISAPEHKFEGLTQIFQKAYEHEQHISESINNIVDHAIKSKDHATFNFLQWYVAEQHEEEVLFKDILDKIELIGNENHGLYLADQYVKGIAKSRKS

SEQ ID NO: 9469 - protein, 1315 aa, Artificial Sequence
  SARS-CoV-2/USA/CruiseA-23/2020__EPI_ISL_414482 spike protein (1-1147)(A972C_R995C) Ferritin construct
MFVFLVLLPLVSSQCVNLTTRTQLPPAYTNSFTRGVYYPDKVFRSSVLHSTQDLFLPFFSNVTWFHAIHVSGTNGTKRFDNPVLPFNDGVYFASTEKSNIIRGWIFGTTLDSKTQSLLIVNNATNVVIKVCEFQFCNDPFLGVYYHKNNKSWMESEFRVYSSANNCTFEYVSQPFLMDLEVKQGNFKNLREFVFKNIDGYFKIYSKHTPINLVRDLPQGFSALEPLVDLPIGINITRFQTLLALHRSYLTPGDSSSGWTAGAAAYYVGYLQPRTFLLKYNENGTITDAVDCALDPLSETKCTLKSFTVEKGIYQTSNFRVQPTESIVRFPNITNLCPFGEVFNATRFASVYAWNRKRISNCVADYSVLYNSASFSTFKCYGVSPTKLNDLCFTNVYADSFVIRGDEVRQIAPGQTGKIADYNYKLPDDFTGCVIAWNSNNLDSKVGGNYNYLYRLFRKSNLKPFERDISTEIYQAGSTPCNGVEGFNCYFPLQSYGFQPTNGVGYQPYRVVVLSFELLHAPATVCGPKKSTNLVKNKCVNFNFNGLTGTGVLTESNKKFLPFQQFGRDIADTTDAVRDPQTLEILDITPCSFGGVSVITPGTNTSNQVAVLYQDVNCTEVPVAIHADQLTPTWRVYSTGSNVFQTRAGCLIGAEHVNNSYECDIPIGAGICASYQTQTNSPRRARSVASQSIIAYTMSLGAENSVAYSNNSIAIPTNFTISVTTEILPVSMTKTSVDCTMYICGDSTECSNLLLQYGSFCTQLNRALTGIAVEQDKNTQEVFAQVKQIYKTPPIKDFGGFNFSQILPDPSKPSKRSFIEDLLFNKVTLADAGFIKQYGDCLGDIAARDLICAQKFNGLTVLPPLLTDEMIAQYTSALLAGTITSGWTFGAGAALQIPFAMQMAYRFNGIGVTQNVLYENQKLIANQFNSAIGKIQDSLSSTASALGKLQDVVNQNAQALNTLVKQLSSNFGCISSVLNDILSRLDKVEAEVQIDCLITGRLQSLQTYVTQQLIRAAEIRASANLAATKMSECVLGQSKRVDFCGKGYHLMSFPQSAPHGVVFLHVTYVPAQEKNFTTAPAICHDGKAHFPREGVFVSNGTHWFVTQRNFYEPQIITTDNTFVSGNCDVVIGIVNNTVYDPLQPELDSGGGGSDIIKLLNEQVNKEMQSSNLYMSMSSWCYTHSLDGAGLFLFDHAAEEYEHAKKLIIFLNENNVPVQLTSISAPEHKFEGLTQIFQKAYEHEQHISESINNIVDHAIKSKDHATFNFLQWYVAEQHEEEVLFKDILDKIELIGNENHGLYLADQYVKGIAKSRKS

SEQ ID NO: 9470 - protein, 1315 aa, Artificial Sequence
  SARS-CoV-2/Hong Kong/case85_VM20002868/2020__EPI_ISL_414519 spike protein (1-1147)(A972C_R995C) Ferritin construct
MFVFLVLVPLVSSQCVNLTTRTQLPPAYTNSFTRGVYYPDKVFRSSVLHSTQDLFLPFFSNVTWFHAIHVSGTNGTKRFDNPVLPFNDGVYFASTEKSNIIRGWIFGTTLDSKTQSLLIVNNATNVVIKVCEFQFCNDPFLGVYYHKNNKSWMESEFRVYSSANNCTFEYVSQPFLMDLEGKQGNFKNLREFVFKNIDGYFKIYSKHTPINLVRDLPQGFSALEPLVDLPIGINITRFQTLLALHRSYLTPGDSSSGWTAGAAAYYVGYLQPRTFLLKYNENGTITDAVDCALDPLSETKCTLKSFTVEKGIYQTSNFRVQPTESIVRFPNITNLCPFGEVFNATRFASVYAWNRKRISNCVADYSVLYNSASFSTFKCYGVSPTKLNDLCFTNVYADSFVIRGDEVRQIAPGQTGKIADYNYKLPDDFTGCVIAWNSNNLDSKVGGNYNYLYRLFRKSNLKPFERDISTEIYQAGSTPCNGVEGFNCYFPLQSYGFQPTNGVGYQPYRVVVLSFELLHAPATVCGPKKSTNLVKNKCVNFNFNGLTGTGVLTESNKKFLPFQQFGRDIADTTDAVRDPQTLEILDITPCSFGGVSVITPGTNTSNQVAVLYQDVNCTEVPVAIHADQLTPTWRVYSTGSNVFQTRAGCLIGAEHVNNSYECDIPIGAGICASYQTQTNSPRRARSVASQSIIAYTMSLGAENSVAYSNNSIAIPTNFTISVTTEILPVSMTKTSVDCTMYICGDSTECSNLLLQYGSFCTQLNRALTGIAVEQDKNTQEVFAQVKQIYKTPPIKDFGGFNFSQILPDPSKPSKRSFIEDLLFNKVTLADAGFIKQYGDCLGDIAARDLICAQKFNGLTVLPPLLTDEMIAQYTSALLAGTITSGWTFGAGAALQIPFAMQMAYRFNGIGVTQNVLYENQKLIANQFNSAIGKIQDSLSSTASALGKLQDVVNQNAQALNTLVKQLSSNFGCISSVLNDILSRLDKVEAEVQIDCLITGRLQSLQTYVTQQLIRAAEIRASANLAATKMSECVLGQSKRVDFCGKGYHLMSFPQSAPHGVVFLHVTYVPAQEKNFTTAPAICHDGKAHFPREGVFVSNGTHWFVTQRNFYEPQIITTDNTFVSGNCDVVIGIVNNTVYDPLQPELDSGGGGSDIIKLLNEQVNKEMQSSNLYMSMSSWCYTHSLDGAGLFLFDHAAEEYEHAKKLIIFLNENNVPVQLTSISAPEHKFEGLTQIFQKAYEHEQHISESINNIVDHAIKSKDHATFNFLQWYVAEQHEEEVLFKDILDKIELIGNENHGLYLADQYVKGIAKSRKS

SEQ ID NO: 9471 - protein, 1315 aa, Artificial Sequence; identical to SEQ ID NO: 9461
  SARS-CoV-2/England/200990660/2020__EPI_ISL_414523 spike protein (1-1147)(A972C_R995C) Ferritin construct

SEQ ID NO: 9472 - protein, 1315 aa, Artificial Sequence
  SARS-CoV-2/Australia/NSW09/2020__EPI_ISL_413595 spike protein (1-1147)(A972C_R995C) Ferritin construct
MFVFLVLLPLVSSQCVNLTTRTQLPPAYTNSFTRGVYYPDKVFRSSVLHSTQDLFLPFFSNVTWFHAIHVSGTNGTKRFDNPVLPFNDGVYFASTEKSNIIRGWIFGTTLDSKTQSLLIVNNATNVVIKVCEFQFCNDPFLGVYYHKNNKSWMESEFRVYSSANNCTFEYVSQPFLMDLEGKQGNFKNLREFVFKNIDGYFKIYSKHTPINLVRDLPQGFSALEPLVDLPIGINITRFQTLLALHRSYLTPGDSSSGWTAGAAAYYVGYLQPRTFLLKYNENGTITDAVDCALDPLSETKCTLKSFTVEKGIYQTSNFRVQPTESIVRFPNITNLCPFGEVFNATRFASVYAWNRKRISNCVADYSVLYNSASFSTFKCYGVSPTKLNDLCFTNVYADSFVIRGDEVRQIAPGQTGKIADYNYKLPDDFTGCVIAWNSNNLDSKVGGNYNYLYRLFRKSNLKPFERDISTEIYQAGSTPCNGVEGFNCYFPLQSYGFQPTNGVGYQPYRVVVLSFELLHAPATVCGPKKSTNLVKNKCVNFNFNGLTGTGVLTESNKKFLPFQQFGRDIADTTDAVRDPQTLEILDITPCSFGGVSVITPGTNTSNQVAVLYQDVNCTEVPVAIHADQLTPTWRVYSTGSNVFQTRAGCLIGAEHVNNSYECDIPIGAGICASYQTQTNSPRRARSVASQSIIAYTMSLGAENSVAYSNNSIAIPTNFTISVTTEILPVSMTKTSVDCTMYICGDSTECSNLLLQYGSFCTQLNRALTGIAVEQDKNTQEVFAQVKQIYKTPPIKDFGGFNFSQILPDPSKPSKRSFIEDLLFNKVTLADAGFIKQYGDCLGDIAARDLICAQKFNGLTVLPPLLTDEMIAQYTSALLAGTITSGWTFGAGAALQIPFAMQMAYRFNGIGVTQNVLYENQKLIANQFNSAIGKIQDSLSFTASALGKLQDVVNQNAQALNTLVKQLSSNFGCISSVLNDILSRLDKVEAEVQIDCLITGRLQSLQTYVTQQLIRAAEIRASANLAATKMSECVLGQSKRVDFCGKGYHLMSFPQSAPHGVVFLHVTYVPAQEKNFTTAPAICHDGKAHFPREGVFVSNGTHWFVTQRNFYEPQIITTDNTFVSGNCDVVIGIVNNTVYDPLQPELDSGGGGSDIIKLLNEQVNKEMQSSNLYMSMSSWCYTHSLDGAGLFLFDHAAEEYEHAKKLIIFLNENNVPVQLTSISAPEHKFEGLTQIFQKAYEHEQHISESINNIVDHAIKSKDHATFNFLQWYVAEQHEEEVLFKDILDKIELIGNENHGLYLADQYVKGIAKSRKS

SEQ ID NO: 9473 - protein, 1315 aa, Artificial Sequence; identical to SEQ ID NO: 9453
  SARS-CoV-2/Australia/NSW10/2020__EPI_ISL_413596 spike protein (1-1147)(A972C_R995C) Ferritin construct

SEQ ID NO: 9474 - protein, 1315 aa, Artificial Sequence
  SARS-CoV-2/Switzerland/1000477797/2020__EPI_ISL_413023 spike protein (1-1147)(A972C_R995C) Ferritin construct
MFVFLVLLPLVSSQCVNLTTRTQLPPAYTNSFTRGVYYPDKVFRSSVLHSTQDLFLPFFSNVTWFHAIHVSGTNGTKRFDNPVLPFNDGVYFASTEKSNIIRGWIFGTTLDSKTQSLLIVNNATNVVIKVCEFQFCNDPFLGVYYHKNNKSWMESEFRVYSSANNCTFEYVSQPFLMDLEGKQGNFKNLREFVFKNIDGYFNIYSKHTPINLVRDLPQGFSALEPLVDLPIGINITRFQTLLALHRSYLTPGDSSSGWTAGAAAYYVGYLQPRTFLLKYNENGTITDAVDCALDPLSETKCTLKSFTVEKGIYQTSNFRVQPTESIVRFPNITNLCPFGEVFNATRFASVYAWNRKRISNCVADYSVLYNSASFSTFKCYGVSPTKLNDLCFTNVYADSFVIRGDEVRQIAPGQTGKIADYNYKLPDDFTGCVIAWNSNNLDSKVGGNYNYLYRLFRKSNLKPFERDISTEIYQAGSTPCNGVEGFNCYFPLQSYGFQPTNGVGYQPYRVVVLSFELLHAPATVCGPKKSTNLVKNKCVNFNFNGLTGTGVLTESNKKFLPFQQFGRDIADTTDAVRDPQTLEILDITPCSFGGVSVITPGTNTSNQVAVLYQGVNCTEVPVAIHADQLTPTWRVYSTGSNVFQTRAGCLIGAEHVNNSYECDIPIGAGICASYQTQTNSPRRARSVASQSIIAYTMSLGAENSVAYSNNSIAIPTNFTISVTTEILPVSMTKTSVDCTMYICGDSTECSNLLLQYGSFCTQLNRALTGIAVEQDKNTQEVFAQVKQIYKTPPIKDFGGFNFSQILPDPSKPSKRSFIEDLLFNKVTLADAGFIKQYGDCLGDIAARDLICAQKFNGLTVLPPLLTDEMIAQYTSALLAGTITSGWTFGAGAALQIPFAMQMAYRFNGIGVTQNVLYENQKLIANQFNSAIGKIQDSLSSTASALGKLQDVVNQNAQALNTLVKQLSSNFGCISSVLNDILSRLDKVEAEVQIDCLITGRLQSLQTYVTQQLIRAAEIRASANLAATKMSECVLGQSKRVDFCGKGYHLMSFPQSAPHGVVFLHVTYVPAQEKNFTTAPAICHDGKAHFPREGVFVSNGTHWFVTQRNFYEPQIITTDNTFVSGNCDVVIGIVNNTVYDPLQPELDSGGGGSDIIKLLNEQVNKEMQSSNLYMSMSSWCYTHSLDGAGLFLFDHAAEEYEHAKKLIIFLNENNVPVQLTSISAPEHKFEGLTQIFQKAYEHEQHISESINNIVDHAIKSKDHATFNFLQWYVAEQHEEEVLFKDILDKIELIGNENHGLYLADQYVKGIAKSRKS

SEQ ID NO: 9475 - protein, 1315 aa, Artificial Sequence
  SARS-CoV-2/Belgium/BA-02291/2020__EPI_ISL_415159 spike protein (1-1147)(A972C_R995C) Ferritin construct
MFVFLVLLPLVSSQCVNLTTRTQLPPAYTNSFTRGVYYPDKVFRSSVLHSTQDLFLPFFSNVTWFHAIHVSGTNGTKRFDNPVLPFNDGVYFASTEKSNIIRGWIFGTTLDSKTQSLLIVNNATNVVIKVCEFQFCNDPFLGVYYHKNNKSWMESEFRVYSSANNCTFEYVSQPFLMDLEGKQGNFKNLREFVFKNIDGYFKIYSKHTPINLVRDLPQGFSALEPLVDLPIGINITRFQTLLALHRSYLTPGDSSSGWTAGAAAYYVGYLQPRTFLLKYNENGTITDAVDCALDPLSETKCTLKSFTVEKGIYQTSNFRVQPTESIVRFPNITNLCPFGEVFNATRFASVYAWNRKRISNCVADYSVLYNSASFSTFKCYGVSPTKLNDLCFTNVYADSFVIRGDEVRQIAPGQTGKIADYNYKLPDDFTGCVIAWNSNNLDSKVGGNYNYLYRLFRRSNLKPFERDISTEIYQAGSTPCNGVEGFNCYFPLQSYGFQPTNGVGYQPYRVVVLSFELLPAPATVCGPKKSTNLVKNKCVNFNFNGLTGTGVLTESNKKFLPFQQFGRDIADTTDAVRDPQTLEILDITPCSFGGVSVITPGTNTSNQVAVLYQGVNCTEVPVAIHADQLTPTWRVYSTGSNVFQTRAGCLIGAEHVNNSYECDIPIGAGICASYQTQTNSPRRARSVASQSIIAYTMSLGAENSVAYSNNSIAIPTNFTISVTTEILPVSMTKTSVDCTMYICGDSTECSNLLLQYGSFCTQLNRALTGIAVEQDKNTQEVFAQVKQIYKTPPIKDFGGFNFSQILPDPSKPSKRSFIEDLLFNKVTLADAGFIKQYGDCLGDIAARDLICAQKFNGLTVLPPLLTDEMIAQYTSALLAGTITSGWTFGAGAALQIPFAMQMAYRFNGIGVTQNVLYENQKLIANQFNSAIGKIQDSLSSAAPALGKLQDVVNQNAQALNTLVKQLSSNFGCISSVLNDILSRLDKVEAEVQIDCLITGRLQSLQTYVTQQLIRAAEIRASANLAATKMSECVLGQSKRVDFCGKGYHLMSFPQSAPHGVVFLHVTYVPAQEKNFTTAPAICHDGKAHFPREGVFVSNGTHWFVTQRNFYEPQIITTDNTFVSGNCDVVIGIVNNTVYDPLQPELDSGGGGSDIIKLLNEQVNKEMQSSNLYMSMSSWCYTHSLDGAGLFLFDHAAEEYEHAKKLIIFLNENNVPVQLTSISAPEHKFEGLTQIFQKAYEHEQHISESINNIVDHAIKSKDHATFNFLQWYVAEQHEEEVLFKDILDKIELIGNENHGLYLADQYVKGIAKSRKS

SEQ ID NO: 9476 - protein, 1315 aa, Artificial Sequence
  SARS-CoV-2/USA/WA8-UW5/2020__EPI_ISL_413486 spike protein (1-1147)(A972C_R995C) Ferritin construct
MFVFLVLLPLVSSQCVNLTTRTQLPPAYTNSFTRGVYYPDKVFRSSVLHSTQDLFLPFFSNVTWFHAIHVSGTNGTKRFDNPVLPFNDGVYFASTEKSNIIRGWIFGTTLDSKTQSLLIVNNATNVVIKVCEFQFCNDPFLGVYYHKNNKSWMESEFRVYSSANNCTFEYVSQPFLMDLEGKQGNFKNLREFVFKNIDGYFKIYSKHTPINLVRDLPQGFSALEPLVDLPIGINITRFQTLLALHRSYLTPGDSSSGWTAGAAAYYVGYLQPRTFLLKYNENGTITDAVDCALDPLSETKCTLKSFTVEKGIYQTSNFRVQPTESIVRFPNITNLCPFGEVFNATRFASVYAWNRKRISNCVADYSVLYNSASFSTFKCYGVSPTKLNDLCFTNVYADSFVIRGDEVRQIAPGQTGKIADYNYKLPDDFTGCVIAWNSNNLDSKVGGNYNYLYRLFRKSNLKPFERDISTEIYQAGSTPCNGVEGFNCYFPLQSYGFQPTNGVGYQPYRVVVLSFELLHAPATVCGPKKSTNLVKNKCVNFNFNGLTGTGVLTESNKKFLPFQQFGRDIADTTDAVRDPQTLEILDITPCSFGGVSVITPGTNTSNQVAVLYQDVNCTEVPVAIHADQLTPTWRVYSTGSNVFQTRAGCLIGAEYVNNSYECDIPIGAGICASYQTQTNSPRRARSVASQSIIAYTMSLGAENSVAYSNNSIAIPTNFTISVTTEILPVSMTKTSVDCTMYICGDSTECSNLLLQYGSFCTQLNRALTGIAVEQDKNTQEVFAQVKQIYKTPPIKDFGGFNFSQILPDPSKPSKRSFIEDLLFNKVTLADAGFIKQYGDCLGDIAARDLICAQKFNGLTVLPPLLTDEMIAQYTSALLAGTITSGWTFGAGAALQIPFAMQMAYRFNGIGVTQNVLYENQKLIANQFNSAIGKIQDSLSSTASALGKLQDVVNQNAQALNTLVKQLSSNFGCISSVLNDILSRLDKVEAEVQIDCLITGRLQSLQTYVTQQLIRAAEIRASANLAATKMSECVLGQSKRVDFCGKGYHLMSFPQSAPHGVVFLHVTYVPAQEKNFTTAPAICHDGKAHFPREGVFVSNGTHWFVTQRNFYEPQIITTDNTFVSGNCDVVIGIVNNTVYDPLQPELDSGGGGSDIIKLLNEQVNKEMQSSNLYMSMSSWCYTHSLDGAGLFLFDHAAEEYEHAKKLIIFLNENNVPVQLTSISAPEHKFEGLTQIFQKAYEHEQHISESINNIVDHAIKSKDHATFNFLQWYVAEQHEEEVLFKDILDKIELIGNENHGLYLADQYVKGIAKSRKS

SEQ ID NO: 9477 - protein, 1315 aa, Artificial Sequence
  SARS-CoV-2/England/20102000506/2020__EPI_ISL_415147 spike protein (1-1147)(A972C_R995C) Ferritin construct
MFVFLVLLPLVSSQCVNLTTRTQLPPAYTNSFTRGVYYPDKVFRSSVLHSTQDLFLPFFSNVTWFHAIHVSGTNGTKRFDNPVLPFNDGVYFASTEKSNIIRGWIFGTTLDSKTQSLLIVNNATNVVIKVCEFQFCNDPFLGVYYHKNNKSWMESEFRVYSSANNCTFEYVSQPFLMDLEGKQGNFKNLREFVFKNIDGYFKIYSKHTPINLVRDLPQGFSALEPLVDLPIGINITRFQTLLALHRSYLTPGDSSSGWTAGAAAYYVGYLQPRTFLLKYNENGTITDAVDCALDPLSETKCTLKSFTVEKGIYQTSNFRVQPTESIVRFPNITNLCPFGEVFNATRFASVYAWNRKRISNCVADYSVLYNSASFSTFKCYGVSPTKLNDLCFTNVYADSFVIRGDEVRQIAPGQTGKIADYNYKLPDDFTGCVIAWNSNNLDSKVGGNYNYLYRLFRKSNLKPFERDISTEIYQAGSTPCNGVEGFNCYFPLQSYGFQPTNGVGYQPYRVVVLSFELLHAPATVCGPKKSTNLVKNKCVNFNFNGLTGTGVLTESNKKFLPFQQFGRDIADTTDAVRDPQTLEILDITPCSFGGVSVITPGTNTSNQVAVLYQGVNCTEVPVAIHADQLTPTWRVYSTGSNVFQTRAGCLIGAEHVNNSYECDIPIGAGICASYQTQTNSPRRARSVASQSIIAYTMSLGAENSVAYSNNSIAIPTNFTISVTTEILPVSMTKTSVDCTMYICGDSTECSNLLLQYGSFCTQLNRALTGIAVEQDKNTQEVFAQVKQIYKTPPIKDFGGFNFSQILPDPSKPSKRSFIEDLLFNKVTLADAGFIKQYGYCLGDIAARDLICAQKFNGLTVLPPLLTDEMIAQYTSALLAGTITSGWTFGAGAALQIPFAMQMAYRFNGIGVTQNVLYENQKLIANQFNSAIGKIQDSLSSTASALGKLQDVVNQNAQALNTLVKQLSSNFGCISSVLNDILSRLDKVEAEVQIDCLITGRLQSLQTYVTQQLIRAAEIRASANLAATKMSECVLGQSKRVDFCGKGYHLMSFPQSAPHGVVFLHVTYVPAQEKNFTTAPAICHDGKAHFPREGVFVSNGTHWFVTQRNFYEPQIITTDNTFVSGNCDVVIGIVNNTVYDPLQPELDSGGGGSDIIKLLNEQVNKEMQSSNLYMSMSSWCYTHSLDGAGLFLFDHAAEEYEHAKKLIIFLNENNVPVQLTSISAPEHKFEGLTQIFQKAYEHEQHISESINNIVDHAIKSKDHATFNFLQWYVAEQHEEEVLFKDILDKIELIGNENHGLYLADQYVKGIAKSRKS

SEQ ID NO: 9478 - protein, 1315 aa, Artificial Sequence
  SARS-CoV-2/Belgium/VAG-03013/2020__EPI_ISL_415155 spike protein (1-1147)(A972C_R995C) Ferritin construct
MFVFLVLLPLVSSQCVNLTTRTQLPPAYTNSFTRGVYYPDKVFRSSVLHSTQDLFLPFFSNVTWFHAIHVSGTNGTKRFDNPVLPFNDGVYFASTEKSNIIRGWIFGTTLDSKTQSLLIVNNATNVVIKVCEFQFCNDPFLGVYYHKNNKSWMESEFRVYSSANNCTFEYVSQPFLMDLEGKQGNFKNLREFVFKNIDGYFKIYSKHTPINLVRDLPQGFSALEPLVDLPIGINITRFQTLLALHRSYLTPGDSSSGWTAGAAAYYVGYLQPRTFLLKYNENGTITDAVDCALDPLSETKCTLKSFTVEKGIYQTSNFRVQPTESIVRFPNITNLCPFGEVFNATRFASVYAWNRKRISNCVADYSVLYNSASFSTFKCYGVSPTKLNDLCFTNVYADSFVIRGDEVRQIAPGQTGKIADYNYKLPDDFTGCVIAWNSNNLDSKVGGNYNYLYRLFRKSNLKPFERDISTEIYQAGSTPCNGVEGFNCYFPLQSYGFQPTNGVGYQPYRVVVLSFELLHAPATVCGPKKSTNLVKNKCVNFNFNGLTGTGVLTESNKKFLPFQQFGRDIADTTDAVRDPQTLEILDITPCSFGGVSVITPGTNTSNQVAVLYQGVNCTEVPVAIHADQLTPTWRVYSTGSNVFQTRAGCLIGAEHVNNSYECDIPIGAGICASYQTQTNSPRRARSVASQSIIAYTMSLGAENSVAYSNNSIAIPTNFTISVTTEILPVSMTKTSVDCTMYICGDSTECSNLLLQYGSFCTQLNRALTGIAVEQDKNTQEVFAQVKQIYKTPPIKDFGGFNFSQILPDPSKPSKRSFIEDLLFNKVTLADAGFIKQYGDCLGDIAARDLICAQKFNGLTVLPPLLTDEMIAQYTSALLAGTITSGWTFGAGAALQIPFAMQMAYRFNGIGVTQNVLYENQKLIANQFNSAIGKIQDSLSSTATALGKLQDVVNQNAQALNTLVKQLSSNFGCISSVLNDILSRLDKVEAEVQIDCLITGRLQSLQTYVTQQLIRAAEIRASANLAATKMSECVLGQSKRVDFCGKGYHLMSFPQSAPHGVVFLHVTYVPAQEKNFTTAPAICHDGKAHFPREGVFVSNGTHWFVTQRNFYEPQIITTDNTFVSGNCDVVIGIVNNTVYDPLQPELDSGGGGSDIIKLLNEQVNKEMQSSNLYMSMSSWCYTHSLDGAGLFLFDHAAEEYEHAKKLIIFLNENNVPVQLTSISAPEHKFEGLTQIFQKAYEHEQHISESINNIVDHAIKSKDHATFNFLQWYVAEQHEEEVLFKDILDKIELIGNENHGLYLADQYVKGIAKSRKS

SEQ ID NO: 9479 - protein, 1315 aa, Artificial Sequence
  SARS-CoV-2/Belgium/BC-03016/2020__EPI_ISL_415157 spike protein (1-1147)(A972C_R995C) Ferritin construct
MFVFLVLLPLVSSQCVNLTTRTQLPPAYTNSFTRGVYYPDKVFRSSVLHSTQDLFLPFFSNVTWFHAIHVSGTNGTKRFDNPVLPFNDGVYFASTEKSNIIRGWIFGTTLDSKTQSLLIVNNATNVVIKVCEFQFCNDPFLGVYYHKNNKSWMESEFRVYSSANNCTFEYVSQPFLMDLEGKQGNFKNLREFVFKNIDGYFKIYSKHTPINLVRDLPQGFSALEPLVDLPIGINITRFQTLLALHRSYLTPGDSSSGWTAGAAAYYVGYLQPRTFLLKYNENGTITDAVDCALDPLSETKCTLKSFTVEKGIYQTSNFRVQPTESIVRFPNITNLCPFGEVFNATRFASVYAWNRKRISNCVADYSVLYNSASFSTFKCYGVSPTKLNDLCFTNVYADSFVIRGDEVRQIAPGQTGKIADYNYKLPDDFTGCVIAWNSNNLDSKVGGNYNYLYRLFRKSNLKPFERDISTEIYQAGSTPCNGVEGFNCYFPLQSYGFQPTNGVGYQPYRVVVLSFELLHAPATVCGPKKSTNLVKNKCVNFNFNGLTGTGVLTESNKKFLPFQQFGRDIADTTDAVRDPQTLEILDITPCSFGGVSVITPGTNTSNQVAVLYQGVNCTEVPVAIHADQLTPTWRVYSTGSNVFQTRAGCLIGAEHVNNSYECDIPIGAGICASYQTQTNSPRRARSVASQSIIAYTMSLGAENSVAYSNNSIAIPTNFTISVTTEILPVSMTKTSVDCTMYICGDSTECSNLLLQYGSFCTQLNRALTGIAVEQDKNTQEVFAQVKQIYKTPPIKDFGGFNFSQILPDPSKPSKRSFIEDLLFNKVTLADAGFIKQYGDCLGDIAARDLICAQKFNGLTVLPPLLTDEMIAQYTSALLAGTITSGWTFGAGAALQIPFAMQMAYRFNGIGVTQNVLYENQKLIANQFNSAIGKIQDSLSSTAPALGKLQDVVNQNAQALNTLVKQLSSNFGCISSVLNDILSRLDKVEAEVQIDCLITGRLQSLQTYVTQQLIRAAEIRASANLAATKMSECVLGQSKRVDFCGKGYHLMSFPQSAPHGVVFLHVTYVPAQEKNFTTAPAICHDGKAHFPREGVFVSNGTHWFVTQRNFYEPQIITTDNTFVSGNCDVVIGIVNNTVYDPLQPELDSGGGGSDIIKLLNEQVNKEMQSSNLYMSMSSWCYTHSLDGAGLFLFDHAAEEYEHAKKLIIFLNENNVPVQLTSISAPEHKFEGLTQIFQKAYEHEQHISESINNIVDHAIKSKDHATFNFLQWYVAEQHEEEVLFKDILDKIELIGNENHGLYLADQYVKGIAKSRKS

SEQ ID NO: 9480 - protein, 1315 aa, Artificial Sequence
  SARS-CoV-2/Germany/BavPat3/2020__EPI_ISL_414521 spike protein (1-1147)(A972C_R995C) Ferritin construct
MFVFLVLLPLVSSQCVNLTTRTQLPPAYTNSFTRGVYYPDKVFRSSVLHSTQDLFLPFFSNVTWFHAIHVSGTNGTKRFDNPVLPFNDGVYFASTEKSNIIRGWIFGTTLDSKTQSLLIVNNATNVVIKVCEFQFCNDPFLGVYYHKNNKSWMESEFRVYSSANNCTFEYVSQPFLMDLEGKQGNFKNLREFVFKNIDGYFKIYSKHTPINLVRDLPQGFSALEPLVDLPIGINITRFQTLLALHRSYLTPGDSSSGWTAGAAAYYVGYLQPRTFLLKYNENGTITDAVDCALDPLSETKCTLKSFTVEKGIYQTSNFRVQPTESIVRFPNITNLCPFGEVFNATRFASVYAWNRKRISNCVADYSVLYNSASFSTFKCYGVSPTKLNDLCFTNVYADSFVIRGDEVRQIAPGQTGKIADYNYKLPDDFTGCVIAWNSNNLDSKVGGNYNYLYRLFRKSNLKPFERDISTEIYQAGSTPCNGVEGFNCYFPLQSYGFQPTNGVGYQPYRVVVLSFELLHAPATVCGPKKSTNLVKNKCVNFNFNGLTGTGVLTESNKKFLPFQQFGRDIADTTDAVRDPQTLEILDITPCSFGGVSVITPGTNTSNQVAVLYQDVNCTEVPVAIHADQLTPTWRVYSTGSNVFQTRAGCLIGAEHVNNSYECDIPIGAGICASYQTQTNSPRRARSVASQSIIAYTMSLGAENSVAYSNNSIAIPTNFTISVTTEILPVSMTKTSVDCTMYICGDSTECSNLLLQYGSFCTQLNRALTGIAVEQDKNTQQVFAQVKQIYKTPPIKDFGGFNFSQILPDPSKPSKRSFIEDLLFNKVTLADAGFIKQYGDCLGDIAARDLICAQKFNGLTVLPPLLTDEMIAQYTSALLAGTITSGWTFGAGAALQIPFAMQMAYRFNGIGVTQNVLYENQKLIANQFNSAIGKIQDSLSSTASALGKLQDVVNQNAQALNTLVKQLSSNFGCISSVLNDILSRLDKVEAEVQIDCLITGRLQSLQTYVTQQLIRAAEIRASANLAATKMSECVLGQSKRVDFCGKGYHLMSFPQSAPHGVVFLHVTYVPAQEKNFTTAPAICHDGKAHFPREGVFVSNGTHWFVTQRNFYEPQIITTDNTFVSGNCDVVIGIVNNTVYDPLQPELDSGGGGSDIIKLLNEQVNKEMQSSNLYMSMSSWCYTHSLDGAGLFLFDHAAEEYEHAKKLIIFLNENNVPVQLTSISAPEHKFEGLTQIFQKAYEHEQHISESINNIVDHAIKSKDHATFNFLQWYVAEQHEEEVLFKDILDKIELIGNENHGLYLADQYVKGIAKSRKS

SEQ ID NO: 9481 - protein, 1315 aa, Artificial Sequence
  SARS-CoV-2/France/HF1805/2020__EPI_ISL_414628 spike protein (1-1147)(A972C_R995C) Ferritin construct
MFVFLVLLPLVSSQCVNLTTRTQLPPAYTNSFTRGVYYPDKVFRSSVLHSTQDLFLPFFSNVTWFHAIHVSGTNGTKRFDNPVLPFNDGVYFASTEKSNIIRGWIFGTTLDSKTQSLLIVNNATNVVIKVCEFQFCNDPFLGVYYHKNNKSWMESEFRVYSSANNCTFEYVSQPFLMDLEGKQGNFKNLREFVFKNIDGYFKIYSKHTPINLVRDLPQGFSALEPLVDLPIGINITRFQTLLALHRSYLTPGDSSSGWTAGAAAYYVGYLQPRTFLLKYNENGTITDAVDCALDPLSETKCTLKSFTVEKGIYQTSNFRVQPTESIVRFPNITNLCPFGEVFNATRFASVYAWNRKRISNCVADYSVLYNSASFSTFKCYGVSPTKLNDLCFTNVYADSFVIRGDEVRQIAPGQTGKIADYNYKLPDDFTGCVIAWNSNNLDSKVGGNYNYLYRLFRKSNLKPFERDISTEIYQAGSTPCNGVEGFNCYFPLQSYGFQPTNGVGYQPYRVVVLSFELLHAPATVCGPKKSTNLVKNKCVNFNFNGLTGTGVLTESNKKFLPFQQFGRDIADTTDAVRDPQTLEILDITPCSFGGVSVITPGTNTSNQVAVLYQGVNCTEVPVAIHADQLTPTWRVYSTGSNVFQTRAGCLIGAEHVNNSYECDIPIGAGICASYQTQTNSPRRARSVASQSIIAYTMSLGAENSVAYSNNSIAIPTNFTISVTTEILPVSMTKTSVDCTMYICGDSTECSNLLLQYGSFCTQLNRALTGIAVEQDKNTQEVFAQVKQIYKTPPIKDFGGFNFSQILPDPSKPSKRSFIEDLLFNKVTLADAGFIKQYGDCLGDIAARDLICAQKFNGLTVLPPLLTDEMIAQYTSALLAGTITSGWTFGAGAALQIPFAMQMAYRFNGIGVTQNVLYENQKLIANQFNSAIGKIQDSLSSTASALGKLQDVVNQNAQALNTLVKQLSSNFGCISSVLNDILSRLDKVEAEVQIDCLITGRLQSLQTYVTQQLIRAAEIRASANLAATKMSECVLGQSKRVDFCGKGYHLMSFPQSAPHGVVFLHVTYVPAQEKNFTTAPAICHDGKAHFPREGVFVSNGTHWFVTQRNFYEPQIITTDNTFVSGNCDVVIGVVNNTVYDPLQPELDSGGGGSDIIKLLNEQVNKEMQSSNLYMSMSSWCYTHSLDGAGLFLFDHAAEEYEHAKKLIIFLNENNVPVQLTSISAPEHKFEGLTQIFQKAYEHEQHISESINNIVDHAIKSKDHATFNFLQWYVAEQHEEEVLFKDILDKIELIGNENHGLYLADQYVKGIAKSRKS

SEQ ID NO: 9482 - protein, 1315 aa, Artificial Sequence
  SARS-CoV-2/Netherlands/ZuidHolland_9/2020__EPI_ISL_414445 spike protein (1-1147)(A972C_R995C) Ferritin construct
MFVFLVLLPLVSSQCVNLTTRTQLPPAYTNSFTRGVYYPDKVFRSSVLHSTQDLFLPFFSNVTWFHAIHVSGTNGTKRFDNPVLPFNDGVYFASTEKSNIIRGWIFGTTLDSKTQSLLIVNNATNVVIKVCEFQFCNDPFLGVYYHKNNKSWMESEFRVYSSANNCTFEYVSQPFLMDLEGKQGNFKNLREFVFKNIDGYFKIYSKHTPINLVRDLPQGFSALEPLVDLPIGINITRFQTLLALHRSYLTPGDSSSGWTAGAAAYYVGYLQPRTFLLKYNENGTITDAVDCALDPLSETKCTLKSFTVEKGIYQTSNFRVQPTESIVRFPNITNLCPFGEVFNATRFASVYAWNRKRISNCVADYSVLYNSASFSTFKCYGVSPTKLNDLCFTNVYADSFVIRGDEVRQIAPGQTGKIADYNYKLPDDFTGCVIAWNSNNLDSKVGGNYNYLYRLFRKSNLKPFERDISTEIYQAGSTPCNGVEGFNCYFPLQSYGFQPTNGVGYQPYRVVVLSFELLHAPATVCGPKKSTNLVKNKCVNFNFNGLTGTGVLTESNKKFLPFQQFGRDIADTTDAVRDPQTLEILDITPCSFGGVSVITPGTNTSNQVAVLYQGVNCTEVPVAIHADQLTPTWRVYSTGSNVFQTRAGCLIGAEHVNNSYECDIPIGAGICASYQTQTNSPRRARSVASQSIIAYTMSLGAENSVAYSNNSIAIPTNFTISVTTEILPVSMTKTSVDCTMYICGDSTECSNLLLQYGSFCTQLNRALTGIAVEQDKNTQEVFAQVKQIYKTPPIKDFGGFNFSQILPDPSKPSKRSFIEDLLFNKVTLADAGFIKQYGDCLGDIAARDLICVQKFNGLTVLPPLLTDEMIAQYTSALLAGTITSGWTFGAGAALQIPFAMQMAYRFNGIGVTQNVLYENQKLIANQFNSAIGKIQDSLSSTASALGKLQDVVNQNAQALNTLVKQLSSNFGCISSVLNDILSRLDKVEAEVQIDCLITGRLQSLQTYVTQQLIRAAEIRASANLAATKMSECVLGQSKRVDFCGKGYHLMSFPQSAPHGVVFLHVTYVPAQEKNFTTAPAICHDGKAHFPREGVFVSNGTHWFVTQRNFYEPQIITTDNTFVSGNCDVVIGIVNNTVYDPLQPELDSGGGGSDIIKLLNEQVNKEMQSSNLYMSMSSWCYTHSLDGAGLFLFDHAAEEYEHAKKLIIFLNENNVPVQLTSISAPEHKFEGLTQIFQKAYEHEQHISESINNIVDHAIKSKDHATFNFLQWYVAEQHEEEVLFKDILDKIELIGNENHGLYLADQYVKGIAKSRKS

SEQ ID NO: 9483 - protein, 1315 aa, Artificial Sequence
  SARS-CoV-2/Finland/FIN03032020A/2020__EPI_ISL_413602 spike protein (1-1147)(A972C_R995C) Ferritin construct
MFVFLVLLPLVSSQCVNLTTRTQLPPAYTNSFTRGVYYPDKVFRSSVLHSTQDLFLPFFSNVTWFHAIHVSGTNGTKRFDNPVLPFNDGVYFASTEKSNIIRGWIFGTTLDSKTQSLLIVNNATNVVIKVCEFQFCNDPFLGVYYHKNNKSWMESEFRVYSSANNCTFEYVSQPFLMDLEGKQGNFKNLREFVFKNIDGYFKIYSKHTPINLVRDLPQGFSALEPLVDLPIGINITRFQTLLALHRSYLTPGDSSSGWTAGAAAYYVGYLQPRTFLLKYNENGTITDAVDCALDPLSETKCTLKSFTVEKGIYQTSNFRVQPTESIVRFPNITNLCPFGEVFNATRFASVYAWNRKRISNCVADYSVLYNSASFSTFKCYGVSPTKLNDLCFTNVYADSFVIRGDEVRQIAPGQTGKIADYNYKLPDDFTGCVISWNSNNLDSKVGGNYNYLYRLFRKSNLKPFERDISTEIYQAGSTPCNGVEGFNCYFPLQSYGFQPTNGVGYQPYRVVVLSFELLHAPATVCGPKKSTNLVKNKCVNFNFNGLTGTGVLTESNKKFLPFQQFGRDIADTTDAVRDPQTLEILDITPCSFGGVSVITPGTNTSNQVAVLYQGVNCTEVPVAIHADQLTPTWRVYSTGSNVFQTRAGCLIGAEHVNNSYECDIPIGAGICASYQTQTNSPRRARSVASQSIIAYTMSLGAENSVAYSNNSIAIPTNFTISVTTEILPVSMTKTSVDCTMYICGDSTECSNLLLQYGSFCTQLNRALTGIAVEQDKNTQEVFAQVKQIYKTPPIKDFGGFNFSQILPDPSKPSKRSFIEDLLFNKVTLADAGFIKQYGDCLGDIAARDLICAQKFNGLTVLPPLLTDEMIAQYTSALLAGTITSGWTFGAGAALQIPFAMQMAYRFNGIGVTQNVLYENQKLIANQFNSAIGKIQDSLSSTASALGKLQDVVNQNAQALNTLVKQLSSNFGCISSVLNDILSRLDKVEAEVQIDCLITGRLQSLQTYVTQQLIRAAEIRASANLAATKMSECVLGQSKRVDFCGKGYHLMSFPQSAPHGVVFLHVTYVPAQEKNFTTAPAICHDGKAHFPREGVFVSNGTHWFVTQRNFYEPQIITTDNTFVSGNCDVVIGIVNNTVYDPLQPELDSGGGGSDIIKLLNEQVNKEMQSSNLYMSMSSWCYTHSLDGAGLFLFDHAAEEYEHAKKLIIFLNENNVPVQLTSISAPEHKFEGLTQIFQKAYEHEQHISESINNIVDHAIKSKDHATFNFLQWYVAEQHEEEVLFKDILDKIELIGNENHGLYLADQYVKGIAKSRKS

SEQ ID NO: 9484 - protein, 1315 aa, Artificial Sequence
  SARS-CoV-2/France/GE1977/2020__EPI_ISL_414632 spike protein (1-1147)(A972C_R995C) Ferritin construct
MFVFLVLLPLVSSQCVNLTTRTQLPPAYTNSFTRGVYYPDKVFRSSVLHSTQDLFLPFFSNVTWFHAIHVSGTNGTKRFDNPVLPFNDGVYFASTEKSNIIRGWIFGTTLDSKTQSLLIVNNATNVVIKVCEFQFCNDPFLGVYYHKNNKSWMESEFRVYSSANNCTFEYVSQPFLMDLEGKQGNFKNLREFVFKNIDGYFKIYSKHTPINLVRDLPQGFSALEPLVDLPIGINITRFQTLLALHRSYLTPGDSSSGWTAGAAAYYVGYLQPRTFLLKYNENGTITDAVDCALDPLSETKCTLKSFTVEKGIYQTSNFRVQPTESIVRFPNITNLCPFGEVFNATRFASVYAWNRKRISNCVADYSVLYNSASFSTFKCYGVSPTKLNDLCFTNVYADSFVIRGDEVRQIAPGQTGKIADYNYKLPDDFTGCVIAWNSNNLDSKVGGNYNYLYRLFRKSNLKPFERDISTEIYQAGSTPCNGVEGFNCYFPLQSYGFQPTNGVGYQPYRVVVLSFELLHAPATVCGPKKSTNLVKNKCVNFNFNGLTGTGVLTESNKKFLPFQQFGRDIADTTDAVRDPQTLEILDITPCSFGGVSVITPGTNTSNQVAVLYQGVNCTEVPVAIHADQLTPTWRVYSTGSNVFQTRAGCLIGAEHVNNSYECDIPIGAGICASYQTQTNSPRRARSVASQSIIAYTMSLGAENSVAYSNNSIAIPTNFTISVTTEILPVSMTKTSVDCTMYICGDSTECSNLLLQYGSFCTQLNRALTGIAVEQDKNTQEVFAQVKQIYKTPPIKDFGGFNFSQILPDPSKPSKRSFIEDLLFNKVTLADAGFIKQYGDCLGDIAARDLICAQKFNGLTVLPPLLTDEMIAQYTSALLAGTITSGWTFGAGAALQIPFAMQMAYRFNGIGVTQNVLYENQKLIANQFNSAIGKIQDSLFSTASALGKLQDVVNQNAQALNTLVKQLSSNFGCISSVLNDILSRLDKVEAEVQIDCLITGRLQSLQTYVTQQLIRAAEIRASANLAATKMSECVLGQSKRVDFCGKGYHLMSFPQSAPHGVVFLHVTYVPAQEKNFTTAPAICHDGKAHFPREGVFVSNGTHWFVTQRNFYEPQIITTDNTFVSGNCDVVIGIVNNTVYDPLQPELDSGGGGSDIIKLLNEQVNKEMQSSNLYMSMSSWCYTHSLDGAGLFLFDHAAEEYEHAKKLIIFLNENNVPVQLTSISAPEHKFEGLTQIFQKAYEHEQHISESINNIVDHAIKSKDHATFNFLQWYVAEQHEEEVLFKDILDKIELIGNENHGLYLADQYVKGIAKSRKS

SEQ ID NO: 9485 - protein, 1315 aa, Artificial Sequence
  SARS-CoV-2/Finland/FIN-313/2020__EPI_ISL_414641 spike protein (1-1147)(A972C_R995C) Ferritin construct
MFVFLVLLPLVSSQCVNLTTRTQLPPAYTNSFTRGVYYPDKVFRSSVLHSTQDLFLPFFSNVTWFHAIHVSGTNGTKRFDNPVLPFNDGVYFASTEKSNIIRGWIFGTTLDSKTQSLLIVNNATNVVIKVCEFQFCNDPFLGVYYHKNNKSWMESEFRVYSSANNCTFEYVSQPFLMDLEGKQGNFKNLREFVFKNIDGYFKIYSKHTPINLVRDLPQGFSALEPLVDLPIGINITRFKTLLALHRSYLTPGDSSSGWTAGAAAYYVGYLQPRTFLLKYNENGTITDAVDCALDPLSETKCTLKSFTVEKGIYQTSNFRVQPTESIVRFPNITNLCPFGEVFNATRFASVYAWNRKRISNCVADYSVLYNSASFSTFKCYGVSPTKLNDLCFTNVYADSFVIRGDEVRQIAPGQTGKIADYNYKLPDDFTGCVIAWNSNNLDSKVGGNYNYLYRLFRKSNLKPFERDISTEIYQAGSTPCNGVEGFNCYFPLQSYGFQPTNGVGYQPYRVVVLSFELLHAPATVCGPKKSTNLVKNKCVNFNFNGLTGTGVLTESNKKFLPFQQFGRDIADTTDAVRDPQTLEILDITPCSFGGVSVITPGTNTSNQVAVLYQGVNCTEVPVAIHADQLTPTWRVYSTGSNVFQTRAGCLIGAEHVNNSYECDIPIGAGICASYQTQTNSPRRARSVASQSIIAYTMSLGAENSVAYSNNSIAIPTNFTISVTTEILPVSMTKTSVDCTMYICGDSTECSNLLLQYGSFCTQLNRALTGIAVEQDKNTQEVFAQVKQIYKTPPIKDFGGFNFSQILPDPSKPSKRSFIEDLLFNKVTLADAGFIKQYGDCLGDIAARDLICAQKFNGLTVLPPLLTDEMIAQYTSALLAGTITSGWTFGAGAALQIPFAMQMAYRFNGIGVTQNVLYENQKLIANQFNSAIGKIQDSLSSTASALGKLQDVVNQNAQALNTLVKQLSSNFGCISSVLNDILSRLDKVEAEVQIDCLITGRLQSLQTYVTQQLIRAAEIRASANLAATKMSECVLGQSKRVDFCGKGYHLMSFPQSAPHGVVFLHVTYVPAQEKNFTTAPAICHDGKAHFPREGVFVSNGTHWFVTQRNFYEPQIITTDNTFVSGNCDVVIGIVNNTVYDPLQPELDSGGGGSDIIKLLNEQVNKEMQSSNLYMSMSSWCYTHSLDGAGLFLFDHAAEEYEHAKKLIIFLNENNVPVQLTSISAPEHKFEGLTQIFQKAYEHEQHISESINNIVDHAIKSKDHATFNFLQWYVAEQHEEEVLFKDILDKIELIGNENHGLYLADQYVKGIAKSRKS

SEQ ID NO: 9486 - protein, 1315 aa, Artificial Sequence
  SARS-CoV-2/Netherlands/ZuidHolland_2/2020__EPI_ISL_414556 spike protein (1-1147)(A972C_R995C) Ferritin construct
MFVFLVLLPLVSSQCVNLTTRTQLPPAYTNSFTRGVYYPDKVFRSSVLHSTQDLFLPFFSNVTWFHAIHVSGTNGTKRFDNPVLPFNDGVYFASTEKSNIIRGWIFGTTLDSKTQSLLIVNNATNVVIKVCEFQFCNDPFLGVYYHKNNKSWMESEFRVYSSANNCTFEYVSQPFLMDLEGKQGNFKNLREFVFKNIDGYFKIYSKHTPINLVRDLPQGFSALEPLVDLPIGINITRFQTLLALHRSYLTPGDSSSGWTAGAAAYYVGYLQPRTFLLKYNENGTITDAVDCALDPLSETKCTLKSFTVEKGIYQTSNFRVQPTESIVRFPNITNLCPFGEVFNATRFASVYAWNRKRISNCVADYSVLYNSASFSTFKCYGVSPTKLNDLCFTNVYADSFVIRGDEVRQIAPGQTGKIADYNYKLPDDFTGCVIAWNSNNLDSKVGGNYNYLYRLFRKSNLKPFERDISTEIYQAGSTPCNGVEGFNCYFPLQSYGFQPTNGVGYQPYRVVVLSFELLHAPATVCGPKKSTNLVKNKCVNFNFNGLTGTGVLTESNKKFLPFQQFGRDIADTTDAVRDPQTLEILDITPCSFGGVSVITPGTNTSNQVAVLYQGVNCTEVPVAIHADQLTPTWRVYSTGSNVFQTRAGCLIGAEHVNNSYECDIPIGAGICASYQTQTNSPRRARSVASQSIIAYTMSLGAENSVAYSNNSIAIPTNFTISVTTEILPVSMTKTSVDCTMYICGDSTECSNLLLQYGSFCTQLNRALTGIALEQDKNTQEVFAQVKQIYKTPPIKDFGGFNFSQILPDPSKPSKRSFIEDLLFNKVTLADAGFIKQYGDCLGDIAARDLICAQKFNGLTVLPPLLTDEMIAQYTSALLAGTITSGWTFGAGAALQIPFAMQMAYRFNGIGVTQNVLYENQKLIANQFNSAIGKIQDSLSSTASALGKLQDVVNQNAQALNTLVKQLSSNFGCISSVLNDILSRLDKVEAEVQIDCLITGRLQSLQTYVTQQLIRAAEIRASANLAATKMSECVLGQSKRVDFCGKGYHLMSFPQSAPHGVVFLHVTYVPAQEKNFTTAPAICHDGKAHFPREGVFVSNGTHWFVTQRNFYEPQIITTDNTFVSGNCDVVIGIVNNTVYDPLQPELDSGGGGSDIIKLLNEQVNKEMQSSNLYMSMSSWCYTHSLDGAGLFLFDHAAEEYEHAKKLIIFLNENNVPVQLTSISAPEHKFEGLTQIFQKAYEHEQHISESINNIVDHAIKSKDHATFNFLQWYVAEQHEEEVLFKDILDKIELIGNENHGLYLADQYVKGIAKSRKS

SEQ ID NO: 9487 - protein, 1315 aa, Artificial Sequence
  SARS-CoV-2/USA/WA-UW31/2020__EPI_ISL_414618 spike protein (1-1147)(A972C_R995C) Ferritin construct
MFVFLVLLPLVSSQCVNLTTRTQLPPAYTNSFTRGVYYPDKVFRSSVLHSTQDLFLPFFSNVTWFHAIHVSGTNGTKRFDNPVLPFNDGVYFASTEKSNIIRGWIFGTTLDSKTQSLLIVNNATNVVIKVCEFQFCNDPFLGVYYHKNNKSWMESEFRVYSSANNCTFEYVSQPFLMDLEGKQGNFKNLREFVFKNIDGYFKIYSKHTPINLVRDLPQGFSALEPLVDLPIGINITRFQTLLALHRSYLTPGDSSSGWTAGAAAYYVGYLQPRTFLLKYNENGTITDAVDCALDPLSETKCTLKSFTVEKGIYQTSNFRVQPTESIVRFPNITNLCPFGEVFNATRFASVYAWNRKRISNCVADYSVLYNSASFSTFKCYGVSPTKLNDLCFTNVYADSFVIRGDEVRQIAPGQTGKIADYNYKLPDDFTGCVIAWNSNNLDSKVGGNYNYLYRLFRKSNLKPFERDISTEIYQAGSTPCNGAEGFNCYFPLQSYGFQPTNGVGYQPYRVVVLSFELLHAPATVCGPKKSTNLVKNKCVNFNFNGLTGTGVLTESNKKFLPFQQFGRDIADTTDAVRDPQTLEILDITPCSFGGVSVITPGTNTSNQVAVLYQDVNCTEVPVAIHADQLTPTWRVYSTGSNVFQTRAGCLIGAEHVNNSYECDIPIGAGICASYQTQTNSPRRARSVASQSIIAYTMSLGAENSVAYSNNSIAIPTNFTISVTTEILPVSMTKTSVDCTMYICGDSTECSNLLLQYGSFCTQLNRALTGIAVEQDKNTQEVFAQVKQIYKTPPIKDFGGFNFSQILPDPSKPSKRSFIEDLLFNKVTLADAGFIKQYGDCLGDIAARDLICAQKFNGLTVLPPLLTDEMIAQYTSALLAGTITSGWTFGAGAALQIPFAMQMAYRFNGIGVTQNVLYENQKLIANQFNSAIGKIQDSLSSTASALGKLQDVVNQNAQALNTLVKQLSSNFGCISSVLNDILSRLDKVEAEVQIDCLITGRLQSLQTYVTQQLIRAAEIRASANLAATKMSECVLGQSKRVDFCGKGYHLMSFPQSAPHGVVFLHVTYVPAQEKNFTTAPAICHDGKAHFPREGVFVSNGTHWFVTQRNFYEPQIITTDNTFVSGNCDVVIGIVNNTVYDPLQPELDSGGGGSDIIKLLNEQVNKEMQSSNLYMSMSSWCYTHSLDGAGLFLFDHAAEEYEHAKKLIIFLNENNVPVQLTSISAPEHKFEGLTQIFQKAYEHEQHISESINNIVDHAIKSKDHATFNFLQWYVAEQHEEEVLFKDILDKIELIGNENHGLYLADQYVKGIAKSRKS

SEQ ID NO: 9488 - protein, 1315 aa, Artificial Sequence
  SARS-CoV-2/South Korea/SNU01/2020__EPI_ISL_411929 spike protein (1-1147)(A972C_R995C) Ferritin construct
MFVFLVLLPLVSSQCVNLTTRTQLPPAYTNSFTRGVYYPDKVFRSSVLHSTQDLFLPFFSNVTWFHAIHVSGTNGTKRFDNPVLPFNDGVYFASTEKSNIIRGWIFGTTLDSKTQSLLIVNNATNVVIKVCEFQFCNDPFLGVYYHKNNKSWMESEFRVYSSANNCTFEYVSQPFLMDLEGKQGNFKNLREFVFKNIDGYFKIYSKHTPINLVRDLPQGFWALEPLVDLPIGINITRFQTLLALHRSYLTPGDSSSGWTAGAAAYYVGYLQPRTFLLKYNENGTITDAVDCALDPLSETKCTLKSFTVEKGIYQTSNFRVQPTESIVRFPNITNLCPFGEVFNATRFASVYAWNRKRISNCVADYSVLYNSASFSTFKCYGVSPTKLNDLCFTNVYADSFVIRGDEVRQIAPGQTGKIADYNYKLPDDFTGCVIAWNSNNLDSKVGGNYNYLYRLFRKSNLKPFERDISTEIYQAGSTPCNGVEGFNCYFPLQSYGFQPTNGVGYQPYRVVVLSFELLHAPATVCGPKKSTNLVKNKCVNFNFNGLTGTGVLTESNKKFLPFQQFGRDIADTTDAVRDPQTLEILDITPCSFGGVSVITPGTNTSNQVAVLYQDVNCTEVPVAIHADQLTPTWRVYSTGSNVFQTRAGCLIGAEHVNNSYECDIPIGAGICASYQTQTNSPRRARSVASQSIIAYTMSLGAENSVAYSNNSIAIPTNFTISVTTEILPVSMTKTSVDCTMYICGDSTECSNLLLQYGSFCTQLNRALTGIAVEQDKNTQEVFAQVKQIYKTPPIKDFGGFNFSQILPDPSKPSKRSFIEDLLFNKVTLADAGFIKQYGDCLGDIAARDLICAQKFNGLTVLPPLLTDEMIAQYTSALLAGTITSGWTFGAGAALQIPFAMQMAYRFNGIGVTQNVLYENQKLIANQFNSAIGKIQDSLSSTASALGKLQDVVNQNAQALNTLVKQLSSNFGCISSVLNDILSRLDKVEAEVQIDCLITGRLQSLQTYVTQQLIRAAEIRASANLAATKMSECVLGQSKRVDFCGKGYHLMSFPQSAPHGVVFLHVTYVPAQEKNFTTAPAICHDGKAHFPREGVFVSNGTHWFVTQRNFYEPQIITTDNTFVSGNCDVVIGIVNNTVYDPLQPELDSGGGGSDIIKLLNEQVNKEMQSSNLYMSMSSWCYTHSLDGAGLFLFDHAAEEYEHAKKLIIFLNENNVPVQLTSISAPEHKFEGLTQIFQKAYEHEQHISESINNIVDHAIKSKDHATFNFLQWYVAEQHEEEVLFKDILDKIELIGNENHGLYLADQYVKGIAKSRKS

SEQ ID NO: 9489 - protein, 1315 aa, Artificial Sequence
  SARS-CoV-2/China/WF0004/2020__EPI_ISL_413694 spike protein (1-1147)(A972C_R995C) Ferritin construct
MFVFLVLLPLVSSQCVNLTTRTQLPPAYTNSFTRGVYYPDKVFRSSVLHSTQDLFLPFFSNVTWFHAIHVSGTNGTKRFDNPVLPFNDGVYFASTEKSNIIRGWIFGTTLDSKTQSLLIVNNATNVVIKVCEFQFCNDPFLGVYYHKNNKSWTESEFRVYSSANNCTFEYVSQPFLMDLEGKQGNFKNLREFVFKNIDGYFKIYSKHTPINLVRDLPQGFSALEPLVDLPIGINITRFQTLLALHRSYLTPGDSSSGWTAGAAAYYVGYLQPRTFLLKYNENGTITDAVDCALDPLSETKCTLKSFTVEKGIYQTSNFRVQPTESIVRFPNITNLCPFGEVFNATRFASVYAWNRKRISNCVADYSVLYNSASFSTFKCYGVSPTKLNDLCFTNVYADSFVIRGDEVRQIAPGQTGKIADYNYKLPDDFTGCVIAWNSNNLDSKVGGNYNYLYRLFRKSNLKPFERDISTEIYQAGSTPCNGVEGFNCYFPLQSYGFQPTNGVGYQPYRVVVLSFELLHAPATVCGPKKSTNLVKNKCVNFNFNGLTGTGVLTESNKKFLPFQQFGRDIADTTDAVRDPQTLEILDITPCSFGGVSVITPGTNTSNQVAVLYQDVNCTEVPVAIHADQLTPTWRVYSTGSNVFQTRAGCLIGAEHVNNSYECDIPIGAGICASYQTQTNSPRRARSVASQSIIAYTMSLGAENSVAYSNNSIAIPTNFTISVTTEILPVSMTKTSVDCTMYICGDSTECSNLLLQYGSFCTQLNRALTGIAVEQDKNTQEVFAQVKQIYKTPPIKDFGGFNFSQILPDPSKPSKRSFIEDLLFNKVTLADAGFIKQYGDCLGDIAARDLICAQKFNGLTVLPPLLTDEMIAQYTSALLAGTITSGWTFGAGAALQIPFAMQMAYRFNGIGVTQNVLYENQKLIANQFNSAIGKIQDSLSSTASALGKLQDVVNQNAQALNTLVKQLSSNFGCISSVLNDILSRLDKVEAEVQIDCLITGRLQSLQTYVTQQLIRAAEIRASANLAATKMSECVLGQSKRFDFCGKGYHLMSFPQSAPHGVVFLHVTYVPAQEKNFTTAPAICHDGKAHFPREGVFVSNGTHWFVTQRNFYEPQIITTDNTFVSGNCDVVIGIVNNTVYDPLQPELDSGGGGSDIIKLLNEQVNKEMQSSNLYMSMSSWCYTHSLDGAGLFLFDHAAEEYEHAKKLIIFLNENNVPVQLTSISAPEHKFEGLTQIFQKAYEHEQHISESINNIVDHAIKSKDHATFNFLQWYVAEQHEEEVLFKDILDKIELIGNENHGLYLADQYVKGIAKSRKS

SEQ ID NO: 9490 - protein, 1315 aa, Artificial Sequence
  SARS-CoV-2/China/WF0028/2020__EPI_ISL_413791 spike protein (1-1147)(A972C_R995C) Ferritin construct
MFVFLVLLPLVSSQCVNLTTRTQLPPAYTNSFTRGVYYPDKVFRSSVLHSTQDLFLPFFSNVTWFHAIHVSGTNGTKRFDNPVLPFNDGVYFASTEKSNIIRGWIFGTTLDSKTQSLLIVNNATNVVIKVCEFQFCNDPFLGVYYHKNNKSWMESEFRVYSSANNCTFEYVSQPFLMDLEGKQGNFKNLREFVFKNIDGYFKIYSKHTPINLVRDLPQGFSALEPLVDLPIGINITRFQTLLALHRSYLTPGDSSSGWTAGAAAYYVGYLQPRTFLLKYNENGTITDAVDCALDPLSETKCTLKSFTVEKGIYQTSNFRVQPTESIVRFPNITNLCPFGEVFNATRFASVYAWNRKRISNCVADYSVLYNSASFSTFKCYGVSPTKLNDLCFTNVYADSFVIRGDEVRQIAPGQTGKIADYNYKLPDDFTGCVIAWNSNNLDSKVGGNYNYLYRLFRKSNLKPFERDISTEIYQAGSTPCNGVEGFNCYFPLQSYGFQPTNGVGYQPYRVVVLSFELLHAPATVCGPKKSTNLVKNKCVNFNFNGLTGTGVLTESNKKFLPFQQFGRDIADTTDAVRDPQTLEILDITPCSFGGVSVITPGTNTSNQVAVLYQDVNCTEVPVAIHADQLTPTWRVYSTGSNVFQTRAGCLIGAEHVNNSYECDIPIGAGICASYQTQTNSPRRARSVASQSIIAYTMSLGAENSVAYSNNSIAIPTNFTISVTTEILPVSMTKTSVDCTMYICGDSTECSNLLLQYGSFCTQLNRALTGIAVEQDKNTQEVFAQVKQIYKTPPIKDFGGFNFSQILPDPSKPSKRSFIEDLLFNKVTLADAGFIKQYGDCLGDIAARDLICAQKFNGLTVLPPLLTDEMIAQYTSALLAGTITSGWTFGAGAALQIPFAMQMAYRFNGIGVTQNVLYENQKLIANQFNSAIGKIQDSLSSTASALGKLQDVVNQNAQALNTLVKQLSSNFGCISSVLNDILSRLDKVEAEVQIDCLITGRLQSLQTYVTQQLIRAAEIRASANLAATKMSECVLGQSKRVDFCGKGYHLMSFPQSAPHGVVFLHVTYVPAQEKNFTTAPAICHDGKAHFPREGVFVSNGTHWFVTQRNFYEPQIITTDNTFVSGNCDVVIGIVNNTVYDPLQPELESGGGGSDIIKLLNEQVNKEMQSSNLYMSMSSWCYTHSLDGAGLFLFDHAAEEYEHAKKLIIFLNENNVPVQLTSISAPEHKFEGLTQIFQKAYEHEQHISESINNIVDHAIKSKDHATFNFLQWYVAEQHEEEVLFKDILDKIELIGNENHGLYLADQYVKGIAKSRKS

SEQ ID NO: 9491 - protein, 1315 aa, Artificial Sequence
  SARS-CoV-2/2019-nCoV/USA-CruiseA-18/2020__MT159716.1 spike protein (1-1147)(A972C_R995C) Ferritin construct
MFVFLVLLPLVSSQCVNLTTRTQLPPAYTNSFTRGVYYPDKVFRSSVLHSTQDLFLPFFSNVTWFHAIHVSGTNGTKRFDNPVLPFNDGVYFASTEKSNIIRGWIFGTTLDSKTQSLLIVNNATNVVIKVCEFQFCNDPFLGVYYHKNNKSWMESELRVYSSANNCTFEYVSQPFLMDLEGKQGNFKNLREFVFKNIDGYFKIYSKHTPINLVRDLPQGFSALEPLVDLPIGINITRFQTLLALHRSYLTPGDSSSGWTAGAAAYYVGYLQPRTFLLKYNENGTITDAVDCALDPLSETKCTLKSFTVEKGIYQTSNFRVQPTESIVRFPNITNLCPFGEVFNATRFASVYAWNRKRISNCVADYSVLYNSASFSTFKCYGVSPTKLNDLCFTNVYADSFVIRGDEVRQIAPGQTGKIADYNYKLPDDFTGCVIAWNSNNLDSKVGGNYNYLYRLFRKSNLKPFERDISTEIYQAGSTPCNGVEGFNCYFPLQSYGFQPTNGVGYQPYRVVVLSFELLHAPATVCGPKKSTNLVKNKCVNFNFNGLTGTGVLTESNKKFLPFQQFGRDIADTTDAVRDPQTLEILDITPCSFGGVSVITPGTNTSNQVAVLYQDVNCTEVPVAIHADQLTPTWRVYSTGSNVFQTRAGCLIGAEHVNNSYECDIPIGAGICASYQTQTNSPRRARSVASQSIIAYTMSLGAENSVAYSNNSIAIPTNFTISVTTEILPVSMTKTSVDCTMYICGDSTECSNLLLQYGSFCTQLNRALTGIAVEQDKNTQEVFAQVKQIYKTPPIKDFGGFNFSQILPDPSKPSKRSFIEDLLFNKVTLADAGFIKQYGDCLGDIAARDLICAQKFNGLTVLPPLLTDEMIAQYTSALLAGTITSGWTFGAGAALQIPFAMQMAYRFNGIGVTQNVLYENQKLIANQFNSAIGKIQDSLSSTASALGKLQDVVNQNAQALNTLVKQLSSNFGCISSVLNDILSRLDKVEAEVQIDCLITGRLQSLQTYVTQQLIRAAEIRASANLAATKMSECVLGQSKRVDFCGKGYHLMSFPQSAPHGVVFLHVTYVPAQEKNFTTAPAICHDGKAHFPREGVFVSNGTHWFVTQRNFYEPQIITTDNTFVSGNCDVVIGIVNNTVYDPLQPELDSGGGGSDIIKLLNEQVNKEMQSSNLYMSMSSWCYTHSLDGAGLFLFDHAAEEYEHAKKLIIFLNENNVPVQLTSISAPEHKFEGLTQIFQKAYEHEQHISESINNIVDHAIKSKDHATFNFLQWYVAEQHEEEVLFKDILDKIELIGNENHGLYLADQYVKGIAKSRKS

SEQ ID NO: 9492 - protein, 1315 aa, Artificial Sequence
  SARS-CoV-2/SARS-CoV-2/Yunnan-01/human/2020/CHN__MT049951.1 spike protein (1-1147)(A972C_R995C) Ferritin construct
MFVFLVLLPLVSSQCVNLTTRTQLPPANTNSFTRGVYYPDKVFRSSVLHSTQDLFLPFFSNVTWFHAIHVSGTNGTKRFDNPVLPFNDGVYFASTEKSNIIRGWIFGTTLDSKTQSLLIVNNATNVVIKVCEFQFCNDPFLGVYYHKNNKSWMESEFRVYSSANNCTFEYVSQPFLMDLEGKQGNFKNLREFVFKNIDGYFKIYSKHTPINLVRDLPQGFSALEPLVDLPIGINITRFQTLLALHRSYLTPGDSSSGWTAGAAAYYVGYLQPRTFLLKYNENGTITDAVDCALDPLSETKCTLKSFTVEKGIYQTSNFRVQPTESIVRFPNITNLCPFGEVFNATRFASVYAWNRKRISNCVADYSVLYNSASFSTFKCYGVSPTKLNDLCFTNVYADSFVIRGDEVRQIAPGQTGKIADYNYKLPDDFTGCVIAWNSNNLDSKVGGNYNYLYRLFRKSNLKPFERDISTEIYQAGSTPCNGVEGFNCYFPLQSYGFQPTNGVGYQPYRVVVLSFELLHAPATVCGPKKSTNLVKNKCVNFNFNGLTGTGVLTESNKKFLPFQQFGRDIADTTDAVRDPQTLEILDITPCSFGGVSVITPGTNTSNQVAVLYQDVNCTEVPVAIHADQLTPTWRVYSTGSNVFQTRAGCLIGAEHVNNSYECDIPIGAGICASYQTQTNSPRRARSVASQSIIAYTMSLGAENSVAYSNNSIAIPTNFTISVTTEILPVSMTKTSVDCTMYICGDSTECSNLLLQYGSFCTQLNRALTGIAVEQDKNTQEVFAQVKQIYKTPPIKDFGGFNFSQILPDPSKPSKRSFIEDLLFNKVTLADAGFIKQYGDCLGDIAARDLICAQKFNGLTVLPPLLTDEMIAQYTSALLAGTITSGWTFGAGAALQIPFAMQMAYRFNGIGVTQNVLYENQKLIANQFNSAIGKIQDSLSSTASALGKLQDVVNQNAQALNTLVKQLSSNFGCISSVLNDILSRLDKVEAEVQIDCLITGRLQSLQTYVTQQLIRAAEIRASANLAATKMSECVLGQSKRVDFCGKGYHLMSFPQSAPHGVVFLHVTYVPAQEKNFTTAPAICHDGKAHFPREGVFVSNGTHWFVTQRNFYEPQIITTDNTFVSGNCDVVIGIVNNTVYDPLQPELDSGGGGSDIIKLLNEQVNKEMQSSNLYMSMSSWCYTHSLDGAGLFLFDHAAEEYEHAKKLIIFLNENNVPVQLTSISAPEHKFEGLTQIFQKAYEHEQHISESINNIVDHAIKSKDHATFNFLQWYVAEQHEEEVLFKDILDKIELIGNENHGLYLADQYVKGIAKSRKS

SEQ ID NO: 9493 - protein, 1315 aa, Artificial Sequence
  SARS-CoV-2/USA/WA-UW292/2020__EPI_ISL_418077 spike protein (1-1147)(A972C_R995C) Ferritin construct
MFVFLVLLPLVSSQCVNLTTRTQLPPAYTNSFTRGVYYPDKVFRSSVLHSTQDLFLPFFSNVTWFHAIHVSGTNGTKRFDNPVLPFNDGVYFASTEKSNIIRGWIFGTTLDSKTQSLLIVNNATNVVIKVCEFQFCNDPFLGVYYHKNNKSWMESEFRVYSSANNCTFEYVSQPFLMDLEGKQGNFKNLREFVFKNIDGYFKIYSKHTPINLVRDLPQGFSALEPLVDLPIGINITRFQTLLALHRSYLTPGDSSSGWTAGAAAYYVGYLQPRTFLLKYNENGTITDAVDCALDPLSETKCTLKSFTVEKGIYQTSNFRVQPTESIVRFPNITNLCPFGEVFNATRFASVYAWNRKRISNCVADYSVLYNSASFSTFKCYGVSPTKLNDLCFTNVYADSFVIRGDEVRQIAPGQTGKIADYNYKLPDDFTGCVIAWNSNNLDSKVGGNYNYLYRLFRKSNLKPFERDISTEIYQASSTPCNGVEGFNCYFPLQSYGFQPTNGVGYQPYRVVVLSFELLHAPATVCGPKKSTNLVKNKCVNFNFNGLTGTGVLTESNKKFLPFQQFGRDIADTTDAVRDPQTLEILDITPCSFGGVSVITPGTNTSNQVAVLYQDVNCTEVPVAIHADQLTPTWRVYSTGSNVFQTRAGCLIGAEHVNNSYECDIPIGAGICASYQTQTNSPRRARSVASQSIIAYTMSLGAENSVAYSNNSIAIPTNFTISVTTEILPVSMTKTSVDCTMYICGDSTECSNLLLQYGSFCTQLNRALTGIAVEQDKNTQEVFAQVKQIYKTPPIKDFGGFNFSQILPDPSKPSKRSFIEDLLFNKVTLADAGFIKQYGDCLGDIAARDLICAQKFNGLTVLPPLLTDEMIAQYTSALLAGTITSGWTFGAGAALQIPFAMQMAYRFNGIGVTQNVLYENQKLIANQFNSAIGKIQDSLSSTASALGKLQDVVNQNAQALNTLVKQLSSNFGCISSVLNDILSRLDKVEAEVQIDCLITGRLQSLQTYVTQQLIRAAEIRASANLAATKMSECVLGQSKRVDFCGKGYHLMSFPQSAPHGVVFLHVTYVPAQEKNFTTAPAICHDGKAHFPREGVFVSNGTHWFVTQRNFYEPQIITTDNTFVSGNCDVVIGIVNNTVYDPLQPELDSGGGGSDIIKLLNEQVNKEMQSSNLYMSMSSWCYTHSLDGAGLFLFDHAAEEYEHAKKLIIFLNENNVPVQLTSISAPEHKFEGLTQIFQKAYEHEQHISESINNIVDHAIKSKDHATFNFLQWYVAEQHEEEVLFKDILDKIELIGNENHGLYLADQYVKGIAKSRKS

SEQ ID NO: 9494 - protein, 1315 aa, Artificial Sequence
  SARS-CoV-2/Iceland/192/2020__EPI_ISL_417819 spike protein (1-1147)(A972C_R995C) Ferritin construct
MFVFFVLLPLVSSQCVNLTTRTQLPPAYTNSFTRGVYYPDKVFRSSVLHSTQDLFLPFFSNVTWFHAIHVSGTNGTKRFDNPVLPFNDGVYFASTEKSNIIRGWIFGTTLDSKTQSLLIVNNATNVVIKVCEFQFCNDPFLGVYYHKNNKSWMESEFRVYSSANNCTFEYVSQPFLMDLEGKQGNFKNLREFVFKNIDGYFKIYSKHTPINLVRDLPQGFSALEPLVDLPIGINITRFQTLLALHRSYLTPGDSSSGWTAGAAAYYVGYLQPRTFLLKYNENGTITDAVDCALDPLSETKCTLKSFTVEKGIYQTSNFRVQPTESIVRFPNITNLCPFGEVFNATRFASVYAWNRKRISNCVADYSVLYNSASFSTFKCYGVSPTKLNDLCFTNVYADSFVIRGDEVRQIAPGQTGKIADYNYKLPDDFTGCVIAWNSNNLDSKVGGNYNYLYRLFRKSNLKPFERDISTEIYQAGSTPCNGVEGFNCYFPLQSYGFQPTNGVGYQPYRVVVLSFELLHAPATVCGPKKSTNLVKNKCVNFNFNGLTGTGVLTESNKKFLPFQQFGRDIADTTDAVRDPQTLEILDITPCSFGGVSVITPGTNTSNQVAVLYQGVNCTEVPVAIHADQLTPTWRVYSTGSNVFQTRAGCLIGAEHVNNSYECDIPIGAGICASYQTQTNSPRRARSVASQSIIAYTMSLGAENSVAYSNNSIAIPTNFTISVTTEILPVSMTKTSVDCTMYICGDSTECSNLLLQYGSFCTQLNRALTGIAVEQDKNTQEVFAQVKQIYKTPPIKDFGGFNFSQILPDPSKPSKRSFIEDLLFNKVTLADAGFIKQYGDCLGDIAARDLICAQKFNGLTVLPPLLTDEMIAQYTSALLAGTITSGWTFGAGAALQIPFAMQMAYRFNGIGVTQNVLYENQKLIANQFNSAIGKIQDSLSSTASALGKLQDVVNQNAQALNTLVKQLSSNFGCISSVLNDILSRLDKVEAEVQIDCLITGRLQSLQTYVTQQLIRAAEIRASANLAATKMSECVLGQSKRVDFCGKGYHLMSFPQSAPHGVVFLHVTYVPAQEKNFTTAPAICHDGKAHFPREGVFVSNGTHWFVTQRNFYEPQIITTDNTFVSGNCDVVIGIVNNTVYDPLQPELDSGGGGSDIIKLLNEQVNKEMQSSNLYMSMSSWCYTHSLDGAGLFLFDHAAEEYEHAKKLIIFLNENNVPVQLTSISAPEHKFEGLTQIFQKAYEHEQHISESINNIVDHAIKSKDHATFNFLQWYVAEQHEEEVLFKDILDKIELIGNENHGLYLADQYVKGIAKSRKS

SEQ ID NO: 9495 - protein, 1315 aa, Artificial Sequence
  SARS-CoV-2/Belgium/ULG-6939/2020__EPI_ISL_417020 spike protein (1-1147)(A972C_R995C) Ferritin construct
MFVFLVLLPLVSSQCVNLTTRTQLPPAYTNSFTRGVYYPDKVFRSSVLHSTQDLFLPFFSNVTWFHAIHVSGTNGTKRFDNPVLPFNDGVYFASTEKSNIIRGWIFGTTLDSKTQSLLIVNNATNVVIKVCEFQFCNDPFLGVYYHKNNKSWMESEFRVYSSANNCTFEYVSQPFLMDLEGKQGNFKNLREFVFKNIDGYFKIYSKHTPINLVRDLPQGFSALEPLVDLPIGINITRFQTLLALHRSYLTPGDSSSGWTAGAAAYYVGYLQPRTFLLKYNENGTITDAVDCALDPLSETKCTLKSFTVEKGIYQTSNFRVQPTESIVRFPNITNLCPFGEVFNATRFASVYAWNRKRISNCVADYSVLYNSASFSTFKCYGVSPTKLNDLCFTNVYADSFVIRGDEVRQIAPGQTGKIADYNYKLPDDFTGCVIAWNSNNLDSKVGGNYNYLYRLFRKSNLKPFERDISTEIYQAGSTPCNGVEGFNCYFPLQSYGFQPTNGVGYQPYRVVVLSFELLHAPATVCGPKKSTNLVKNKCVNFNFNGLTGTGVLTESNKKFLPFQQFGRDIADTTDAVRDPQTLEILDITPCSFGGVSVITPGTNTSNQVAVLYQGVNCTEVPVAIHADQLTPTWRVYSTGSNVFQTRAGCLIGAEHVNNSYECDIPIGAGICASYQTQTNSPRRARSVASQSIIAYTMSLGAENSVVYSNNSIAIPTNFTISVTTEILPVSMTKTSVDCTMYICGDSTECSNLLLQYGSFCTQLNRALTGIAVEQDKNTQEVFAQVKQIYKTPPIKDFGGFNFSQILPDPSKPSKRSFIEDLLFNKVTLADAGFIKQYGDCLGDIAARDLICAQKFNGLTVLPPLLTDEMIAQYTSALLAGTITSGWTFGAGAALQIPFAMQMAYRFNGIGVTQNVLYENQKLIANQFNSAIGKIQDSLSSTASALGKLQDVVNQNAQALNTLVKQLSSNFGCISSVLNDILSRLDKVEAEVQIDCLITGRLQSLQTYVTQQLIRAAEIRASANLAATKMSECVLGQSKRVDFCGKGYHLMSFPQSAPHGVVFLHVTYVPAQEKNFTTAPAICHDGKAHFPREGVFVSNGTHWFVTQRNFYEPQIITTDNTFVSGNCDVVIGIVNNTVYDPLQPELDSGGGGSDIIKLLNEQVNKEMQSSNLYMSMSSWCYTHSLDGAGLFLFDHAAEEYEHAKKLIIFLNENNVPVQLTSISAPEHKFEGLTQIFQKAYEHEQHISESINNIVDHAIKSKDHATFNFLQWYVAEQHEEEVLFKDILDKIELIGNENHGLYLADQYVKGIAKSRKS

SEQ ID NO: 9496 - protein, 1315 aa, Artificial Sequence
  SARS-CoV-2/France/HF2496/2020__EPI_ISL_418231 spike protein (1-1147)(A972C_R995C) Ferritin construct
MFVFLVLLPLVSSQCVNLTTRTQLPPAYTNSFTRGVYYPDKVFRSSVLHSTQDLFLPFFSNVTWFHAIHVSGTNGTKRFDNPVLPFNDGVYFASTEKSNIIRGWIFGTTLDSKTQSLLIVNNATNVVIKVCEFQFCNDPFLGVYYHKNNKSWMESEFRVYSSANNCTFEYVSQPFLMDLEGKQGNFKNLREFVFKNIDGYFKIYSKHTPINLVRDLPQGFSALEPLVDLPIGINITRFQTLLALHRSYLTPGDSSSGWTAGAAAYYVGYLQPRTFLLKYNENGTITDAVDCALDPLSETKCTLKSFTVEKGIYQTSNFRVQPTESIVRFPNITNLCPFGEVFNATRFASVYAWNRKRISNCVADYSVLYNSASFSTFKCYGVSPTKLNDLCFTNVYADSFVIRGDEVRQIAPGQTGKIADYNYKLPDDFTGCVIAWNSNNLDSKVGGNYNYLYRLFRKSNLKPFERDISTEIYQAGSTPCNGVEGFNCYFPLQSYGFQPTNGVGYQPYRVVVLSFELLHAPATVCGPKKSTNLVKNKCVNFNFNGLTGTGVLTESNKKFLPFQQFGRDIADTTDAVRDPQTLEILDITPCSFGGVSVITPGTNTSNQVAVLYQGVNCTEVPVAIHADQLTPTWRVYSTGSNVFQTRAGCLIGAEHVNNSYECDIPIGAGICASYQTQTNSPRRARSVASQSIIAYTMSLGAENSVAYSNNSIAIPTNFTISVTTEILPVSMTKTSVDCTMYICGDSTECSNLLLQYGSFCTQLNRALTGIAVEQDKNTQEVFAQVKQIYKTPPIKDFGGFNFSQILPDPSKPSKRSFIEDLLFNKVTLADAGFIKQYGDCLGDIVARDLICAQKFNGLTVLPPLLTDEMIAQYTSALLAGTITSGWTFGAGAALQIPFAMQMAYRFNGIGVTQNVLYENQKLIANQFNSAIGKIQDSLSSTASALGKLQDVVNQNAQALNTLVKQLSSNFGCISSVLNDILSRLDKVEAEVQIDCLITGRLQSLQTYVTQQLIRAAEIRASANLAATKMSECVLGQSKRVDFCGKGYHLMSFPQSAPHGVVFLHVTYVPAQEKNFTTAPAICHDGKAHFPREGVFVSNGTHWFVTQRNFYEPQIITTDNTFVSGNCDVVIGIVNNTVYDPLQPELDSGGGGSDIIKLLNEQVNKEMQSSNLYMSMSSWCYTHSLDGAGLFLFDHAAEEYEHAKKLIIFLNENNVPVQLTSISAPEHKFEGLTQIFQKAYEHEQHISESINNIVDHAIKSKDHATFNFLQWYVAEQHEEEVLFKDILDKIELIGNENHGLYLADQYVKGIAKSRKS

SEQ ID NO: 9497 - protein, 1315 aa, Artificial Sequence
  SARS-CoV-2/USA/WA-UW291/2020__EPI_ISL_418076 spike protein (1-1147)(A972C_R995C) Ferritin construct
MFVFLVLLPLVSSQCVNLTTRTQLPPAYTNSFTRGVYYPDKVFRSSVLHSTQDLFLPFFSNVTWFHAIHVSGTNGTKRFDNPVLPFNDGVYFASTEKSNIIRGWIFGTTLDSKTQSLLIVNNATNVVIKVCEFQFCNDPFLGVYYHKNNKSWMESEFRVYSSANNCTFEYVSQPFLMDLEGKQGNFKNLREFVFKNIDGYFKIYSKHTPINLVRDLPQGFSALEPLVDLPIGINITRFQTLLALHRSYLTPGDSSSGWTAGAAAYYVGYLQPRTFLLKYNENGTITDAVDCALDPLSETKCTLKSFTVEKGIYQTSNFRVQPTESIVRFPNITNLCPFGEVFNATRFASVYAWNRKRISNCVADYSVLYNSASFSTFKCYGVSPTKLNDLCFTNVYADSFVIRGDEVRQIAPGQTGKIADYNYKLPDDFTGCVIAWNSNNLDSKVGGNYNYLYRLFRKSNLKPFERDISTEIYQAGSTPCNGVEGFNCYFPLQSYGFQPTNGVGYQPYRVVVLSFELLHAPATVCGPKKSTNLVKNKCVNFNFNGLTGTGVLTESNKKFLPFQQFGRDIADTTDAVRDPQTLEILDITPCSFGGVSVITPGTNTSNQVAVLYQGVNCTEVPVAIHADQLTPTWRVYSTGSNVFQTRAGCLIGAEHVNNSYECDIPIGAGICASYQTQTNSPRRARSVASQSIIAYTMSLGAENSVAYSNNSIAIPTNFTISVTTEILPVSMTKTSVDCTMYICGDSTECSNLLLQYGSFCTQLNRALTGIAVEQDKNTQEVFAQVKQIYKTPPIKDFGGFNFSQILPDPSKPSKRSFIEDLLFNKVTLADAGFIKQYGDCLGDIAARDLICAQKFNGLTVLPPLLTDEMIAQYTSALLAGTITSGWTFGAGAALQIPFAMQMAYRFNGIGVTQNVLYENQKLIANQFNSAIGKIQYSLSSTASALGKLQDVVNQNAQALNTLVKQLSSNFGCISSVLNDILSRLDKVEAEVQIDCLITGRLQSLQTYVTQQLIRAAEIRASANLAATKMSECVLGQSKRVDFCGKGYHLMSFPQSAPHGVVFLHVTYVPAQEKNFTTAPAICHDGKAHFPREGVFVSNGTHWFVTQRNFYEPQIITTDNTFVSGNCDVVIGIVNNTVYDPLQPELDSGGGGSDIIKLLNEQVNKEMQSSNLYMSMSSWCYTHSLDGAGLFLFDHAAEEYEHAKKLIIFLNENNVPVQLTSISAPEHKFEGLTQIFQKAYEHEQHISESINNIVDHAIKSKDHATFNFLQWYVAEQHEEEVLFKDILDKIELIGNENHGLYLADQYVKGIAKSRKS

SEQ ID NO: 9498 - protein, 1315 aa, Artificial Sequence; identical to SEQ ID NO: 9461
  SARS-CoV-2/Portugal/PT0034/2020__EPI_ISL_418019 spike protein (1-1147)(A972C_R995C) Ferritin construct

SEQ ID NO: 9499 - protein, 1315 aa, Artificial Sequence; identical to SEQ ID NO: 9453
  SARS-CoV-2/Iceland/202/2020__EPI_ISL_417750 spike protein (1-1147)(A972C_R995C) Ferritin construct

SEQ ID NO: 9500 - protein, 1315 aa, Artificial Sequence
  SARS-CoV-2/USA/WA-UW261/2020__EPI_ISL_418046 spike protein (1-1147)(A972C_R995C) Ferritin construct
MFVFLVLLPLVSSQCVNLTTRTQLPPAYTNSFTRGVYYPDKVFRSSVLHSTQDLFLPFFSNVTWFHAIHVSGTNGTKRFDNPVLPFNDGVYFASTEKSNIIRGWIFGTTLDSKTQSLLIVNNATNVVIKVCEFQFCNDPFLGVYYHKNNKSWMESEFRVYSSANNCTFEYVSQPFLMDLEGKQGNFKNLREFVFKNIDGYFKIYSKHTPINLVRDLPQGFSALEPLVDLPIGINITRFQTLLALHRSYLTPGDSSSGWTAGAAAYYVGYLQPRTFLLKYNENGTITDAVDCALDPLSETKCTLKSFTVEKGIYQTSNFRVQPTESIVRFPNITNLCPFGEVFNATRFTSVYAWNRKRISNCVADYSVLYNSASFSTFKCYGVSPTKLNDLCFTNVYADSFVIRGDEVRQIAPGQTGKIADYNYKLPDDFTGCVIAWNSNNLDSKVGGNYNYLYRLFRKSNLKPFERDISTEIYQAGSTPCNGVEGFNCYFPLQSYGFQPTNGVGYQPYRVVVLSFELLHAPATVCGPKKSTNLVKNKCVNFNFNGLTGTGVLTESNKKFLPFQQFGRDIADTTDAVRDPQTLEILDITPCSFGGVSVITPGTNTSNQVAVLYQDVNCTEVPVAIHADQLTPTWRVYSTGSNVFQTRAGCLIGAEHVNNSYECDIPIGAGICASYQTQTNSPRRARSVASQSIIAYTMSLGAENSVAYSNNSIAIPTNFTISVTTEILPVSMTKTSVDCTMYICGDSTECSNLLLQYGSFCTQLNRALTGIAVEQDKNTQEVFAQVKQIYKTPPIKDFGGFNFSQILPDPSKPSKRSFIEDLLFNKVTLADAGFIKQYGDCLGDIAARDLICAQKFNGLTVLPPLLTDEMIAQYTSALLAGTITSGWTFGAGAALQIPFAMQMAYRFNGIGVTQNVLYENQKLIANQFNSAIGKIQDSLSSTASALGKLQDVVNQNAQALNTLVKQLSSNFGCISSVLNDILSRLDKVEAEVQIDCLITGRLQSLQTYVTQQLIRAAEIRASANLAATKMSECVLGQSKRVDFCGKGYHLMSFPQSAPHGVVFLHVTYVPAQEKNFTTAPAICHDGKAHFPREGVFVSNGTHWFVTQRNFYEPQIITTDNTFVSGNCDVVIGIVNNTVYDPLQPELDSGGGGSDIIKLLNEQVNKEMQSSNLYMSMSSWCYTHSLDGAGLFLFDHAAEEYEHAKKLIIFLNENNVPVQLTSISAPEHKFEGLTQIFQKAYEHEQHISESINNIVDHAIKSKDHATFNFLQWYVAEQHEEEVLFKDILDKIELIGNENHGLYLADQYVKGIAKSRKS

SEQ ID NO: 9501 - protein, 1315 aa, Artificial Sequence
  SARS-CoV-2/Portugal/PT0035/2020__EPI_ISL_418020 spike protein (1-1147)(A972C_R995C) Ferritin construct
MFVFLVLLPLVSSQCVNLTTRTQLPPAYTNSFTRGVYYPDKVFRSSVLHSTQDLFLPFFSNVTWFHAIHVSGTNGTKRFDNPVLPFNDGVYFASTEKSNIIRGWIFGTTLDSKTQSLLIVNNATNVVIKVCEFQFCNDPFLGVYYHKNNKSWMESEFRVYSSANNCTFEYVSQPFLMDLEGKQGNFKNLREFVFKNIDGYFKIYSKHTPINLVRDLPQGFSALEPLVDLPIGINITRFQTLLALHRSYLTPGDSSSGWTAGAAAYYVGYLQPRTFLLKYNENGTITDAVDCALDPLSETKCTLKSFTVEKGIYQTSNFRVQPTESIVRFPNITNLCPFGEVFNATRFASVYAWNRKRISNCVADYSVLYNSASFSTFKCYGVSPTKLNDLCFTNVYADSFVIRGDEVRQIAPGQTGKIADYNYKLPDDFTGCVIAWNSNNLDSKVGGNYNYLYRLFRKSNLKPFERDISTEIYQAGSTPCNGVEGFNCYFPLQSYGFQPTNGVGYQPYRVVVLSFELLHAPATVCGPKKSTNLVKNKCVNFNFNGLTGTGVLTESNKKFLPFQQFGRDIADTTDAVRDPQTLEILDITPCSFGGVSVITPGTNTSNQVAVLYQDVNCTEVPVAIHADQLTPTWRVYSTGSNVFQTRAGCLIGAEHVNNSYECDIPIGAGICASYQTQTNSPRRARSVASQSIIAYTMSLGAENSVAYSNNSIAIPTNFTISVTTEILPVSMTKTSVDCTMYICGDSTECSNLLLQYGSFCTQLNRALTGIAVEQDKNTQEVFAQVKQIYKTPPIKDFGGFNFSQILPDPSKPSKRSFIEDLLFNKVTLADAGFIKQYGDCLGDISARDLICAQKFNGLTVLPPLLTDEMIAQYTSALLAGTITSGWTFGAGAALQIPFAMQMAYRFNGIGVTQNVLYENQKLIANQFNSAIGKIQDSLSSTASALGKLQDVVNQNAQALNTLVKQLSSNFGCISSVLNDILSRLDKVEAEVQIDCLITGRLQSLQTYVTQQLIRAAEIRASANLAATKMSECVLGQSKRVDFCGKGYHLMSFPQSAPHGVVFLHVTYVPAQEKNFTTAPAICHDGKAHFPREGVFVSNGTHWFVTQRNFYEPQIITTDNTFVSGNCDVVIGIVNNTVYDPLQPELDSGGGGSDIIKLLNEQVNKEMQSSNLYMSMSSWCYTHSLDGAGLFLFDHAAEEYEHAKKLIIFLNENNVPVQLTSISAPEHKFEGLTQIFQKAYEHEQHISESINNIVDHAIKSKDHATFNFLQWYVAEQHEEEVLFKDILDKIELIGNENHGLYLADQYVKGIAKSRKS

SEQ ID NO: 9502 - protein, 1315 aa, Artificial Sequence
  SARS-CoV-2/USA/NY-NYUMC7/2020__EPI_ISL_418192 spike protein (1-1147)(A972C_R995C) Ferritin construct
MFVFLVLLPLVSSQCVNLTTRTQLPPAYTNSFTRGVYYPDKVFRSSVLHSTQDLFLPFFSNVTWFHAIHVSGTNGTKRFDNPVLPFNDGVYFASTEKSNIIRGWIFGTTLDSKTQSLLIVNNATNVVIKVCEFQFCNDPFLGVYHHKNNKSWMESEFRVYSSANNCTFEYVSQPFLMDLEGKQGNFKNLREFVFKNIDGYFKIYSKHTPINLVRDLPQGFSALEPLVDLPIGINITRFQTLLALHRSYLTPGDSSSGWTAGAAAYYVGYLQPRTFLLKYNENGTITDAVDCALDPLSETKCTLKSFTVEKGIYQTSNFRVQPTESIVRFPNITNLCPFGEVFNATRFASVYAWNRKRISNCVADYSVLYNSASFSTFKCYGVSPTKLNDLCFTNVYADSFVIRGDEVRQIAPGQTGKIADYNYKLPDDFTGCVIAWNSNNLDSKVGGNYNYLYRLFRKSNLKPFERDISTEIYQAGSTPCNGVEGFNCYFPLQSYGFQPTNGVGYQPYRVVVLSFELLHAPATVCGPKKSTNLVKNKCVNFNFNGLTGTGVLTESNKKFLPFQQFGRDIADTTDAVRDPQTLEILDITPCSFGGVSVITPGTNTSNQVAVLYQGVNCTEVPVAIHADQLTPTWRVYSTGSNVFQTRAGCLIGAEHVNNSYECDIPIGAGICASYQTQTNSPRRARSVASQSIIAYTMSLGAENSVAYSNNSIAIPTNFTISVTTEILPVSMTKTSVDCTMYICGDSTECSNLLLQYGSFCTQLNRALTGIAVEQDKNTQEVFAQVKQIYKTPPIKDFGGFNFSQILPDPSKPSKRSFIEDLLFNKVTLADAGFIKQYGDCLGDIAARDLICAQKFNGLTVLPPLLTDEMIAQYTSALLAGTITSGWTFGAGAALQIPFAMQMAYRFNGIGVTQNVLYENQKLIANQFNSAIGKIQDSLSSTASALGKLQDVVNQNAQALNTLVKQLSSNFGCISSVLNDILSRLDKVEAEVQIDCLITGRLQSLQTYVTQQLIRAAEIRASANLAATKMSECVLGQSKRVDFCGKGYHLMSFPQSAPHGVVFLHVTYVPAQEKNFTTAPAICHDGKAHFPREGVFVSNGTHWFVTQRNFYEPQIITTDNTFVSGNCDVVIGIVNNTVYDPLQPELDSGGGGSDIIKLLNEQVNKEMQSSNLYMSMSSWCYTHSLDGAGLFLFDHAAEEYEHAKKLIIFLNENNVPVQLTSISAPEHKFEGLTQIFQKAYEHEQHISESINNIVDHAIKSKDHATFNFLQWYVAEQHEEEVLFKDILDKIELIGNENHGLYLADQYVKGIAKSRKS

SEQ ID NO: 9503 - protein, 1315 aa, Artificial Sequence
  SARS-CoV-2/Iceland/189/2020__EPI_ISL_417709 spike protein (1-1147)(A972C_R995C) Ferritin construct
MFVFLVLLPLVSSQCVNLTTRTQLPPAYTNSFTRGVYYPDKVFRSSVLHSTQDLFLPFFSNVTWFHAIHVSGTNGTKRFDNPVLPFNDGVYFASTEKSNIIRGWIFGTTLDSKTQSLLIVNNATNVVIKVCEFQFCNDPFLGVYYHKNNKSWMESEFRVYSSANNCTFEYVSQPFLMDLEGKQGNFKNLREFVFKNIDGYFKIYSKHTPINLVRDLPQGFSALEPLVDLPIGINITRFQTLLALHRSYLTPGDSSSGWTAGAAAYYVGYLQPRTFLLKYNENGTITDAVDCALDPLSETKCTLKSFTVEKGIYQTSNFRVQPTESIVRFPNITNLCPFGEVFNATRFASVYAWNRKRISNCVADYSVLYNSASFSTFKCYGVSPTKLNDLCFTNVYADSFVIRGDEVRQIAPGQTGKIADYNYKLPDDFTGCVIAWNSNNLDSKVGGNYNYLYRLFRKSNLKPFERDISTEIYQAGSTPCNGVEGFNCYFPLQSYGFQPTNGVGYQPYRVVVLSFELLHAPATVCGPKKSTNLVKNKCVNFNFNGLTGTGVLTESNKKFLPFQQFGRDIADTTDAVRDPQTLEILDITPCSFGGVSVITPGTNTSNQVAVLYQGVNCTEVPVAIHADQLTPTWRVYSTGSNVFQTRAGCLIGAEHVNNSYECDIPIGAGICASYQTQTNSPRRARSVASQSIIAYTMSLGAENSVAYSNNSIAIPTNFTISVTTEILPVSMTKTSVDCTMYICGDSTECSNLLLQYGSFCTQLNRALTGIAVEQDKNTQEVFAQVKQIYKTPPIKDFGGFNFSQILPDPSKPSKRSFIEDLLFNKVTLADAGFTKQYGDCLGDIAARDLICAQKFNGLTVLPPLLTDEMIAQYTSALLAGTITSGWTFGAGAALQIPFAMQMAYRFNGIGVTQNVLYENQKLIANQFNSAIGKIQDSLSSTASALGKLQDVVNQNAQALNTLVKQLSSNFGCISSVLNDILSRLDKVEAEVQIDCLITGRLQSLQTYVTQQLIRAAEIRASANLAATKMSECVLGQSKRVDFCGKGYHLMSFPQSAPHGVVFLHVTYVPAQEKNFTTAPAICHDGKAHFPREGVFVSNGTHWFVTQRNFYEPQIITTDNTFVSGNCDVVIGIVNNTVYDPLQPELDSGGGGSDIIKLLNEQVNKEMQSSNLYMSMSSWCYTHSLDGAGLFLFDHAAEEYEHAKKLIIFLNENNVPVQLTSISAPEHKFEGLTQIFQKAYEHEQHISESINNIVDHAIKSKDHATFNFLQWYVAEQHEEEVLFKDILDKIELIGNENHGLYLADQYVKGIAKSRKS

SEQ ID NO: 9504 - protein, 1315 aa, Artificial Sequence
  SARS-CoV-2/Australia/NSW56/2020__EPI_ISL_417408 spike protein (1-1147)(A972C_R995C) Ferritin construct
MFVFLVLLPLVSSQCVNLTTRTQLPPAYTNSFTRGVYYPDKVFRSSVLHSTQDLFLPFFSNVTWFHAIHVSGTNGTKRFDNPVLPFNDGVYFASTEKSNIIRGWIFGTTLDSKTQSLLIVNNATNVVIKVCEFQFCNDPFLGVYYHKNNKSWMESEFRVYSSANNCTFEYVSQPFLMDLEGKQGNFKNLREFVFKNIDGYFKIYSKHTPINLVRDLPQGFSALEPLVDLPIGINITRFQTLLALHRSYLTPGDSSSGWTAGAAAYYVGYLQPRTFLLKYNENGTITDAVDCALDPLSETKCTLKSFTVEKGIYQTSNFRVQPTESIVRFPNITNLCPFGEVFNATRFASVYAWNRKRISNCVADYSVLYNSASFSTFKCYGVSPTKLNDLCFTNVYADSFVIRGDEVRQIAPGQTGKIADYNYKLPDDFTGCVIAWNSNNLDSKVGGNYNYLYRLFRKSNLKPFERDISTEIYQAGSTPCNGVEGFNCYFPLQSYGFQPTNGVGYQPYRVVVLSFELLHAPATVCGPKKSTNLVKNKCVNFNFNGLTGTGVLTESNKKFLPFQQFGRDIADTTDAVRDPQTLEILDITPCSFGGVSVITPGTNTSNQVAVLYQDVNCTEVPVAIHADQLTPTWRVYSTGSNVFQTRAGCLIGAEHVNNSYECDIPIGAGICASYQTQTNSPRRARSVASQSIIAYTMSLGAENSVAYSNNSIAIPTNFTISVTTEILPVSMTKTSVDCTMYICGDSTECSNLLLQYGSFCTQLNRALTGIAVEQDKNTQEVFAQVKQIYKTPPIKDFGGFNFSQILPDSSKPSKRSFIEDLLFNKVTLADAGFIKQYGDCLGDIAARDLICAQKFNGLTVLPPLLTDEMIAQYTSALLAGTITSGWTFGAGAALQIPFAMQMAYRFNGIGVTQNVLYENQKLIANQFNSAIGKIQDSLSSTASALGKLQDVVNQNAQALNTLVKQLSSNFGCISSVLNDILSRLDKVEAEVQIDCLITGRLQSLQTYVTQQLIRAAEIRASANLAATKMSECVLGQSKRVDFCGKGYHLMSFPQSAPHGVVFLHVTYVPAQEKNFTTAPAICHDGKAHFPREGVFVSNGTHWFVTQRNFYEPQIITTDNTFVSGNCDVVIGIVNNTVYDPLQPELDSGGGGSDIIKLLNEQVNKEMQSSNLYMSMSSWCYTHSLDGAGLFLFDHAAEEYEHAKKLIIFLNENNVPVQLTSISAPEHKFEGLTQIFQKAYEHEQHISESINNIVDHAIKSKDHATFNFLQWYVAEQHEEEVLFKDILDKIELIGNENHGLYLADQYVKGIAKSRKS

SEQ ID NO: 9505 - protein, 1315 aa, Artificial Sequence
  SARS-CoV-2/Iceland/280/2020__EPI_ISL_417608 spike protein (1-1147)(A972C_R995C) Ferritin construct
MFVFLVLLPLVSSQCVNLTTRTQLPPAYTNSFTRGVYYPDKVFRSSVLHSTQDLFLPFFSNVTWFHAIHVSGTNGTKRFDNPVLPFNDGVYFASTEKSNIIRGWIFGTTLDSKTQSLLIVNNATNVVIKVCEFQFCNDPFLGVYYHKNNKSWMESEFRVYSSANNCTFEYVSQPFLMDLEGKQGNFKNLREFVFKNIDGYFKIYSKHTPINLVRDLPQGFSALEPLVDLPIGINITRFQTLLALHRSYLTPGDSSSGWTAGAAAYYVGYLQPRTFLLKYNENGTITDAVDCALDPLSETKCTLKSFTVEKGIYQTSNFRVQPTESIVRFPNITNLCPFGEVFNATRFASVYAWNRKRISNCVADYSVLYNSASFSTFKCYGVSPTKLNDLCFTNVYADSFVIRGDEVRQIAPGQTGKIADYNYKLPDDFTGCVIAWNSNNLDSKVGGNYNYLYRLFRKSNLKPFERDISTEIYQAGSTPCNGVEGFNCYFPLQSYGFQPTNGVGYQPYRVVVLSFELLHAPATVCGPKKSTNLVKNKCVNFNFNGLTGTGVLTESNKKFLPFQQFGRDIADTTDAVRDPQTLEILDITPCSFGGVSVITPGTNTSNQVAVLYQGVNCTEVPVAIHADQLTPTWRVYSTGSNVFQTRAGCLIGAEHVNNSYECDIPIGAGICASYHTQTNSPRRARSVASQSIIAYTMSLGAENSVAYSNNSIAIPTNFTISVTTEILPVSMTKTSVDCTMYICGDSTECSNLLLQYGSFCTQLNRALTGIAVEQDKNTQEVFAQVKQIYKTPPIKDFGGFNFSQILPDPSKPSKRSFIEDLLFNKVTLADAGFIKQYGDCLGDIAARDLICAQKFNGLTVLPPLLTDEMIAQYTSALLAGTITSGWTFGAGAALQIPFAMQMAYRFNGIGVTQNVLYENQKLIANQFNSAIGKIQDSLSSTASALGKLQDVVNQNAQALNTLVKQLSSNFGCISSVLNDILSRLDKVEAEVQIDCLITGRLQSLQTYVTQQLIRAAEIRASANLAATKMSECVLGQSKRVDFCGKGYHLMSFPQSAPHGVVFLHVTYVPAQEKNFTTAPAICHDGKAHFPREGVFVSNGTHWFVTQRNFYEPQIITTDNTFVSGNCDVVIGIVNNTVYDPLQPELDSGGGGSDIIKLLNEQVNKEMQSSNLYMSMSSWCYTHSLDGAGLFLFDHAAEEYEHAKKLIIFLNENNVPVQLTSISAPEHKFEGLTQIFQKAYEHEQHISESINNIVDHAIKSKDHATFNFLQWYVAEQHEEEVLFKDILDKIELIGNENHGLYLADQYVKGIAKSRKS

SEQ ID NO: 9506 - protein, 1315 aa, Artificial Sequence; identical to SEQ ID NO: 9461
  SARS-CoV-2/Iceland/247/2020__EPI_ISL_417575 spike protein (1-1147)(A972C_R995C) Ferritin construct

SEQ ID NO: 9507 - protein, 1315 aa, Artificial Sequence
  SARS-CoV-2/Iceland/238/2020__EPI_ISL_417566 spike protein (1-1147)(A972C_R995C) Ferritin construct
MFVFLVLLPLVSSQCVNLTTRTQLPPAYTNSFTRGVYYPDKVFRSSVLHSTQDLFLPFFSNVTWFHAIHVSGTNGTKRFDNPVLPFNDGVYFASTEKSNIIRGWIFGTTLDSKTQSLLIVNNATNVVIKVCEFQFCNDPFLGVYYHKNNKSWMESEFRVYSSANNCTFEYVSQPFLMDLEGKQGNFKNLREFVFKNIDGYFKIYSKHTPINLVRDLPQGFSALEPLVDLPIGINITRFQTLLALHRSYLTPGDSSSGWTAGAAAYYVGYLQPRTFLLKYNENGTITDAVDCALDPLSETKCTLKSFTVEKGIYQTSNFRVQPTESIVRFPNITNLCPFGEVFNATRFASVYAWNRKRISNCVADYSVLYNSASFSTFKCYGVSPTKLNDLCFTNVYADSFVIRGDEVRQIAPGQTGKIADYNYKLPDDFTGCVIAWNSNNLDSKVGGNYNYLYRLFRKSNLKPFERDISTEIYQAGSTPCNGVEGFNCYFPLQSYGFQPTNGVGYQPYRVVVLSFELLHAPATVCGPKKSTNLVKNKCVNFNFNGLTGTGVLTESNKKFLPFQQFGRDIADTTDAVRDPQTLEILDITPCSFGGVSVITPGTNTSNQVAVLYQGVNCTEVPVAIHADQLTPTWRVYSTGSNVFQTRAGCLIGAEHVNNSYECDIPIGAGICASYQTQTNSPRRARSVASQSIIAYTMSLGAENSVAYSNNSIAIPTNFTISVTTEILPVSMTKTSVDCTMYICGDSTECSNLLLQYGSFCTQLNRALTGIAVEQDKNTQEVFAQVKQIYKTPPIKDFGGFNFSQILPDPSKPSKRSFIEDLLFNKVTLADVGFIKQYGDCLGDIAARDLICAQKFNGLTVLPPLLTDEMIAQYTSALLAGTITSGWTFGAGAALQIPFAMQMAYRFNGIGVTQNVLYENQKLIANQFNSAIGKIQDSLSSTASALGKLQDVVNQNAQALNTLVKQLSSNFGCISSVLNDILSRLDKVEAEVQIDCLITGRLQSLQTYVTQQLIRAAEIRASANLAATKMSECVLGQSKRVDFCGKGYHLMSFPQSAPHGVVFLHVTYVPAQEKNFTTAPAICHDGKAHFPREGVFVSNGTHWFVTQRNFYEPQIITTDNTFVSGNCDVVIGIVNNTVYDPLQPELDSGGGGSDIIKLLNEQVNKEMQSSNLYMSMSSWCYTHSLDGAGLFLFDHAAEEYEHAKKLIIFLNENNVPVQLTSISAPEHKFEGLTQIFQKAYEHEQHISESINNIVDHAIKSKDHATFNFLQWYVAEQHEEEVLFKDILDKIELIGNENHGLYLADQYVKGIAKSRKS

SEQ ID NO: 9508 - protein, 1315 aa, Artificial Sequence
  SARS-CoV-2/Greece/16/2020__EPI_ISL_418265 spike protein (1-1147)(A972C_R995C) Ferritin construct
MFVFLVLLPLVSSQCVNLTTRTQLPPAYTNSFTRGVYYPDKVFRSSVLHSTQDLFLPFFSNVTWFHAIHVSGTNGTKRFDNPVLPFNDGVYFASTEKSNIIRGWIFGTTLDSKTQSLLIVNNATNVVIKVCEFQFCNDPFLGVYYHKNNKSWMESEFRVYSSANNCTFEYVSQPFLMDLEGKQGNFKNLREFVFKNVDGYFKIYSKHTPINLVRDLPQGFSALEPLVDLPIGINITRFQTLLALHRSYLTPGDSSSGWTAGAAAYYVGYLQPRTFLLKYNENGTITDAVDCALDPLSETKCTLKSFTVEKGIYQTSNFRVQPTESIVRFPNITNLCPFGEVFNATRFASVYAWNRKRISNCVADYSVLYNSASFSTFKCYGVSPTKLNDLCFTNVYADSFVIRGDEVRQIAPGQTGKIADYNYKLPDDFTGCVIAWNSNNLDSKVGGNYNYLYRLFRKSNLKPFERDISTEIYQAGSTPCNGVEGFNCYFPLQSYGFQPTNGVGYQPYRVVVLSFELLHAPATVCGPKKSTNLVKNKCVNFNFNGLTGTGVLTESNKKFLPFQQFGRDIADTTDAVRDPQTLEILDITPCSFGGVSVITPGTNTSNQVAVLYQDVNCTEVPVAIHADQLTPTWRVYSTGSNVFQTRAGCLIGAEHVNNSYECDIPIGAGICASYQTQTNSPRRARSVASQSIIAYTMSLGAENSVAYSNNSIAIPTNFTISVTTEILPVSMTKTSVDCTMYICGDSTECSNLLLQYGSFCTQLNRALTGIAVEQDKNTQEVFAQVKQIYKTPPIKDFGGFNFSQILPDPSKPSKRSFIEDLLFNKVTLADAGFIKQYGDCLGDIAARDLICAQKFNGLTVLPPLLTDEMIAQYTSALLAGTITSGWTFGAGAALQIPFAMQMAYRFNGIGVTQNVLYENQKLIANQFNSAIGKIQDSLSSTASALGKLQDVVNQNAQALNTLVKQLSSNFGCISSVLNDILSRLDKVEAEVQIDCLITGRLQSLQTYVTQQLIRAAEIRASANLAATKMSECVLGQSKRVDFCGKGYHLMSFPQSAPHGVVFLHVTYVPAQEKNFTTAPAICHDGKAHFPREGVFVSNGTHWFVTQRNFYEPQIITTDNTFVSGNCDVVIGIVNNTVYDPLQPELDSGGGGSDIIKLLNEQVNKEMQSSNLYMSMSSWCYTHSLDGAGLFLFDHAAEEYEHAKKLIIFLNENNVPVQLTSISAPEHKFEGLTQIFQKAYEHEQHISESINNIVDHAIKSKDHATFNFLQWYVAEQHEEEVLFKDILDKIELIGNENHGLYLADQYVKGIAKSRKS

SEQ ID NO: 9509 - protein, 1315 aa, Artificial Sequence
  SARS-CoV-2/Iceland/319/2020__EPI_ISL_417648 spike protein (1-1147)(A972C_R995C) Ferritin construct
MFVFLVLLPLVSSQCVNLTTRTQLPPAYTNSFTRGVYYPDKVFRSSVLHSTQDLFLPFFSNVTWFHAIHVSGTNGTKRFDNPVLPFNDGVYFASTEKSNIIRGWIFGTTLDSKTQSLLIVNNATNVVIKVCEFQFCNDPFLGVYYHKNNKSWMESEFRVYSSANNCTFEYVSQPFLIDLEGKQGNFKNLREFVFKNIDGYFKIYSKHTPINLVRDLPQGFSALEPLVDLPIGINITRFQTLLALHRSYLTPGDSSSGWTAGAAAYYVGYLQPRTFLLKYNENGTITDAVDCALDPLSETKCTLKSFTVEKGIYQTSNFRVQPTESIVRFPNITNLCPFGEVFNATRFASVYAWNRKRISNCVADYSVLYNSASFSTFKCYGVSPTKLNDLCFTNVYADSFVIRGDEVRQIAPGQTGKIADYNYKLPDDFTGCVIAWNSNNLDSKVGGNYNYLYRLFRKSNLKPFERDISTEIYQAGSTPCNGVEGFNCYFPLQSYGFQPTNGVGYQPYRVVVLSFELLHAPATVCGPKKSTNLVKNKCVNFNFNGLTGTGVLTESNKKFLPFQQFGRDIADTTDAVRDPQTLEILDITPCSFGGVSVITPGTNTSNQVAVLYQGVNCTEVPVAIHADQLTPTWRVYSTGSNVFQTRAGCLIGAEHVNNSYECDIPIGAGICASYQTQTNSPRRARSVASQSIIAYTMSLGAENSVAYSNNSIAIPTNFTISVTTEILPVSMTKTSVDCTMYICGDSTECSNLLLQYGSFCTQLNRALTGIAVEQDKNTQEVFAQVKQIYKTPPIKDFGGFNFSQILPDPSKPSKRSFIEDLLFNKVTLADAGFIKQYGDCLGDIAARDLICAQKFNGLTVLPPLLTDEMIAQYTSALLAGTITSGWTFGAGAALQIPFAMQMAYRFNGIGVTQNVLYENQKLIANQFNSAIGKIQDSLSSTASALGKLQDVVNQNAQALNTLVKQLSSNFGCISSVLNDILSRLDKVEAEVQIDCLITGRLQSLQTYVTQQLIRAAEIRASANLAATKMSECVLGQSKRVDFCGKGYHLMSFPQSAPHGVVFLHVTYVPAQEKNFTTAPAICHDGKAHFPREGVFVSNGTHWFVTQRNFYEPQIITTDNTFVSGNCDVVIGIVNNTVYDPLQPELDSGGGGSDIIKLLNEQVNKEMQSSNLYMSMSSWCYTHSLDGAGLFLFDHAAEEYEHAKKLIIFLNENNVPVQLTSISAPEHKFEGLTQIFQKAYEHEQHISESINNIVDHAIKSKDHATFNFLQWYVAEQHEEEVLFKDILDKIELIGNENHGLYLADQYVKGIAKSRKS

SEQ ID NO: 9510 - protein, 1315 aa, Artificial Sequence
  SARS-CoV-2/Congo/94/2020__EPI_ISL_417947 spike protein (1-1147)(A972C_R995C) Ferritin construct
MFVFLVLLPLVSSQCVNLTTRTQLPPAYTNSFTRGVYYPDKVFRSSVLHSTQDLFLPFFSNVTWFHAIHVSGTNGTKRFDNPVLPFNDGVYFASTEKSNIIRGWIFGTTLDSKTQSLLIVNNATNVVIKVCEFQFCNDPFLGVYYHKNNKSWMESEFRVYSSANNCTFEYVSQPFLMDLEGKQGNFKNLREFVFKNIDGYFKIYSKHTPINLVRDLPQGFSALEPLVDLPIGINITRFQTLLALHRSYLTPGDSSSGWTAGAAAYYVGYLQPRTFLLKYNENGTITDAVDCALDPLSETKCTLKSFTVEKGIYQTSNFRVQPTESIVRFPNITNLCPFGEVFNATRFASVYAWNRKRISNCVADYSVLYNSASFSTFKCYGVSPTKLNDLCFTNVYADSFVIRGDEVRQIAPGQTGKIADYNYKLPDDFTGCVIAWNSNNLDSKVGGNYNYLYRLFRKSNLKPFERDISTEIYQAGSTPCNGVEGFNCYFPLQSYGFQPTNGVGYQPYRVVVLSFELLHAPATVCGPKKSTNLVKNKCVNFNFNGLTGTGVLTESNKKFLPFQQFGRDIADTTDAVRDPQTLEILDITPCSFGGVSVITPGTNTSNQVAVLYQGVNCTEVPVAIHADQLTPTWRVYSTGSNVFQTRAGCLIGAEHVNNSYECDIPIGAGICASYQTQTNSPRRARSVASQSIIAYTMSLGAENSVAYSNNSIAIPTNFTISVTTEILPVSMTKTSVDCTMYICGDSTECSNLLLQYGSFCTQLNRALTGIAVEQDKNTQEVFAQVKQIYKTPPIKDFGGFNFSQILPDPSKPSKRSFIEDILFNKVTLADAGFIKQYGDCLGDIAARDLICAQKFNGLTVLPPLLTDEMIAQYTSALLAGTITSGWTFGAGAALQIPFAMQMAYRFNGIGVTQNVLYENQKLIANQFNSAIGKIQDSLSSTASALGKLQDVVNQNAQALNTLVKQLSSNFGCISSVLNDILSRLDKVEAEVQIDCLITGRLQSLQTYVTQQLIRAAEIRASANLAATKMSECVLGQSKRVDFCGKGYHLMSFPQSAPHGVVFLHVTYVPAQEKNFTTAPAICHDGKAHFPREGVFVSNGTHWFVTQRNFYEPQIITTDNTFVSGNCDVVIGIVNNTVYDPLQPELDSGGGGSDIIKLLNEQVNKEMQSSNLYMSMSSWCYTHSLDGAGLFLFDHAAEEYEHAKKLIIFLNENNVPVQLTSISAPEHKFEGLTQIFQKAYEHEQHISESINNIVDHAIKSKDHATFNFLQWYVAEQHEEEVLFKDILDKIELIGNENHGLYLADQYVKGIAKSRKS

SEQ ID NO: 9511 - protein, 1315 aa, Artificial Sequence
  SARS-CoV-2/Congo/158/2020__EPI_ISL_417950 spike protein (1-1147)(A972C_R995C) Ferritin construct
MFVFLVLLPLVSSQCVNLTTRTQLPPAYTNSFTRGVYYPDKVFRSSVLHSTQDLFLPFFSNVTWFHAIHVSGTNGTKRFDNPVLPFNDGVYFASTEKSNIIRGWIFGTTLDSKTQSLLIVNNATNVVIKVCEFQFCNDPFLGVYYHKNNKSWMESEFRVYSSANNCTFEYVSQPFLMDLEGKQGNFKNLREFVFKNIDGYFKIYSKHTPINLVRDLPQGFSALEPLVDLPIGINITRFQTLLALHRSYLTPGDSSSGWTAGAAAYYVGYLQPRTFLLKYNENGTITDAVDCALDPLSETKCTLKSFTVEKGIYQTSNFRVQPTESIVRFPNITNLCPFGEVFNATRFASVYAWNRKRISNCVADYSVLYNSASFSTFKCYGVSPTKLNDLCFTNVYADSFVIRGDEVRQIAPGQTGKIADYNYKLPDDFTGCVIAWNSNNLDSKVGGNYNYLYRLFRKSNLKPFERDISTEIYQAGSTPCNGVEGFNCYFPLQSYGFQPTNGVGYQPYRVVVLSFELLHAPATVCGPKKSTNLVKNKCVNFNFNGLTGTGVLTESNKKFLPFQQFGRDIADTTDAVRDPQTLEILDITPCSFGGVSVITPGTNTSNQVAVLYQDVNCTEVPVAIHADQLTPTWRVYSTGSNVFQTRAGCLIGAEHVNNSYECDIPIGAGICASYQTQTNSPRRARSVASQSIIAYTMSLGAENSVAYSNNSIAIPTNFTISVTTEILPVSMTKTSVDCTMYICGDSTECSNLLLQYGSFCTQLNRALTGIAVEQDKNTQEVFAQVKQIYKTPPIKDFGGFNFSQILPDPSKPSKRSFIEDLLFNKVTLADAGFIKQYGDCLGDIAARDLICAQKFNGLTVLPPLLTDEMIAQYTSALLAGTITSGWTFGAGAALQIPFAMQMAYRFNGIGVTQNVLYENQKLIANQFNSAIGKIQDSLSSTASALGKLQDVVNQNAQALNTLVKQLSSNFGCISSVLNDILSRLDKVEAEVQIDCLITGRLQSLQTYVTQQLIRAAEIRASANLAATKMSECVLGQSKRVDFCGKGYHLMSFPQSAPHGVVFLHVTYVPAQEKNFTTAPAICHDGKAHFPREGVFVSNGTHWFVTQRNFYEPQIITTDNTFLSGNCDVVIGIVNNTVYDPLQPELDSGGGGSDIIKLLNEQVNKEMQSSNLYMSMSSWCYTHSLDGAGLFLFDHAAEEYEHAKKLIIFLNENNVPVQLTSISAPEHKFEGLTQIFQKAYEHEQHISESINNIVDHAIKSKDHATFNFLQWYVAEQHEEEVLFKDILDKIELIGNENHGLYLADQYVKGIAKSRKS

SEQ ID NO: 9512 - protein, 1315 aa, Artificial Sequence
  SARS-CoV-2/USA/UT-00034/2020__EPI_ISL_417977 spike protein (1-1147)(A972C_R995C) Ferritin construct
MFVFLVLLPLVSSQCVNLTTRTQLPPAYTNSFTRGVYYPDKVFRSSVLHSTQDLFLPFFSNVTWFHAIHVSGTNGTKRFDNPVLPFNDGVYFASTEKSNIIRGWIFGTTLDSKTQSLLIVNNATNVVIKVCEFQFCNDPFLGVYYYKNNKSWMESEFRVYSSANNCTFEYVSQPFLMDLEGKQGNFKNLREFVFKNIDGYFKIYSKHTPINLVRDLPQGFSALEPLVDLPIGINITRFQTLLALHRSYLTPGDSSSGWTAGAAAYYVGYLQPRTFLLKYNENGTITDAVDCALDPLSETKCTLKSFTVEKGIYQTSNFRVQPTESIVRFPNITNLCPFGEVFNATRFASVYAWNRKRISNCVADYSVLYNSASFSTFKCYGVSPTKLNDLCFTNVYADSFVIRGDEVRQIAPGQTGKIADYNYKLPDDFTGCVIAWNSNNLDSKVGGNYNYLYRLFRKSNLKPFERDISTEIYQAGSTPCNGVEGFNCYFPLQSYGFQPTNGVGYQPYRVVVLSFELLHAPATVCGPKKSTNLVKNKCVNFNFNGLTGTGVLTESNKKFLPFQQFGRDIADTTDAVRDPQTLEILDITPCSFGGVSVITPGTNTSNQVAVLYQGVNCTEVPVAIHADQLTPTWRVYSTGSNVFQTRAGCLIGAEHVNNSYECDIPIGAGICASYQTQTNSPRRARSVASQSIIAYTMSLGAENSVAYSNNSIAIPTNFTISVTTEILPVSMTKTSVDCTMYICGDSTECSNLLLQYGSFCTQLNRALTGIAVEQDKNTQEVFAQVKQIYKTPPIKDFGGFNFSQILPDPSKPSKRSFIEDLLFNKVTLADAGFIKQYGDCLGDIAARDLICAQKFNGLTVLPPLLTDEMIAQYTSALLAGTITSGWTFGAGAALQIPFAMQMAYRFNGIGVTQNVLYENQKLIANQFNSAIGKIQDSLSSTASALGKLQDVVNQNAQALNTLVKQLSSNFGCISSVLNDILSRLDKVEAEVQIDCLITGRLQSLQTYVTQQLIRAAEIRASANLAATKMSECVLGQSKRVDFCGKGYHLMSFPQSAPHGVVFLHVTYVPAQEKNFTTAPAICHDGKAHFPREGVFVSNGTHWFVTQRNFYEPQIITTDNTFVSGNCDVVIGIVNNTVYDPLQPELDSGGGGSDIIKLLNEQVNKEMQSSNLYMSMSSWCYTHSLDGAGLFLFDHAAEEYEHAKKLIIFLNENNVPVQLTSISAPEHKFEGLTQIFQKAYEHEQHISESINNIVDHAIKSKDHATFNFLQWYVAEQHEEEVLFKDILDKIELIGNENHGLYLADQYVKGIAKSRKS

SEQ ID NO: 9513 - protein, 1315 aa, Artificial Sequence
  SARS-CoV-2/USA/UT-00033/2020__EPI_ISL_417976 spike protein (1-1147)(A972C_R995C) Ferritin construct
MFVFLVLLPLVSSQCVNLTTRTQLPPAYTNSFTRGVYYPDKVFRSSVLHSTQDLFLPFFSNVTWFHAIHVSGTNGTKRFDNPVLPFNDGVYFASTEKSNIIRGWIFGTTLDSKTQSLLIVNNATNVVIKVCEFQFCNDPFLGVYYHKNNKSWMESEFRVYSSANNCTFEYVSQPFLMDLEGKQGNFKNLREFVFKNIDGYFKIYSKHTPINLVRDLPQGFSALEPLVDLPIGINITRFQTLLALHRSYLTPGDSSSGLTAGAAAYYVGYLQPRTFLLKYNENGTITDAVDCALDPLSETKCTLKSFTVEKGIYQTSNFRVQPTESIVRFPNITNLCPFGEVFNATRFASVYAWNRKRISNCVADYSVLYNSASFSTFKCYGVSPTKLNDLCFTNVYADSFVIRGDEVRQIAPGQTGKIADYNYKLPDDFTGCVIAWNSNNLDSKVGGNYNYLYRLFRKSNLKPFERDISTEIYQAGSTPCNGVEGFNCYFPLQSYGFQPTNGVGYQPYRVVVLSFELLHAPATVCGPKKSTNLVKNKCVNFNFNGLTGTGVLTESNKKFLPFQQFGRDIADTTDAVRDPQTLEILDITPCSFGGVSVITPGTNTSNQVAVLYQGVNCTEVPVAIHADQLTPTWRVYSTGSNVFQTRAGCLIGAEHVNNSYECDIPIGAGICASYQTQTNSPRRARSVASQSIIAYTMSLGAENSVAYSNNSIAIPTNFTISVTTEILPVSMTKTSVDCTMYICGDSTECSNLLLQYGSFCTQLNRALTGIAVEQDKNTQEVFAQVKQIYKTPPIKDFGGFNFSQILPDPSKPSKRSFIEDLLFNKVTLADAGFIKQYGDCLGDIAARDLICAQKFNGLTVLPPLLTDEMIAQYTSALLAGTITSGWTFGAGAALQIPFAMQMAYRFNGIGVTQNVLYENQKLIANQFNSAIGKIQDSLSSTASALGKLQDVVNQNAQALNTLVKQLSSNFGCISSVLNDILSRLDKVEAEVQIDCLITGRLQSLQTYVTQQLIRAAEIRASANLAATKMSECVLGQSKRVDFCGKGYHLMSFPQSAPHGVVFLHVTYVPAQEKNFTTAPAICHDGKAHFPREGVFVSNGTHWFVTQRNFYEPQIITTDNTFVSGNCDVVIGIVNNTVYDPLQPELDSGGGGSDIIKLLNEQVNKEMQSSNLYMSMSSWCYTHSLDGAGLFLFDHAAEEYEHAKKLIIFLNENNVPVQLTSISAPEHKFEGLTQIFQKAYEHEQHISESINNIVDHAIKSKDHATFNFLQWYVAEQHEEEVLFKDILDKIELIGNENHGLYLADQYVKGIAKSRKS

SEQ ID NO: 9514 - protein, 1315 aa, Artificial Sequence
  SARS-CoV-2/USA/WI-13/2020__EPI_ISL_417516 spike protein (1-1147)(A972C_R995C) Ferritin construct
MFVFLVLLPLVSSQCVNLTTRTQLPPAYTNSFTRGVYYPDKVFRSSVLHSTQDLFLPFFSNVTWFHAIHVSGTNGTKRFDNPVLPFNDGVYFASTEKSNIIRGWIFGTTLDSKTQSLLIVNNATNVVIKVCEFQFCNDPFLGVYYHKNNKSWMESEFRVYSSANNCTFEYVSQPFLMDLEGKQGNFKNLREFVFKNIDGYFKIYSKHTPINLVRDLPQGFSALEPLVDLPIGINITRFQTLLALHRSYLTPGDSSSGWTAGAAAYYVGYLQPRTFLLKYNENGTITDAVDCALDPLSETKCTLKSFTVEKGIYQTSNFRVLPTESIVRFPNITNLCPFGEVFNATRFASVYAWNRKRISNCVADYSVLYNSASFSTFKCYGVSPTKLNDLCFTNVYADSFVIRGDEVRQIAPGQTGKIADYNYKLPDDFTGCVIAWNSNNLDSKVGGNYNYLYRLFRKSNLKPFERDISTEIYQAGSTPCNGVEGFNCYFPLQSYGFQPTNGVGYQPYRVVVLSFELLHAPATVCGPKKSTNLVKNKCVNFNFNGLTGTGVLTESNKKFLPFQQFGRDIADTTDAVRDPQTLEILDITPCSFGGVSVITPGTNTSNQVAVLYQGVNCTEVPVAIHADQLTPTWRVYSTGSNVFQTRAGCLIGAEHVNNSYECDIPIGAGICASYQTQTNSPRRARSVASQSIIAYTMSLGAENSVAYSNNSIAIPTNFTISVTTEILPVSMTKTSVDCTMYICGDSTECSNLLLQYGSFCTQLNRALTGIAVEQDKNTQEVFAQVKQIYKTPPIKDFGGFNFSQILPDPSKPSKRSFIEDLLFNKVTLADAGFIKQYGDCLGDIAARDLICAQKFNGLTVLPPLLTDEMIAQYTSALLAGTITSGWTFGAGAALQIPFAMQMAYRFNGIGVTQNVLYENQKLIANQFNSAIGKIQDSLSSTASALGKLQDVVNQNAQALNTLVKQLSSNFGCISSVLNDILSRLDKVEAEVQIDCLITGRLQSLQTYVTQQLIRAAEIRASANLAATKMSECVLGQSKRVDFCGKGYHLMSFPQSAPHGVVFLHVTYVPAQEKNFTTAPAICHDGKAHFPREGVFVSNGTHWFVTQRNFYEPQIITTDNTFVSGNCDVVIGIVNNTVYDPLQPELDSGGGGSDIIKLLNEQVNKEMQSSNLYMSMSSWCYTHSLDGAGLFLFDHAAEEYEHAKKLIIFLNENNVPVQLTSISAPEHKFEGLTQIFQKAYEHEQHISESINNIVDHAIKSKDHATFNFLQWYVAEQHEEEVLFKDILDKIELIGNENHGLYLADQYVKGIAKSRKS

SEQ ID NO: 9515 - protein, 1314 aa, Artificial Sequence
  SARS-CoV-2/India/1-27/2020__EPI_ISL_413522 spike protein (1-1146)(A971C_R994C) Ferritin construct
MFVFLVLLPLVSSQCVNLTTRTQLPPAYTNSFTRGVYYPDKVFRSSVLHSTQDLFLPFFSNVTWFHAIHVSGTNGTKRFDNPVLPFNDGVYFASTEKSNIIRGWIFGTTLDSKTQSLLIVNNATNVVIKVCEFQFCNDPFLGVYHKNNKSWMESEFRVYSSANNCTFEYVSQPFLMDLEGKQGNFKNLREFVFKNIDGYFKIYSKHTPINLVRDLPQGFSALEPLVDLPIGINITRFQTLLALHRSYLTPGDSSSGWTAGAAAYYVGYLQPRTFLLKYNENGTITDAVDCALDPLSETKCTLKSFTVEKGIYQTSNFRVQPTESIVRFPNITNLCPFGEVFNATRFASVYAWNRKRISNCVADYSVLYNSASFSTFKCYGVSPTKLNDLCFTNVYADSFVIRGDEVIQIAPGQTGKIADYNYKLPDDFTGCVIAWNSNNLDSKVGGNYNYLYRLFRKSNLKPFERDISTEIYQAGSTPCNGVEGFNCYFPLQSYGFQPTNGVGYQPYRVVVLSFELLHAPATVCGPKKSTNLVKNKCVNFNFNGLTGTGVLTESNKKFLPFQQFGRDIADTTDAVRDPQTLEILDITPCSFGGVSVITPGTNTSNQVAVLYQDVNCTEVPVAIHADQLTPTWRVYSTGSNVFQTRAGCLIGAEHVNNSYECDIPIGAGICASYQTQTNSPRRARSVASQSIIAYTMSLGAENSVAYSNNSIAIPTNFTISVTTEILPVSMTKTSVDCTMYICGDSTECSNLLLQYGSFCTQLNRALTGIAVEQDKNTQEVFAQVKQIYKTPPIKDFGGFNFSQILPDPSKPSKRSFIEDLLFNKVTLADAGFIKQYGDCLGDIAARDLICAQKFNGLTVLPPLLTDEMIAQYTSALLAGTITSGWTFGAGAALQIPFAMQMAYRFNGIGVTQNVLYENQKLIANQFNSAIGKIQDSLSSTASALGKLQDVVNQNAQALNTLVKQLSSNFGCISSVLNDILSRLDKVEAEVQIDCLITGRLQSLQTYVTQQLIRAAEIRASANLAATKMSECVLGQSKRVDFCGKGYHLMSFPQSAPHGVVFLHVTYVPAQEKNFTTAPAICHDGKAHFPREGVFVSNGTHWFVTQRNFYEPQIITTDNTFVSGNCDVVIGIVNNTVYDPLQPELDSGGGGSDIIKLLNEQVNKEMQSSNLYMSMSSWCYTHSLDGAGLFLFDHAAEEYEHAKKLIIFLNENNVPVQLTSISAPEHKFEGLTQIFQKAYEHEQHISESINNIVDHAIKSKDHATFNFLQWYVAEQHEEEVLFKDILDKIELIGNENHGLYLADQYVKGIAKSRKS

SEQ ID NO: 9516 - protein, 1309 aa, Artificial Sequence
  SARS-CoV-2/pangolin/Guangxi/P4L/2017__EPI_ISL_410538 spike protein (1-1141)(A966C_R989C) Ferritin construct
MFVFLFVLPLVSSQCVNLTTRTGIPPGYTNSSTRGVYYPDKVFRSSILHLTQDLFLPFFSNVTWFNTINYQGGFKKFDNPVLPFNDGVYFASTEKSNIIRGWIFGTTLDARTQSLLIVNNATNVVIKVCEFQFCTDPFLGVYYHNNNKTWVENEFRVYSSANNCTFEYISQPFLMDLEGKQGNFKNLREFVFKNVDGYFKIYSKHTPIDLVRDLPRGFAALEPLVDLPIGINITRFQTLLALHRSYLTPGNLESGWTTGAAAYYVGYLQQRTFLLSYNQNGTITDAVDCSLDPLSETKCTLKSLTVEKGIYQTSNFRVQPTISIVRFPNITNLCPFGEVFNASKFASVYAWNRKRISNCVADYSVLYNSTSFSTFKCYGVSPTKLNDLCFTNVYADSFVVKGDEVRQIAPGQTGVIADYNYKLPDDFTGCVIAWNSVKQDALTGGNYGYLYRLFRKSKLKPFERDISTEIYQAGSTPCNGQVGLNCYYPLERYGFHPTTGVNYQPFRVVVLSFELLNGPATVCGPKLSTTLVKDKCVNFNFNGLTGTGVLTTSKKQFLPFQQFGRDISDTTDAVRDPQTLEILDITPCSFGGVSVITPGTNTSNQVAVLYQDVNCTEVPMAIHAEQLTPAWRVYSAGANVFQTRAGCLVGAEHVNNSYECDIPVGAGICASYHSMSSLRSVNQRSIIAYTMSLGAENSVAYSNNSIAIPTNFTISVTTEILPVSMTKTSVDCTMYICGDSIECSNLLLQYGSFCTQLNRALTGIAVEQDKNTQEVFAQVKQIYKTPPIKDFGGFNFSQILPDPSKPSKRSFIEDLLFNKVTLADAGFIKQYGDCLGDIAARDLICAQKFNGLTVLPPLLTDEMIAQYTSALLAGTITSGWTFGAGAALQIPFAMQMAYRFNGIGVTQNVLYENQKLIANQFNSAIGKIQDSLSSTASALGKLQDVVNQNAQALNTLVKQLSSNFGCISSVLNDILSRLDKVEAEVQIDCLITGRLQSLQTYVTQQLIRAAEIRASANLAATKMSECVLGQSKRVDFCGKGYHLMSFPQSAPHGVVFLHVTYVPAQEKNFTTAPAICHEGKAHFPREGVFVSNGTHWFITQRNFYEPQIITTDNTFVSGSCDVVIGIVNNTVYDPLQPELDSGGGGSDIIKLLNEQVNKEMQSSNLYMSMSSWCYTHSLDGAGLFLFDHAAEEYEHAKKLIIFLNENNVPVQLTSISAPEHKFEGLTQIFQKAYEHEQHISESINNIVDHAIKSKDHATFNFLQWYVAEQHEEEVLFKDILDKIELIGNENHGLYLADQYVKGIAKSRKS

SEQ ID NO: 9517 - protein, 1309 aa, Artificial Sequence
  SARS-CoV-2/pangolin/Guangxi/P5L/2017__EPI_ISL_410540 spike protein (1-1141)(A966C_R989C) Ferritin construct
MFVFLFVLPLVSSQCVNLTTRTGIPPGYTNSSTRGVYYPDKVFRSSILHLTQDLFLPFFSNVTWFNTINYQGGFKKFDNPVLPFNDGVYFASTEKSNIIRGWIFGTTLDARTQSLLIVNNATNVVIKVCEFQFCTDPFLGVYYHNNNKTWVENEFRVYSSANNCTFEYISQPFLMDLEGKQGNFKNLREFVFKNVDGYFKIYSKHTPIDLVRDLPRGFAALEPLVDLPIGINITRFQTLLALHRSYLTPGKLESGWTTGAAAYYVGYLQQRTFLLSYNQNGTITDAVDCSLDPLSETKCTLKSLTVEKGIYQTSNFRVQPTISIVRFPNITNLCPFGEVFNASKFASVYAWNRKRISNCVADYSVLYNSTSFSTFKCYGVSPTKLNDLCFTNVYADSFVVKGDEVRQIAPGQTGVIADYNYKLPDDFTGCVIAWNSVKQDALTGGNYGYLYRLFRKSKLKPFERDISTEIYQAGSTPCNGQVGLNCYYPLERYGFHPTTGVNYQPFRVVVLSFELLNGPATVCGPKLSTTLVKDKCVNFNFNGLTGTGVLTTSKKQFLPFQQFGRDISDTTDAVRDPQTLEILDITPCSFGGVSVITPGTNTSNQVAVLYQDVNCTEVPMAIHAEQLTPAWRVYSAGANVFQTRAGCLVGAEHVNNSYECDIPVGAGICASYHSMSSFRSVNQRSIIAYTMSLGAENSVAYSNNSIAIPTNFTISVTTEILPVSMTKTSVDCTMYICGDSIECSNLLLQYGSFCTQLNRALTGIAVEQDKNTQEVFAQVKQIYKTPPIKDFGGFNFSQILPDPSKPSKRSFIEDLLFNKVTLADAGFIKQYGDCLGDIAARDLICAQKFNGLTVLPPLLTDEMIAQYTSALLAGTITSGWTFGAGAALQIPFAMQMAYRFNGIGVTQNVLYENQKLIANQFNSAIGKIQDSLSSTASALGKLQDVVNQNAQALNTLVKQLSSNFGCISSVLNDILSRLDKVEAEVQIDCLITGRLQSLQTYVTQQLIRAAEIRASANLAATKMSECVLGQSKRVDFCGKGYHLMSFPQSAPHGVVFLHVTYVPAQEKNFTTAPAICHEGKAHFPREGVFVSNGTHWFITQRNFYEPQIITTDNTFVSGSCDVVIGIVNNTVYDPLQPELDSGGGGSDIIKLLNEQVNKEMQSSNLYMSMSSWCYTHSLDGAGLFLFDHAAEEYEHAKKLIIFLNENNVPVQLTSISAPEHKFEGLTQIFQKAYEHEQHISESINNIVDHAIKSKDHATFNFLQWYVAEQHEEEVLFKDILDKIELIGNENHGLYLADQYVKGIAKSRKS

SEQ ID NO: 9518 - protein, 1309 aa, Artificial Sequence
  SARS-CoV-2/pangolin/Guangxi/P5E/2017__EPI_ISL_410541 spike protein (1-1141)(A966C_R989C) Ferritin construct
MFVFLFVLPLVSSQCVNLTTRTGIPPGYTNSSTRGVYYPDKVFRSSILHLTQDLFLPFFSNVTWFNTITYQGGSKKFDNPVLPFNDGVYFASTEKSNIIRGWIFGTTLDARTQSLLIVNNATNVVIKVCEFQFCTDPFLGVYYHNNNKTWVENEFRVYSSANNCTFEYISQPFLMDLEGKQGNFKNLREFVFKNVDGYFKIYSKHTPIDLVRDLPRGFAALEPLVDLPIGINITRFQTLLALHRSYLTPGKLESGWTTGAAAYYVGYLQQRTFLLSYNQNGTITDAVDCSLDPLSETKCTLKSLTVEKGIYQTSNFRVQPTISIVRFPNITNLCPFGEVFNASKFASVYAWNRKRISNCVADYSVLYNSTSFSTFKCYGVSPTKLNDLCFTNVYADSFVVKGDEVRQIAPGQTGVIADYNYKLPDDFTGCVIAWNSVKQDALTGDNYGYLYRLFRKSKLKPFERDISTEIYQAGSTPCNGQVGLNCYYPLERYGFHPTTGVNYQPFRVVVLSFELLNGPATVCGPKLSTTLVKDKCVNFNFNGLTGTGVLTTSKKQFLPFQQFGRDISDTTDAVRDPQTLEILDITPCSFGGVSVITPGTNTSNQVAVLYQDVNCTEVPMAIHAEQLTPAWRVYSAGANVFQTRAGCLVGAEHVNNSYECDIPVGAGICASYHSMSSFRSVNQRSIIAYTMSLGAENSVAYSNNSIAIPTNFTISVTTEILPVSMTKTSVDCTMYICGDSIECSNLLLQYGSFCTQLNRALTGIAVEQDKNTQEVFAQVKQIYKTPPIKDFGGFNFSQILPDPSKPSKRSFIEDLLFNKVTLADAGFIKQYGDCLGDIAARDLICAQKFNGLTVLPPLLTDEMIAQYTSALLAGTITSGWTFGAGAALQIPFAMQMAYRFNGIGVTQNVLYENQKLIANQFNSAIGKIQDSLSSTASALGKLQDVVNQNAQALNTLVKQLSSNFGCISSVLNDILSRLDKVEAEVQIDCLITGRLQSLQTYVTQQLIRAAEIRASANLAATKMSECVLGQSKRVDFCGKGYHLMSFPQSAPHGVVFLHVTYVPAQEKNFTTAPAICHEGKAHFPREGVFVSNGTHWFITQRNFYEPQIITTDNTFVSGSCDVVIGIVNNTVYDPLQPELDSGGGGSDIIKLLNEQVNKEMQSSNLYMSMSSWCYTHSLDGAGLFLFDHAAEEYEHAKKLIIFLNENNVPVQLTSISAPEHKFEGLTQIFQKAYEHEQHISESINNIVDHAIKSKDHATFNFLQWYVAEQHEEEVLFKDILDKIELIGNENHGLYLADQYVKGIAKSRKS

SEQ ID NO: 9519 - protein, 1307 aa, Artificial Sequence
  SARS-CoV-2/pangolin/Guangxi/P1E/2017__EPI_ISL_410539 spike protein (1-1139)(A964C_R987C) Ferritin construct
MFVFLFVLPLVSSQCVNLTTRTGIQPGYTNSSTRGVYYPDKVFRSSILHLTQDLFLPFFSNVTWFNTINYQGGFKKFDNPVLPFNDGVYFASTEKSNIIRGWIFGTTLDARTQSLLIVNNATNVVIKVCEFQFCTDPFLGVYYHNNNKTWVENEFRVYSSANNCTFEYISQPFLMDLEGKQGNFKNLREFVFKNVDGYFKIYSKHTPIDLVRDLPRGFAALEPLVDLPIGINITRFQTLLALHRSYLTPGKLESGWTTGAAAYYVGYLQQRTFLLSYNQNGTITDAVDCSLDPLSETKCTLKSLTVEKGIYQTSNFRVQPTISIVRFPNITNLCPFGEVFNASKFASVYAWNRKRISNCVADYSVLYNSTSFSTFKCYGVSPTKLNDLCFTNVYADSFVVKGDEVRQIAPGQTGVIADYNYKLPDDFTGCVIAWNSVKQDALTGGNYLYRLFRKSKLKPFERDISTEIYQAGSTPCNGQVGLNCYYPLERYGFHPTTGVNYQPFRVVVLSFELLNGPATVCGPKLSTTLVKDKCVNFNFNGLTGTGVLTTSKKQFLPFQQFGRDISDTTDAVRDPQTLEILDITPCSFGGVSVITPGTNTSNQVAVLYQDVNCTEVPMAIHAEQLTPAWRVYSAGANVFQTRAGCLVGAEHVNNSYECDIPVGAGICASYHSMSSLRSVNQRSIIAYTMSLGAENSVAYSNNSIAIPTNFTISVTTEILPVSMTKTSVDCTMYICGDSIECSNLLLQYGSFCTQLNRALTGIAVEQDKNTQEVFAQVKQIYKTPPIKDFGGFNFSQILPDPSKPSKRSFIEDLLFNKVTLADAGFIKQYGDCLGDIAARDLICAQKFNGLTVLPPLLTDEMIAQYTSALLAGTITSGWTFGAGAALQIPFAMQMAYRFNGIGVTQNVLYENQKLIANQFNSAIGKIQDSLSSTASALGKLQDVVNQNAQALNTLVKQLSSNFGCISSVLNDILSRLDKVEAEVQIDCLITGRLQSLQTYVTQQLIRAAEIRASANLAATKMSECVLGQSKRVDFCGKGYHLMSFPQSAPHGVVFLHVTYVPAQEKNFTTAPAICHEGKAHFPREGVFVSNGTHWFITQRNFYEPQIITTDNTFVSGSCDVVIGIVNNTVYDPLQPELDSGGGGSDIIKLLNEQVNKEMQSSNLYMSMSSWCYTHSLDGAGLFLFDHAAEEYEHAKKLIIFLNENNVPVQLTSISAPEHKFEGLTQIFQKAYEHEQHISESINNIVDHAIKSKDHATFNFLQWYVAEQHEEEVLFKDILDKIELIGNENHGLYLADQYVKGIAKSRKS

SEQ ID NO: 9520 - protein, 1315 aa, Artificial Sequence
  SARS-CoV-2/Wuhan/WIV05/2019__EPI_ISL_402128 spike protein (1-1147)(A890C_V1040C) Ferritin construct
MFVFLVLLPLVSSQCVNLTTRTQLPPAYTNSFTRGVYYPDKVFRSSVLHSTQDLFLPFFSNVTWFHAIHVSGTNGTKRFDNPVLPFNDGVYFASTEKSNIIRGWIFGTTLDSKTQSLLIVNNATNVVIKVCEFQFCNDPFLGVYYHKNNKSWMESEFRVYSSANNCTFEYVSQPFLMDLEGKQGNFKNLREFVFKNIDGYFKIYSKHTPINLVRDLPQGFSALEPLVDLPIGINITRFQTLLALHRSYLTPGDSSSGWTAGAAAYYVGYLQPRTFLLKYNENGTITDAVDCALDPLSETKCTLKSFTVEKGIYQTSNFRVQPTESIVRFPNITNLCPFGEVFNATRFASVYAWNRKRISNCVADYSVLYNSASFSTFKCYGVSPTKLNDLCFTNVYADSFVIRGDEVRQIAPGQTGKIADYNYKLPDDFTGCVIAWNSNNLDSKVGGNYNYLYRLFRKSNLKPFERDISTEIYQAGSTPCNGVEGFNCYFPLQSYGFQPTNGVGYQPYRVVVLSFELLHAPATVCGPKKSTNLVKNKCVNFNFNGLTGTGVLTESNKKFLPFQQFGRDIADTTDAVRDPQTLEILDITPCSFGGVSVITPGTNTSNQVAVLYQDVNCTEVPVAIHADQLTPTWRVYSTGSNVFQTRAGCLIGAEHVNNSYECDIPIGAGICASYQTQTNSPRRARSVASQSIIAYTMSLGAENSVAYSNNSIAIPTNFTISVTTEILPVSMTKTSVDCTMYICGDSTECSNLLLQYGSFCTQLNRALTGIAVEQDKNTQEVFAQVKQIYKTPPIKDFGGFNFSQILPDPSKPSKRSFIEDLLFNKVTLADAGFIKQYGDCLGDIAARDLICAQKFNGLTVLPPLLTDEMIAQYTSALLAGTITSGWTFGCGAALQIPFAMQMAYRFNGIGVTQNVLYENQKLIANQFNSAIGKIQDSLSSTASALGKLQDVVNQNAQALNTLVKQLSSNFGAISSVLNDILSRLDKVEAEVQIDRLITGRLQSLQTYVTQQLIRAAEIRASANLAATKMSECVLGQSKRCDFCGKGYHLMSFPQSAPHGVVFLHVTYVPAQEKNFTTAPAICHDGKAHFPREGVFVSNGTHWFVTQRNFYEPQIITTDNTFVSGNCDVVIGIVNNTVYDPLQPELDSGGGGSDIIKLLNEQVNKEMQSSNLYMSMSSWCYTHSLDGAGLFLFDHAAEEYEHAKKLIIFLNENNVPVQLTSISAPEHKFEGLTQIFQKAYEHEQHISESINNIVDHAIKSKDHATFNFLQWYVAEQHEEEVLFKDILDKIELIGNENHGLYLADQYVKGIAKSRKS

SEQ ID NO: 9521 - protein, 1311 aa, Artificial Sequence; identical to SEQ ID NO: 9253
  SARS-CoV-2/bat/Yunnan/RaTG13/2013__EPI_ISL_402131 spike protein (1-1143)(A886C_V1036C) Ferritin construct

SEQ ID NO: 9522 - protein, 1315 aa, Artificial Sequence; identical to SEQ ID NO: 9254
  SARS-CoV-2/Wuhan/HBCDC-HB-01/2019__EPI_ISL_402132 spike protein (1-1147)(A890C_V1040C) Ferritin construct

SEQ ID NO: 9523 - protein, 1315 aa, Artificial Sequence; identical to SEQ ID NO: 9255
  SARS-CoV-2/Guangdong/20SF028/2020__EPI_ISL_403936 spike protein (1-1147)(A890C_V1040C) Ferritin construct

SEQ ID NO: 9524 - protein, 1315 aa, Artificial Sequence; identical to SEQ ID NO: 9256
  SARS-CoV-2/Shenzhen/SZTH-001/2020__EPI_ISL_406592 spike protein (1-1147)(A890C_V1040C) Ferritin construct

SEQ ID NO: 9525 - protein, 1315 aa, Artificial Sequence; identical to SEQ ID NO: 9257
  SARS-CoV-2/Shenzhen/SZTH-004/2020__EPI_ISL_406595 spike protein (1-1147)(A890C_V1040C) Ferritin construct

SEQ ID NO: 9526 - protein, 1315 aa, Artificial Sequence; identical to SEQ ID NO: 9258
  SARS-CoV-2/France/IDF0372/2020__EPI_ISL_406596 spike protein (1-1147)(A890C_V1040C) Ferritin construct

SEQ ID NO: 9527 - protein, 1315 aa, Artificial Sequence; identical to SEQ ID NO: 9259
  SARS-CoV-2/Australia/VIC01/2020__EPI_ISL_406844 spike protein (1-1147)(A890C_V1040C) Ferritin construct

SEQ ID NO: 9528 - protein, 1315 aa, Artificial Sequence; identical to SEQ ID NO: 9260
  SARS-CoV-2/Germany/BavPat1/2020__EPI_ISL_406862 spike protein (1-1147)(A890C_V1040C) Ferritin construct

SEQ ID NO: 9529 - protein, 1315 aa, Artificial Sequence; identical to SEQ ID NO: 9261
  SARS-CoV-2/Wuhan/HBCDC-HB-02/2020__EPI_ISL_412978 spike protein (1-1147)(A890C_V1040C) Ferritin construct

SEQ ID NO: 9530 - protein, 1315 aa, Artificial Sequence; identical to SEQ ID NO: 9262
  SARS-CoV-2/Australia/QLD02/2020__EPI_ISL_407896 spike protein (1-1147)(A890C_V1040C) Ferritin construct

SEQ ID NO: 9531 - protein, 1315 aa, Artificial Sequence; identical to SEQ ID NO: 9263
  SARS-CoV-2/India/1-31/2020__EPI_ISL_413523 spike protein (1-1147)(A890C_V1040C) Ferritin construct

SEQ ID NO: 9532 - protein, 1315 aa, Artificial Sequence; identical to SEQ ID NO: 9264
  SARS-CoV-2/Guangdong/GD2020087-P0008/2020__EPI_ISL_413863 spike protein (1-1147)(A890C_V1040C) Ferritin construct

SEQ ID NO: 9533 - protein, 1315 aa, Artificial Sequence; identical to SEQ ID NO: 9265
  SARS-CoV-2/Sweden/01/2020__EPI_ISL_411951 spike protein (1-1147)(A890C_V1040C) Ferritin construct

SEQ ID NO: 9534 - protein, 1315 aa, Artificial Sequence; identical to SEQ ID NO: 9266
  SARS-CoV-2/Tianmen/HBCDC-HB-07/2020__EPI_ISL_412983 spike protein (1-1147)(A890C_V1040C) Ferritin construct

SEQ ID NO: 9535 - protein, 1315 aa, Artificial Sequence; identical to SEQ ID NO: 9267
  SARS-CoV-2/Hong Kong/case42_VM20002493/2020__EPI_ISL_414527 spike protein (1-1147)(A890C_V1040C) Ferritin construct

SEQ ID NO: 9536 - protein, 1315 aa, Artificial Sequence; identical to SEQ ID NO: 9268
  SARS-CoV-2/USA/CruiseA-23/2020__EPI_ISL_414482 spike protein (1-1147)(A890C_V1040C) Ferritin construct

SEQ ID NO: 9537 - protein, 1315 aa, Artificial Sequence; identical to SEQ ID NO: 9269
  SARS-CoV-2/Hong Kong/case85_VM20002868/2020__EPI_ISL_414519 spike protein (1-1147)(A890C_V1040C) Ferritin construct

SEQ ID NO: 9538 - protein, 1315 aa, Artificial Sequence; identical to SEQ ID NO: 9260
  SARS-CoV-2/England/200990660/2020__EPI_ISL_414523 spike protein (1-1147)(A890C_V1040C) Ferritin construct

SEQ ID NO: 9539 - protein, 1315 aa, Artificial Sequence; identical to SEQ ID NO: 9271
  SARS-CoV-2/Australia/NSW09/2020__EPI_ISL_413595 spike protein (1-1147)(A890C_V1040C) Ferritin construct

SEQ ID NO: 9540 - protein, 1315 aa, Artificial Sequence; identical to SEQ ID NO: 9252
  SARS-CoV-2/Australia/NSW10/2020__EPI_ISL_413596 spike protein (1-1147)(A890C_V1040C) Ferritin construct

SEQ ID NO: 9541 - protein, 1315 aa, Artificial Sequence; identical to SEQ ID NO: 9273
  SARS-CoV-2/Switzerland/1000477797/2020__EPI_ISL_413023 spike protein (1-1147)(A890C_V1040C) Ferritin construct

SEQ ID NO: 9542 - protein, 1315 aa, Artificial Sequence; identical to SEQ ID NO: 9274
  SARS-CoV-2/Belgium/BA-02291/2020__EPI_ISL_415159 spike protein (1-1147)(A890C_V1040C) Ferritin construct

SEQ ID NO: 9543 - protein, 1315 aa, Artificial Sequence; identical to SEQ ID NO: 9275
  SARS-CoV-2/USA/WA8-UW5/2020__EPI_ISL_413486 spike protein (1-1147)(A890C_V1040C) Ferritin construct

SEQ ID NO: 9544 - protein, 1315 aa, Artificial Sequence; identical to SEQ ID NO: 9276
  SARS-CoV-2/England/20102000506/2020__EPI_ISL_415147 spike protein (1-1147)(A890C_V1040C) Ferritin construct

SEQ ID NO: 9545 - protein, 1315 aa, Artificial Sequence; identical to SEQ ID NO: 9277
  SARS-CoV-2/Belgium/VAG-03013/2020__EPI_ISL_415155 spike protein (1-1147)(A890C_V1040C) Ferritin construct

SEQ ID NO: 9546 - protein, 1315 aa, Artificial Sequence; identical to SEQ ID NO: 9278
  SARS-CoV-2/Belgium/BC-03016/2020__EPI_ISL_415157 spike protein (1-1147)(A890C_V1040C) Ferritin construct

SEQ ID NO: 9547 - protein, 1315 aa, Artificial Sequence; identical to SEQ ID NO: 9279
  SARS-CoV-2/Germany/BavPat3/2020__EPI_ISL_414521 spike protein (1-1147)(A890C_V1040C) Ferritin construct

SEQ ID NO: 9548 - protein, 1315 aa, Artificial Sequence; identical to SEQ ID NO: 9280
  SARS-CoV-2/France/HF1805/2020__EPI_ISL_414628 spike protein (1-1147)(A890C_V1040C) Ferritin construct

SEQ ID NO: 9549 - protein, 1315 aa, Artificial Sequence; identical to SEQ ID NO: 9281
  SARS-CoV-2/Netherlands/ZuidHolland_9/2020__EPI_ISL_414445 spike protein (1-1147)(A890C_V1040C) Ferritin construct

SEQ ID NO: 9550 - protein, 1315 aa, Artificial Sequence; identical to SEQ ID NO: 9282
  SARS-CoV-2/Finland/FIN03032020A/2020__EPI_ISL_413602 spike protein (1-1147)(A890C_V1040C) Ferritin construct

SEQ ID NO: 9551 - protein, 1315 aa, Artificial Sequence; identical to SEQ ID NO: 9283
  SARS-CoV-2/France/GE1977/2020__EPI_ISL_414632 spike protein (1-1147)(A890C_V1040C) Ferritin construct

SEQ ID NO: 9552 - protein, 1315 aa, Artificial Sequence; identical to SEQ ID NO: 9284
  SARS-CoV-2/Finland/FIN-313/2020__EPI_ISL_414641 spike protein (1-1147)(A890C_V1040C) Ferritin construct

SEQ ID NO: 9553 - protein, 1315 aa, Artificial Sequence; identical to SEQ ID NO: 9285
  SARS-CoV-2/Netherlands/ZuidHolland_2/2020__EPI_ISL_414556 spike protein (1-1147)(A890C_V1040C) Ferritin construct

SEQ ID NO: 9554 - protein, 1315 aa, Artificial Sequence; identical to SEQ ID NO: 9286
  SARS-CoV-2/USA/WA-UW31/2020__EPI_ISL_414618 spike protein (1-1147)(A890C_V1040C) Ferritin construct

SEQ ID NO: 9555 - protein, 1315 aa, Artificial Sequence; identical to SEQ ID NO: 9287
  SARS-CoV-2/South Korea/SNU01/2020__EPI_ISL_411929 spike protein (1-1147)(A890C_V1040C) Ferritin construct

SEQ ID NO: 9556 - protein, 1315 aa, Artificial Sequence; identical to SEQ ID NO: 9288
  SARS-CoV-2/China/WF0004/2020__EPI_ISL_413694 spike protein (1-1147)(A890C_V1040C) Ferritin construct

SEQ ID NO: 9557 - protein, 1315 aa, Artificial Sequence; identical to SEQ ID NO: 9289
  SARS-CoV-2/China/WF0028/2020__EPI_ISL_413791 spike protein (1-1147)(A890C_V1040C) Ferritin construct

SEQ ID NO: 9558 - protein, 1315 aa, Artificial Sequence; identical to SEQ ID NO: 9290
  SARS-CoV-2/2019-nCoV/USA-CruiseA-18/2020__MT159716.1 spike protein (1-1147)(A890C_V1040C) Ferritin construct

SEQ ID NO: 9559 - protein, 1315 aa, Artificial Sequence; identical to SEQ ID NO: 9291
  SARS-CoV-2/SARS-CoV-2/Yunnan-01/human/2020/CHN__MT049951.1 spike protein (1-1147)(A890C_V1040C) Ferritin construct

SEQ ID NO: 9560 - protein, 1315 aa, Artificial Sequence; identical to SEQ ID NO: 9292
  SARS-CoV-2/USA/WA-UW292/2020__EPI_ISL_418077 spike protein (1-1147)(A890C_V1040C) Ferritin construct

SEQ ID NO: 9561 - protein, 1315 aa, Artificial Sequence; identical to SEQ ID NO: 9293
  SARS-CoV-2/Iceland/192/2020__EPI_ISL_417819 spike protein (1-1147)(A890C_V1040C) Ferritin construct

SEQ ID NO: 9562 - protein, 1315 aa, Artificial Sequence; identical to SEQ ID NO: 9294
  SARS-CoV-2/Belgium/ULG-6939/2020__EPI_ISL_417020 spike protein (1-1147)(A890C_V1040C) Ferritin construct

SEQ ID NO: 9563 - protein, 1315 aa, Artificial Sequence; identical to SEQ ID NO: 9295
  SARS-CoV-2/France/HF2496/2020__EPI_ISL_418231 spike protein (1-1147)(A890C_V1040C) Ferritin construct

SEQ ID NO: 9564 - protein, 1315 aa, Artificial Sequence; identical to SEQ ID NO: 9296
  SARS-CoV-2/USA/WA-UW291/2020__EPI_ISL_418076 spike protein (1-1147)(A890C_V1040C) Ferritin construct

SEQ ID NO: 9565 - protein, 1315 aa, Artificial Sequence; identical to SEQ ID NO: 9260
  SARS-CoV-2/Portugal/PT0034/2020__EPI_ISL_418019 spike protein (1-1147)(A890C_V1040C) Ferritin construct

SEQ ID NO: 9566 - protein, 1315 aa, Artificial Sequence; identical to SEQ ID NO: 9252
  SARS-CoV-2/Iceland/202/2020__EPI_ISL_417750 spike protein (1-1147)(A890C_V1040C) Ferritin construct

SEQ ID NO: 9567 - protein, 1315 aa, Artificial Sequence; identical to SEQ ID NO: 9299
  SARS-CoV-2/USA/WA-UW261/2020__EPI_ISL_418046 spike protein (1-1147)(A890C_V1040C) Ferritin construct

SEQ ID NO: 9568 - protein, 1315 aa, Artificial Sequence; identical to SEQ ID NO: 9300
  SARS-CoV-2/Portugal/PT0035/2020__EPI_ISL_418020 spike protein (1-1147)(A890C_V1040C) Ferritin construct

SEQ ID NO: 9569 - protein, 1315 aa, Artificial Sequence; identical to SEQ ID NO: 9301
  SARS-CoV-2/USA/NY-NYUMC7/2020__EPI_ISL_418192 spike protein (1-1147)(A890C_V1040C) Ferritin construct

SEQ ID NO: 9570 - protein, 1315 aa, Artificial Sequence; identical to SEQ ID NO: 9302
  SARS-CoV-2/Iceland/189/2020__EPI_ISL_417709 spike protein (1-1147)(A890C_V1040C) Ferritin construct

SEQ ID NO: 9571 - protein, 1315 aa, Artificial Sequence; identical to SEQ ID NO: 9303
  SARS-CoV-2/Australia/NSW56/2020__EPI_ISL_417408 spike protein (1-1147)(A890C_V1040C) Ferritin construct

SEQ ID NO: 9572 - protein, 1315 aa, Artificial Sequence; identical to SEQ ID NO: 9304
  SARS-CoV-2/Iceland/280/2020__EPI_ISL_417608 spike protein (1-1147)(A890C_V1040C) Ferritin construct

SEQ ID NO: 9573 - protein, 1315 aa, Artificial Sequence; identical to SEQ ID NO: 9260
  SARS-CoV-2/Iceland/247/2020__EPI_ISL_417575 spike protein (1-1147)(A890C_V1040C) Ferritin construct

SEQ ID NO: 9574 - protein, 1315 aa, Artificial Sequence; identical to SEQ ID NO: 9306
  SARS-CoV-2/Iceland/238/2020__EPI_ISL_417566 spike protein (1-1147)(A890C_V1040C) Ferritin construct

SEQ ID NO: 9575 - protein, 1315 aa, Artificial Sequence; identical to SEQ ID NO: 9307
  SARS-CoV-2/Greece/16/2020__EPI_ISL_418265 spike protein (1-1147)(A890C_V1040C) Ferritin construct

SEQ ID NO: 9576 - protein, 1315 aa, Artificial Sequence; identical to SEQ ID NO: 9308
  SARS-CoV-2/Iceland/319/2020__EPI_ISL_417648 spike protein (1-1147)(A890C_V1040C) Ferritin construct

SEQ ID NO: 9577 - protein, 1315 aa, Artificial Sequence; identical to SEQ ID NO: 9309
  SARS-CoV-2/Congo/94/2020__EPI_ISL_417947 spike protein (1-1147)(A890C_V1040C) Ferritin construct

SEQ ID NO: 9578 - protein, 1315 aa, Artificial Sequence; identical to SEQ ID NO: 9310
  SARS-CoV-2/Congo/158/2020__EPI_ISL_417950 spike protein (1-1147)(A890C_V1040C) Ferritin construct

SEQ ID NO: 9579 - protein, 1315 aa, Artificial Sequence; identical to SEQ ID NO: 9311
  SARS-CoV-2/USA/UT-00034/2020__EPI_ISL_417977 spike protein (1-1147)(A890C_V1040C) Ferritin construct

SEQ ID NO: 9580 - protein, 1315 aa, Artificial Sequence; identical to SEQ ID NO: 9312
  SARS-CoV-2/USA/UT-00033/2020__EPI_ISL_417976 spike protein (1-1147)(A890C_V1040C) Ferritin construct

SEQ ID NO: 9581 - protein, 1315 aa, Artificial Sequence; identical to SEQ ID NO: 9313
  SARS-CoV-2/USA/WI-13/2020__EPI_ISL_417516 spike protein (1-1147)(A890C_V1040C) Ferritin construct

SEQ ID NO: 9582 - protein, 1314 aa, Artificial Sequence; identical to SEQ ID NO: 9314
  SARS-CoV-2/India/1-27/2020__EPI_ISL_413522 spike protein (1-1146)(A889C_V1039C) Ferritin construct

SEQ ID NO: 9583 - protein, 1309 aa, Artificial Sequence; identical to SEQ ID NO: 9315
  SARS-CoV-2/pangolin/Guangxi/P4L/2017__EPI_ISL_410538 spike protein (1-1141)(A884C_V1034C) Ferritin construct

SEQ ID NO: 9584 - protein, 1309 aa, Artificial Sequence; identical to SEQ ID NO: 9316
  SARS-CoV-2/pangolin/Guangxi/P5L/2017__EPI_ISL_410540 spike protein (1-1141)(A884C_V1034C) Ferritin construct

SEQ ID NO: 9585 - protein, 1309 aa, Artificial Sequence; identical to SEQ ID NO: 9317
  SARS-CoV-2/pangolin/Guangxi/P5E/2017__EPI_ISL_410541 spike protein (1-1141)(A884C_V1034C) Ferritin construct

SEQ ID NO: 9586 - protein, 1307 aa, Artificial Sequence; identical to SEQ ID NO: 9318
  SARS-CoV-2/pangolin/Guangxi/P1E/2017__EPI_ISL_410539 spike protein (1-1139)(A882C_V1032C) Ferritin construct

SEQ ID NO: 9587 - protein, 1315 aa, Artificial Sequence
  SARS-CoV-2/Wuhan/WIV05/2019__EPI_ISL_402128 spike protein (1-1147)(T874C_S1055C) Ferritin construct
MFVFLVLLPLVSSQCVNLTTRTQLPPAYTNSFTRGVYYPDKVFRSSVLHSTQDLFLPFFSNVTWFHAIHVSGTNGTKRFDNPVLPFNDGVYFASTEKSNIIRGWIFGTTLDSKTQSLLIVNNATNVVIKVCEFQFCNDPFLGVYYHKNNKSWMESEFRVYSSANNCTFEYVSQPFLMDLEGKQGNFKNLREFVFKNIDGYFKIYSKHTPINLVRDLPQGFSALEPLVDLPIGINITRFQTLLALHRSYLTPGDSSSGWTAGAAAYYVGYLQPRTFLLKYNENGTITDAVDCALDPLSETKCTLKSFTVEKGIYQTSNFRVQPTESIVRFPNITNLCPFGEVFNATRFASVYAWNRKRISNCVADYSVLYNSASFSTFKCYGVSPTKLNDLCFTNVYADSFVIRGDEVRQIAPGQTGKIADYNYKLPDDFTGCVIAWNSNNLDSKVGGNYNYLYRLFRKSNLKPFERDISTEIYQAGSTPCNGVEGFNCYFPLQSYGFQPTNGVGYQPYRVVVLSFELLHAPATVCGPKKSTNLVKNKCVNFNFNGLTGTGVLTESNKKFLPFQQFGRDIADTTDAVRDPQTLEILDITPCSFGGVSVITPGTNTSNQVAVLYQDVNCTEVPVAIHADQLTPTWRVYSTGSNVFQTRAGCLIGAEHVNNSYECDIPIGAGICASYQTQTNSPRRARSVASQSIIAYTMSLGAENSVAYSNNSIAIPTNFTISVTTEILPVSMTKTSVDCTMYICGDSTECSNLLLQYGSFCTQLNRALTGIAVEQDKNTQEVFAQVKQIYKTPPIKDFGGFNFSQILPDPSKPSKRSFIEDLLFNKVTLADAGFIKQYGDCLGDIAARDLICAQKFNGLTVLPPLLTDEMIAQYCSALLAGTITSGWTFGAGAALQIPFAMQMAYRFNGIGVTQNVLYENQKLIANQFNSAIGKIQDSLSSTASALGKLQDVVNQNAQALNTLVKQLSSNFGAISSVLNDILSRLDKVEAEVQIDRLITGRLQSLQTYVTQQLIRAAEIRASANLAATKMSECVLGQSKRVDFCGKGYHLMSFPQCAPHGVVFLHVTYVPAQEKNFTTAPAICHDGKAHFPREGVFVSNGTHWFVTQRNFYEPQIITTDNTFVSGNCDVVIGIVNNTVYDPLQPELDSGGGGSDIIKLLNEQVNKEMQSSNLYMSMSSWCYTHSLDGAGLFLFDHAAEEYEHAKKLIIFLNENNVPVQLTSISAPEHKFEGLTQIFQKAYEHEQHISESINNIVDHAIKSKDHATFNFLQWYVAEQHEEEVLFKDILDKIELIGNENHGLYLADQYVKGIAKSRKS

SEQ ID NO: 9588 - protein, 1311 aa, Artificial Sequence
  SARS-CoV-2/bat/Yunnan/RaTG13/2013__EPI_ISL_402131 spike protein (1-1143)(T870C_S1051C) Ferritin construct
MFVFLVLLPLVSSQCVNLTTRTQLPPAYTNSSTRGVYYPDKVFRSSVLHLTQDLFLPFFSNVTWFHAIHVSGTNGIKRFDNPVLPFNDGVYFASTEKSNIIRGWIFGTTLDSKTQSLLIVNNATNVVIKVCEFQFCNDPFLGVYYHKNNKSWMESEFRVYSSANNCTFEYVSQPFLMDLEGKQGNFKNLREFVFKNIDGYFKIYSKHTPINLVRDLPPGFSALEPLVDLPIGINITRFQTLLALHRSYLTPGDSSSGWTAGAAAYYVGYLQPRTFLLKYNENGTITDAVDCALDPLSETKCTLKSFTVEKGIYQTSNFRVQPTDSIVRFPNITNLCPFGEVFNATTFASVYAWNRKRISNCVADYSVLYNSTSFSTFKCYGVSPTKLNDLCFTNVYADSFVITGDEVRQIAPGQTGKIADYNYKLPDDFTGCVIAWNSKHIDAKEGGNFNYLYRLFRKANLKPFERDISTEIYQAGSKPCNGQTGLNCYYPLYRYGFYPTDGVGHQPYRVVVLSFELLNAPATVCGPKKSTNLVKNKCVNFNFNGLTGTGVLTESNKKFLPFQQFGRDIADTTDAVRDPQTLEILDITPCSFGGVSVITPGTNASNQVAVLYQDVNCTEVPVAIHADQLTPTWRVYSTGSNVFQTRAGCLIGAEHVNNSYECDIPIGAGICASYQTQTNSRSVASQSIIAYTMSLGAENSVAYSNNSIAIPTNFTISVTTEILPVSMTKTSVDCTMYICGDSTECSNLLLQYGSFCTQLNRALTGIAVEQDKNTQEVFAQVKQIYKTPPIKDFGGFNFSQILPDPSKPSKRSFIEDLLFNKVTLADAGFIKQYGDCLGDIAARDLICAQKFNGLTVLPPLLTDEMIAQYCSALLAGTITSGWTFGAGAALQIPFAMQMAYRFNGIGVTQNVLYENQKLIANQFNSAIGKIQDSLSSTASALGKLQDVVNQNAQALNTLVKQLSSNFGAISSVLNDILSRLDKVEAEVQIDRLITGRLQSLQTYVTQQLIRAAEIRASANLAATKMSECVLGQSKRVDFCGKGYHLMSFPQCAPHGVVFLHVTYVPAQEKNFTTAPAICHDGKAHFPREGVFVSNGTHWFVTQRNFYEPQIITTDNTFVSGSCDVVIGIVNNTVYDPLQPELDSGGGGSDIIKLLNEQVNKEMQSSNLYMSMSSWCYTHSLDGAGLFLFDHAAEEYEHAKKLIIFLNENNVPVQLTSISAPEHKFEGLTQIFQKAYEHEQHISESINNIVDHAIKSKDHATFNFLQWYVAEQHEEEVLFKDILDKIELIGNENHGLYLADQYVKGIAKSRKS

SEQ ID NO: 9589 - protein, 1315 aa, Artificial Sequence
  SARS-CoV-2/Wuhan/HBCDC-HB-01/2019__EPI_ISL_402132 spike protein (1-1147)(T874C_S1055C) Ferritin construct
MFVFLVLLPLVSSQCVNLTTRTQLPPAYTNSITRGVYYPDKVFRSSVLHSTQDLFLPFFSNVTWFHAIHVSGTNGTKRFDNPVLPFNDGVYFASTEKSNIIRGWIFGTTLDSKTQSLLIVNNATNVVIKVCEFQFCNDPFLGVYYHKNNKSWMESEFRVYSSANNCTFEYVSQPFLMDLEGKQGNFKNLREFVFKNIDGYFKIYSKHTPINLVRDLPQGFSALEPLVDLPIGINITRFQTLLALHRSYLTPGDSSSGWTAGAAAYYVGYLQPRTFLLKYNENGTITDAVDCALDPLSETKCTLKSFTVEKGIYQTSNFRVQPTESIVRFPNITNLCPFGEVFNATRFASVYAWNRKRISNCVADYSVLYNSASFSTFKCYGVSPTKLNDLCFTNVYADSFVIRGDEVRQIAPGQTGKIADYNYKLPDDFTGCVIAWNSNNLDSKVGGNYNYLYRLFRKSNLKPFERDISTEIYQAGSTPCNGVEGFNCYFPLQSYGFQPTNGVGYQPYRVVVLSFELLHAPATVCGPKKSTNLVKNKCVNFNFNGLTGTGVLTESNKKFLPFQQFGRDIADTTDAVRDPQTLEILDITPCSFGGVSVITPGTNTSNQVAVLYQDVNCTEVPVAIHADQLTPTWRVYSTGSNVFQTRAGCLIGAEHVNNSYECDIPIGAGICASYQTQTNSPRRARSVASQSIIAYTMSLGAENSVAYSNNSIAIPTNFTISVTTEILPVSMTKTSVDCTMYICGDSTECSNLLLQYGSFCTQLNRALTGIAVEQDKNTQEVFAQVKQIYKTPPIKDFGGFNFSQILPDPSKPSKRSFIEDLLFNKVTLADAGFIKQYGDCLGDIAARDLICAQKFNGLTVLPPLLTDEMIAQYCSALLAGTITSGWTFGAGAALQIPFAMQMAYRFNGIGVTQNVLYENQKLIANQFNSAIGKIQDSLSSTASALGKLQDVVNQNAQALNTLVKQLSSNFGAISSVLNDILSRLDKVEAEVQIDRLITGRLQSLQTYVTQQLIRAAEIRASANLAATKMSECVLGQSKRVDFCGKGYHLMSFPQCAPHGVVFLHVTYVPAQEKNFTTAPAICHDGKAHFPREGVFVSNGTHWFVTQRNFYEPQIITTDNTFVSGNCDVVIGIVNNTVYDPLQPELDSGGGGSDIIKLLNEQVNKEMQSSNLYMSMSSWCYTHSLDGAGLFLFDHAAEEYEHAKKLIIFLNENNVPVQLTSISAPEHKFEGLTQIFQKAYEHEQHISESINNIVDHAIKSKDHATFNFLQWYVAEQHEEEVLFKDILDKIELIGNENHGLYLADQYVKGIAKSRKS

SEQ ID NO: 9590 - protein, 1315 aa, Artificial Sequence
  SARS-CoV-2/Guangdong/20SF028/2020__EPI_ISL_403936 spike protein (1-1147)(T874C_S1055C) Ferritin construct
MFVFLVLLPLVSSQCVNLTTRTQLPPAYTNSFTRGVYYPDKVFRSSVLYSTQDLFLPFFSNVTWFHAIHVSGTNGTKRFDNPVLPFNDGVYFASTEKSNIIRGWIFGTTLDSKTQSLLIVNNATNVVIKVCEFQFCNDPFLGVYYHKNNKSWMESEFRVYSSANNCTFEYVSQPFLMDLEGKQGNFKNLREFVFKNIDGYFKIYSKHTPINLVRDLPQGFSALEPLVDLPIGINITRFQTLLALHRSYLTPGDSSSGWTAGAAAYYVGYLQPRTFLLKYNENGTITDAVDCALDPLSETKCTLKSFTVEKGIYQTSNFRVQPTESIVRFPNITNLCPFGEVFNATRFASVYAWNRKRISNCVADYSVLYNSASFSTFKCYGVSPTKLNDLCFTNVYADSFVIRGDEVRQIAPGQTGKIADYNYKLPDDFTGCVIAWNSNNLDSKVGGNYNYLYRLFRKSNLKPFERDISTEIYQAGSTPCNGVEGFNCYFPLQSYGFQPTNGVGYQPYRVVVLSFELLHAPATVCGPKKSTNLVKNKCVNFNFNGLTGTGVLTESNKKFLPFQQFGRDIADTTDAVRDPQTLEILDITPCSFGGVSVITPGTNTSNQVAVLYQDVNCTEVPVAIHADQLTPTWRVYSTGSNVFQTRAGCLIGAEHVNNSYECDIPIGAGICASYQTQTNSPRRARSVASQSIIAYTMSLGAENSVAYSNNSIAIPTNFTISVTTEILPVSMTKTSVDCTMYICGDSTECSNLLLQYGSFCTQLNRALTGIAVEQDKNTQEVFAQVKQIYKTPPIKDFGGFNFSQILPDPSKPSKRSFIEDLLFNKVTLADAGFIKQYGDCLGDIAARDLICAQKFNGLTVLPPLLTDEMIAQYCSALLAGTITSGWTFGAGAALQIPFAMQMAYRFNGIGVTQNVLYENQKLIANQFNSAIGKIQDSLSSTASALGKLQDVVNQNAQALNTLVKQLSSNFGAISSVLNDILSRLDKVEAEVQIDRLITGRLQSLQTYVTQQLIRAAEIRASANLAATKMSECVLGQSKRVDFCGKGYHLMSFPQCAPHGVVFLHVTYVPAQEKNFTTAPAICHDGKAHFPREGVFVSNGTHWFVTQRNFYEPQIITTDNTFVSGNCDVVIGIVNNTVYDPLQPELDSGGGGSDIIKLLNEQVNKEMQSSNLYMSMSSWCYTHSLDGAGLFLFDHAAEEYEHAKKLIIFLNENNVPVQLTSISAPEHKFEGLTQIFQKAYEHEQHISESINNIVDHAIKSKDHATFNFLQWYVAEQHEEEVLFKDILDKIELIGNENHGLYLADQYVKGIAKSRKS

SEQ ID NO: 9591 - protein, 1315 aa, Artificial Sequence
  SARS-CoV-2/Shenzhen/SZTH-001/2020__EPI_ISL_406592 spike protein (1-1147)(T874C_S1055C) Ferritin construct
MFVFLVLLPLVSSQCVNLTTRTQLPPAYTNSFTRGVYYPDKVFRSSVLHSTQDLFLPFFSNVTWFHAIHVSGTNGTKRFDNPVLPFNDGVYFASTEKSNIIRGWIFGTTLDSKTQSLLIVNNATNVVIKVCEFQFCNDPFLGVYYHKNNKSWMESEFRVYSSANNCTFEYVSQPFLMDLEGKQGNFKNLREFVFKNIDGYFKIYSKHTPINLVRDLPQGFSALEPLVDLPIGINITRFQTLLALHRSYLTPGDSSSGWTAGAAAYYVGYLQPRTFLLKYNENGTITDAVDCALDPLSETKCTLKSFTVEKGIYQTSNFRVQPTESIVRFPNITNLCPFGEVFNATRFASVYAWNRKRISNCVADYSVLYNSASFSTFKCYGVSPTKLNDLCFTNVYADSFVIRGDEVRQIAPGQTGKIADYNYKLPDDFTGCVIAWNSNNLDSKVGGNYNYLYRLFRKSNLKPFERDISTEIYQAGSTPCNGVEGFNCYFPLQSYGFQPTNGVGYQPYRVVVLSFELLHAPATVCGPKKSTNLVKNKCVNFNFNGLTGTGVLTESNKKFLPFQQFGRDIADTTDAVRDPQTLEILDITPCSFGGVSVITPGTNTSNQVAVLYQDVNCTEVPVAIHADQLTPTWRVYSTGSNVFQTRAGCLIGAEHVNNSYECDIPIGAGICASYQTQTNSPRRARSVASQSIIAYTMSLGAENSVAYSNNSIAIPTNFTISVTTEILPVSMTKTSVDCTMYICGDSTECSNLLLQYGSFCTQLNRALTGIAVEQDKNTQEVFAQVKQIYKTPPIKDFGGFNFSQILPDPSKPSKRSFIEDLLFNKVTLADAGFIKQYGDCLGDIAARDLICAQKFNGLTVLPPLLTDEMIAQYCSALLAGTITSGWTFGAGAALQIPFAMQMAYRFNGIGVTQNVLYENQKLIANQFNSAIGKIQDSLSSTASALGKLQDVVNQNAQALNTLVKQLSSNFGAISSVLNDILSRLDKVEAEVQIDRLITGRLQSLQTYVTQQLIRAAEIRASANLAATKMSECVLGQSKRVDFCGKGYHLMSFPQCAPHGVVFLHVTYVPAQEKNFTTAPAICHDGKAHFPREGVFVSNGTHWFVTQRNFYEPQIITTDNTFVSGNCDVLIGIVNNTVYDPLQPELDSGGGGSDIIKLLNEQVNKEMQSSNLYMSMSSWCYTHSLDGAGLFLFDHAAEEYEHAKKLIIFLNENNVPVQLTSISAPEHKFEGLTQIFQKAYEHEQHISESINNIVDHAIKSKDHATFNFLQWYVAEQHEEEVLFKDILDKIELIGNENHGLYLADQYVKGIAKSRKS

SEQ ID NO: 9592 - protein, 1315 aa, Artificial Sequence
  SARS-CoV-2/Shenzhen/SZTH-004/2020__EPI_ISL_406595 spike protein (1-1147)(T874C_S1055C) Ferritin construct
MFVFLVLLPLVSSQCVNLTTRTQLPPAYTNSFTRGVYYPDKVFRSSVLHSTQDLFLPFFSNVTWFHAIHVSGTNGTKRFDNPVLPFNDGVYFASTEKSNIIRGWIFGTTLDSKTQSLLIVNNATNVVIKVCEFQFCNDPFLGVYYHKNNKSWMESEFRVYSSANNCTFEYVSQPFLMDLEGKQGNFKNLREFVFKNIDGYFKIYSKHTPINLVRDLPQGFSALEPLVDLPIGINITRFQTLLALHRSYLTPGDSSSGWTAGAAAYYVGYLQPRTFLLKYNENGTITDAVDCALDPLSETKCTLKSFTVEKGIYQTSNFRVQPTESIVRFPNITNLCPFGEVFNATRFASVYAWDRKRISNCVAYYSVLYNSASFSTFKCYGVSPTKLNDLCFTNVYADSFVIRGDEVRQIAPGQTGKIADYNYKLPDDFTGCVIAWNSNNLDSKVGGNYNYLYRLFRKSNLKPFERDISTEIYQAGSTPCNGVEGFNCYFPLQSYGFQPTNGVGYQPYRVVVLSFELLHAPATVCGPKKSTNLVKNKCVNFNFNGLTGTGVLTESNKKFLPFQQFGRDIADTTDAVRDPQTLEILDITPCSFGGVSVITPGTNTSNQVAVLYQDVNCTEVPVAIHADQLTPTWRVYSTGSNVFQTRAGCLIGAEHVNNSYECDIPIGAGICASYQTQTNSPRRARSVASQSIIAYTMSLGAENSVAYSNNSIAIPTNFTISVTTEILPVSMTKTSVDCTMYICGDSTECSNLLLQYGSFCTQLNRALTGIAVEQDKNTQEVFAQVKQIYKTPPIKDFGGFNFSQILPDPSKPSKRSFIEDLLFNKVTLADAGFIKQYGDCLGDIAARDLICAQKFNGLTVLPPLLTDEMIAQYCSALLAGTITSGWTFGAGAALQIPFAMQMAYRFNGIGVTQNVLYENQKLIANQFNSAIGKIQDSLSSTASALGKLQDVVNQNAQALNTLVKQLSSNFGAISSVLNDILSRLDKVEAEVQIDRLITGRLQSLQTYVTQQLIRAAEIRASANLAATKMSECVLGQSKRVDFCGKGYHLMSFPQCAPHGVVFLHVTYVPAQEKNFTTAPAICHDGKAHFPREGVFVSNGTHWFVTQRNFYEPQIITTDNTFVSGNCDVVIGIVNNTVYDPLQPELDSGGGGSDIIKLLNEQVNKEMQSSNLYMSMSSWCYTHSLDGAGLFLFDHAAEEYEHAKKLIIFLNENNVPVQLTSISAPEHKFEGLTQIFQKAYEHEQHISESINNIVDHAIKSKDHATFNFLQWYVAEQHEEEVLFKDILDKIELIGNENHGLYLADQYVKGIAKSRKS

SEQ ID NO: 9593 - protein, 1315 aa, Artificial Sequence
  SARS-CoV-2/France/IDF0372/2020__EPI_ISL_406596 spike protein (1-1147)(T874C_S1055C) Ferritin construct
MFVFLVLLPLVSSQCVNLTTRTQLPPAYTNSFTRGVYYPDKVFRSSVLHSTQDLFLPFFSNVTWFHAIHVSGTNGTKRFDNPVLPFNDGVYFASTEKSNIIRGWIFGTTLDSKTQSLLIVNNATNVVIKVCEFQFCNDPFLGVYYHKNNKSWMESEFRVYSSANNCTFEYVSQPFLMDLEGKQGNFKNLREFVFKNIDGYFKIYSKHTPINLVRDLPQGFSALEPLVDLPIGINITRFQTLLALHRSYLTPGDSSSGWTAGAAAYYVGYLQPRTFLLKYNENGTITDAVDCALDPLSETKCTLKSFTVEKGIYQTSNFRVQPTESIVRFPNITNLCPFGEVFNATRFASVYAWNRKRISNCVADYSFLYNSASFSTFKCYGVSPTKLNDLCFTNVYADSFVIRGDEVRQIAPGQTGKIADYNYKLPDDFTGCVIAWNSNNLDSKVGGNYNYLYRLFRKSNLKPFERDISTEIYQAGSTPCNGVEGFNCYFPLQSYGFQPTNGVGYQPYRVVVLSFELLHAPATVCGPKKSTNLVKNKCVNFNFNGLTGTGVLTESNKKFLPFQQFGRDIADTTDAVRDPQTLEILDITPCSFGGVSVITPGTNTSNQVAVLYQDVNCTEVPVAIHADQLTPTWRVYSTGSNVFQTRAGCLIGAEHVNNSYECDIPIGAGICASYQTQTNSPRRARSVASQSIIAYTMSLGAENSVAYSNNSIAIPTNFTISVTTEILPVSMTKTSVDCTMYICGDSTECSNLLLQYGSFCTQLNRALTGIAVEQDKNTQEVFAQVKQIYKTPPIKDFGGFNFSQILPDPSKPSKRSFIEDLLFNKVTLADAGFIKQYGDCLGDIAARDLICAQKFNGLTVLPPLLTDEMIAQYCSALLAGTITSGWTFGAGAALQIPFAMQMAYRFNGIGVTQNVLYENQKLIANQFNSAIGKIQDSLSSTASALGKLQDVVNQNAQALNTLVKQLSSNFGAISSVLNDILSRLDKVEAEVQIDRLITGRLQSLQTYVTQQLIRAAEIRASANLAATKMSECVLGQSKRVDFCGKGYHLMSFPQCAPHGVVFLHVTYVPAQEKNFTTAPAICHDGKAHFPREGVFVSNGTHWFVTQRNFYEPQIITTDNTFVSGNCDVVIGIVNNTVYDPLQPELDSGGGGSDIIKLLNEQVNKEMQSSNLYMSMSSWCYTHSLDGAGLFLFDHAAEEYEHAKKLIIFLNENNVPVQLTSISAPEHKFEGLTQIFQKAYEHEQHISESINNIVDHAIKSKDHATFNFLQWYVAEQHEEEVLFKDILDKIELIGNENHGLYLADQYVKGIAKSRKS

SEQ ID NO: 9594 - protein, 1315 aa, Artificial Sequence
  SARS-CoV-2/Australia/VIC01/2020__EPI_ISL_406844 spike protein (1-1147)(T874C_S1055C) Ferritin construct
MFVFLVLLPLVSSQCVNLTTRTQLPPAYTNSFTRGVYYPDKVFRSSVLHSTQDLFLPFFSNVTWFHAIHVSGTNGTKRFDNPVLPFNDGVYFASTEKSNIIRGWIFGTTLDSKTQSLLIVNNATNVVIKVCEFQFCNDPFLGVYYHKNNKSWMESEFRVYSSANNCTFEYVSQPFLMDLEGKQGNFKNLREFVFKNIDGYFKIYSKHTPINLVRDLPQGFSALEPLVDLPIGINITRFQTLLALHRRYLTPGDSSSGWTAGAAAYYVGYLQPRTFLLKYNENGTITDAVDCALDPLSETKCTLKSFTVEKGIYQTSNFRVQPTESIVRFPNITNLCPFGEVFNATRFASVYAWNRKRISNCVADYSVLYNSASFSTFKCYGVSPTKLNDLCFTNVYADSFVIRGDEVRQIAPGQTGKIADYNYKLPDDFTGCVIAWNSNNLDSKVGGNYNYLYRLFRKSNLKPFERDISTEIYQAGSTPCNGVEGFNCYFPLQSYGFQPTNGVGYQPYRVVVLSFELLHAPATVCGPKKSTNLVKNKCVNFNFNGLTGTGVLTESNKKFLPFQQFGRDIADTTDAVRDPQTLEILDITPCSFGGVSVITPGTNTSNQVAVLYQDVNCTEVPVAIHADQLTPTWRVYSTGSNVFQTRAGCLIGAEHVNNSYECDIPIGAGICASYQTQTNSPRRARSVASQSIIAYTMSLGAENSVAYSNNSIAIPTNFTISVTTEILPVSMTKTSVDCTMYICGDSTECSNLLLQYGSFCTQLNRALTGIAVEQDKNTQEVFAQVKQIYKTPPIKDFGGFNFSQILPDPSKPSKRSFIEDLLFNKVTLADAGFIKQYGDCLGDIAARDLICAQKFNGLTVLPPLLTDEMIAQYCSALLAGTITSGWTFGAGAALQIPFAMQMAYRFNGIGVTQNVLYENQKLIANQFNSAIGKIQDSLSSTASALGKLQDVVNQNAQALNTLVKQLSSNFGAISSVLNDILSRLDKVEAEVQIDRLITGRLQSLQTYVTQQLIRAAEIRASANLAATKMSECVLGQSKRVDFCGKGYHLMSFPQCAPHGVVFLHVTYVPAQEKNFTTAPAICHDGKAHFPREGVFVSNGTHWFVTQRNFYEPQIITTDNTFVSGNCDVVIGIVNNTVYDPLQPELDSGGGGSDIIKLLNEQVNKEMQSSNLYMSMSSWCYTHSLDGAGLFLFDHAAEEYEHAKKLIIFLNENNVPVQLTSISAPEHKFEGLTQIFQKAYEHEQHISESINNIVDHAIKSKDHATFNFLQWYVAEQHEEEVLFKDILDKIELIGNENHGLYLADQYVKGIAKSRKS

SEQ ID NO: 9595 - protein, 1315 aa, Artificial Sequence
  SARS-CoV-2/Germany/BavPat1/2020__EPI_ISL_406862 spike protein (1-1147)(T874C_S1055C) Ferritin construct
MFVFLVLLPLVSSQCVNLTTRTQLPPAYTNSFTRGVYYPDKVFRSSVLHSTQDLFLPFFSNVTWFHAIHVSGTNGTKRFDNPVLPFNDGVYFASTEKSNIIRGWIFGTTLDSKTQSLLIVNNATNVVIKVCEFQFCNDPFLGVYYHKNNKSWMESEFRVYSSANNCTFEYVSQPFLMDLEGKQGNFKNLREFVFKNIDGYFKIYSKHTPINLVRDLPQGFSALEPLVDLPIGINITRFQTLLALHRSYLTPGDSSSGWTAGAAAYYVGYLQPRTFLLKYNENGTITDAVDCALDPLSETKCTLKSFTVEKGIYQTSNFRVQPTESIVRFPNITNLCPFGEVFNATRFASVYAWNRKRISNCVADYSVLYNSASFSTFKCYGVSPTKLNDLCFTNVYADSFVIRGDEVRQIAPGQTGKIADYNYKLPDDFTGCVIAWNSNNLDSKVGGNYNYLYRLFRKSNLKPFERDISTEIYQAGSTPCNGVEGFNCYFPLQSYGFQPTNGVGYQPYRVVVLSFELLHAPATVCGPKKSTNLVKNKCVNFNFNGLTGTGVLTESNKKFLPFQQFGRDIADTTDAVRDPQTLEILDITPCSFGGVSVITPGTNTSNQVAVLYQGVNCTEVPVAIHADQLTPTWRVYSTGSNVFQTRAGCLIGAEHVNNSYECDIPIGAGICASYQTQTNSPRRARSVASQSIIAYTMSLGAENSVAYSNNSIAIPTNFTISVTTEILPVSMTKTSVDCTMYICGDSTECSNLLLQYGSFCTQLNRALTGIAVEQDKNTQEVFAQVKQIYKTPPIKDFGGFNFSQILPDPSKPSKRSFIEDLLFNKVTLADAGFIKQYGDCLGDIAARDLICAQKFNGLTVLPPLLTDEMIAQYCSALLAGTITSGWTFGAGAALQIPFAMQMAYRFNGIGVTQNVLYENQKLIANQFNSAIGKIQDSLSSTASALGKLQDVVNQNAQALNTLVKQLSSNFGAISSVLNDILSRLDKVEAEVQIDRLITGRLQSLQTYVTQQLIRAAEIRASANLAATKMSECVLGQSKRVDFCGKGYHLMSFPQCAPHGVVFLHVTYVPAQEKNFTTAPAICHDGKAHFPREGVFVSNGTHWFVTQRNFYEPQIITTDNTFVSGNCDVVIGIVNNTVYDPLQPELDSGGGGSDIIKLLNEQVNKEMQSSNLYMSMSSWCYTHSLDGAGLFLFDHAAEEYEHAKKLIIFLNENNVPVQLTSISAPEHKFEGLTQIFQKAYEHEQHISESINNIVDHAIKSKDHATFNFLQWYVAEQHEEEVLFKDILDKIELIGNENHGLYLADQYVKGIAKSRKS

SEQ ID NO: 9596 - protein, 1315 aa, Artificial Sequence
  SARS-CoV-2/Wuhan/HBCDC-HB-02/2020__EPI_ISL_412978 spike protein (1-1147)(T874C_S1055C) Ferritin construct
MFVFLVLLPLVSSQCVNLTTRTQLPPAYTNSFTRGVYYPDKVFRSSVLHSTQDLFLPFFSNVTWFHAIHVSGTNGTKRFDNPVLPFNDGVYFASTEKSNIIRGWIFGTTLDSKTQSLLIVNNATNVVIKVCEFQFCNDPFLGVYYHKNNKSWMESEFRVYSSANNCTFEYVSQPFLMDLEGKQGNFKNLREFVFKNIDGYFKIYSKHTPINLVRDLPQGFSALEPLVDLPIGINITRFQTLLALHRSYLTPGDSSSGWTAGAAAYYVGYLQPRTFLLKYNENGTITDAVDCALDPLSETKCTLKSFTVEKGIYQTSNFRVQPTESIVRFPNITNLCPFGEVFNATRFASVYAWNRKRISNCVADYSVLYNSASFSTFKCYGVSPTKLNDLCFTNVYADSFVIRGDEVRQIAPGQTGKIADYNYKLPDDFTGCVIAWNSNNLDSKVGGNYNYLYRLFRKSNLKPFERDISTEIYQAGSTPCNGVEGFNCYFPLQSYGFQPTNGVGYQPYRVVVLSFELLHAPATVCGPKKSTNLVKNKCVNFNFNGLTGTGVLTESNKKFLPFQQFGRDIADTTDAVRDPQTLEILDITPCSFGGVSVITPGTNTSNQVAVLYQDVNCTEVPVAIHADQLTPTWRVYSTGSNVFQTRAGCLIGAEHVNNSYECDIPIGAGICASYQTQTNSPRRARSVASQSIIAYTMSLGAENSVAYSNNSIAIPTNFTISVTTEILPVSMTKTSVDCTMYICGDSTECSNFLLQYGSFCTQLNRALTGIAVEQDKNTQEVFAQVKQIYKTPPIKDFGGFNFSQILPDPSKPSKRSFIEDLLFNKVTLADAGFIKQYGDCLGDIAARDLICAQKFNGLTVLPPLLTDEMIAQYCSALLAGTITSGWTFGAGAALQIPFAMQMAYRFNGIGVTQNVLYENQKLIANQFNSAIGKIQDSLSSTASALGKLQDVVNQNAQALNTLVKQLSSNFGAISSVLNDILSRLDKVEAEVQIDRLITGRLQSLQTYVTQQLIRAAEIRASANLAATKMSECVLGQSKRVDFCGKGYHLMSFPQCAPHGVVFLHVTYVPAQEKNFTTAPAICHDGKAHFPREGVFVSNGTHWFVTQRNFYEPQIITTDNTFVSGNCDVVIGIVNNTVYDPLQPELDSGGGGSDIIKLLNEQVNKEMQSSNLYMSMSSWCYTHSLDGAGLFLFDHAAEEYEHAKKLIIFLNENNVPVQLTSISAPEHKFEGLTQIFQKAYEHEQHISESINNIVDHAIKSKDHATFNFLQWYVAEQHEEEVLFKDILDKIELIGNENHGLYLADQYVKGIAKSRKS

SEQ ID NO: 9597 - protein, 1315 aa, Artificial Sequence
  SARS-CoV-2/Australia/QLD02/2020__EPI_ISL_407896 spike protein (1-1147)(T874C_S1055C) Ferritin construct
MFVFLVLLPLVSSQCVNLTTRTQLPPAYTNSFTRGVYYPDKVFRSSVLHSTQDLFLPFFSNVTWFHAIHVSGTNGTKRFDNPVLPFNDGVYFASTEKSNIIRGWIFGTTLDSKTQSLLIVNNATNVVIKVCEFQFCNDPFLGVYYHKNNKSWMESEFRVYSSANNCTFEYVSQPFLMDLEGKQGNFKNLREFVFKNIDGYFKIYSKHTPINLVRDLPQGFSALEPLVDLPIGINITRFQTLLALHRSYLTPGDSSSGWTAGAAAYYVGYLQPRTFLLKYNENGTITDAVDCALDPLSETKCTLKSFTVEKGIYQTSNFRVQPTESIVRFPNITNLCPFGEVFNATRFASVYAWNRKRISNCVADYSVLYNSASFSTFKCYGVSPTKLNDLCFTNVYADSFVIRGDEVRQIAPGQTGKIADYNYKLPDDFTGCVIAWNSNNLDSKVGGNYNYLYRLFRKSNLKPFERDISTEIYQAGSTPCNGVEGFNCYFPLQSYGFQPTNGVGYQPYRVVVLSFELLHAPATVCGPKKSTNLVKNKCVNFNFNGLTGTGVLTESNKKFLPFQQFGRDIADTTDAVRDPQTLEILDITPCSFGGVSVITPGTNTSNQVAVLYQDVNCTEVPVAIHADQLTPTWRVYSTGSNVFQTRAGCLIGAEHVNNSYECDIPIGAGICASYQTQTNSPRRARSVASQSIIAYTMSLGAENSVAYSNNSIAIPTNFTISVTTEILPVSMTKTSVDCTMYICGDSTECSNLLLQYGSFCTQLNRALTGIAVEQDKNTQEVFAQVKQIYKTPPIKDFGGFNFSQILPDPSKPSKRSFIEDLLFNKVTLADAGFIKQYGDCLGDIAARDLICAQKFNGLTVLPPLLTDEMIAQYCSALLAGTITSGWTFGAGAALQIPFAMQMAYRFNGIGVTQNVLYENQKLIANQFNSAIGKIQDSLSSTASALGKLQDVVNQNAQALNTLVKQLSSNFGAISSVLNDILSRLDKVEAEVQIDRLITGRLQSLQTYVTQQLIRAAEIRASANLAATKMSECVLGQSKRVDFCGKGYHLMSFPQCAPHGVVFLHVTYVPAQEKNFTTAPAICHDGKAHFPREGVFVSNGTHWFVTQRNFYEPQIITTDNTFVSGNCDVVIGIVNNTVYDPLQLELDSGGGGSDIIKLLNEQVNKEMQSSNLYMSMSSWCYTHSLDGAGLFLFDHAAEEYEHAKKLIIFLNENNVPVQLTSISAPEHKFEGLTQIFQKAYEHEQHISESINNIVDHAIKSKDHATFNFLQWYVAEQHEEEVLFKDILDKIELIGNENHGLYLADQYVKGIAKSRKS

SEQ ID NO: 9598 - protein, 1315 aa, Artificial Sequence
  SARS-CoV-2/India/1-31/2020__EPI_ISL_413523 spike protein (1-1147)(T874C_S1055C) Ferritin construct
MFVFLVLLPLVSSQCVNLTTRTQLPPAYTNSFTRGVYYPDKVFRSSVLHSTQDLFLPFFSNVTWFHAIHVSGTNGTKRFDNPVLPFNDGVYFASTEKSNIIRGWIFGTTLDSKTQSLLIVNNATNVVIKVCEFQFCNDPFLGVYYHKNNKSWMESEFRVYSSANNCTFEYVSQPFLMDLEGKQGNFKNLREFVFKNIDGYFKIYSKHTPINLVRDLPQGFSALEPLVDLPIGINITRFQTLLALHRSYLTPGDSSSGWTAGAAAYYVGYLQPRTFLLKYNENGTITDAVDCALDPLSETKCTLKSFTVEKGIYQTSNFRVQPTESIVRFPNITNLCPFGEVFNATRFASVYAWNRKRISNCVADYSVLYNSASFSTFKCYGVSPTKLNDLCFTNVYADSFVIRGDEVRQIAPGQTGKIADYNYKLPDDFTGCVIAWNSNNLDSKVGGNYNYLYRLFRKSNLKPFERDISTEIYQAGSTPCNGVEGFNCYFPLQSYGFQPTNGVGYQPYRVVVLSFELLHAPATVCGPKKSTNLVKNKCVNFNFNGLTGTGVLTESNKKFLPFQQFGRDIADTTDAVRDPQTLEILDITPCSFGGVSVITPGTNTSNQVAVLYQDVNCTEVPVAIHADQLTPTWRVYSTGSNVFQTRAGCLIGAEHVNNSYECDIPIGAGICASYQTQTNSPRRARSVASQSIIAYTMSLGAENSVAYSNNSIAIPTNFTISVTTEILPVSMTKTSVDCTMYICGDSTECSNLLLQYGSFCTQLNRALTGIAVEQDKNTQEVFAQVKQIYKTPPIKDFGGFNFSQILPDPSKPSKRSFIEDLLFNKVTLADAGFIKQYGDCLGDIAARDLICAQKFNGLTVLPPLLTDEMIAQYCSALLAGTITSGWTFGAGAALQIPFAMQMAYRFNGIGVTQNVLYENQKLIANQFNSVIGKIQDSLSSTASALGKLQDVVNQNAQALNTLVKQLSSNFGAISSVLNDILSRLDKVEAEVQIDRLITGRLQSLQTYVTQQLIRAAEIRASANLAATKMSECVLGQSKRVDFCGKGYHLMSFPQCAPHGVVFLHVTYVPAQEKNFTTAPAICHDGKAHFPREGVFVSNGTHWFVTQRNFYEPQIITTDNTFVSGNCDVVIGIVNNTVYDPLQPELDSGGGGSDIIKLLNEQVNKEMQSSNLYMSMSSWCYTHSLDGAGLFLFDHAAEEYEHAKKLIIFLNENNVPVQLTSISAPEHKFEGLTQIFQKAYEHEQHISESINNIVDHAIKSKDHATFNFLQWYVAEQHEEEVLFKDILDKIELIGNENHGLYLADQYVKGIAKSRKS

SEQ ID NO: 9599 - protein, 1315 aa, Artificial Sequence
  SARS-CoV-2/Guangdong/GD2020087-P0008/2020__EPI_ISL_413863 spike protein (1-1147)(T874C_S1055C) Ferritin construct
MFVFLVLLPLVSSQCVNLTTRTQLPPAYTNSFTRGVYYPDKVFRSSVLHSTQDLFLPFFSNVTWFHAIHVSGTNGTKRFDNPVLPFNDGVYFASTEKSNIIRGWIFGTTLDSKTQSLLIVNNATNVVIKVCEFQFCNDPFLGVYYHKNNKSWMESEFRVYSSANNCTFEYVSQPFLMDLEGKQGNFKNLREFVFKNIDGYFKIYSKHTPINLVRDLPQGFSALEPLVDLPIGINITRFQTLLALHRSYLTPGDSSSGWTAGAAAYYVGYLQPRTFLLKYNENGTITDAVDCALDPLSETKCTLKSFTVEKGIYQTSNFRVQPTESIVRFPNITNLCPFGEVFNATRFASVYAWNRKRISNCVADYSVLYNSASFSTFKCYGVSPTKLNDLCFTNVYADSFVIRGDEVREIAPGQTGKIADYNYKLPDDFTGCVIAWNSNNLDSKVGGNYNYLYRLFRKSNLKPFERDISTEIYQAGSTPCNGVEGFNCYFPLQSYGFQPTNGVGYQPYRVVVLSFELLHAPATVCGPKKSTNLVKNKCVNFNFNGLTGTGVLTESNKKFLPFQQFGRDIADTTDAVRDPQTLEILDITPCSFGGVSVITPGTNTSNQVAVLYQDVNCTEVPVAIHADQLTPTWRVYSTGSNVFQTRAGCLIGAEHVNNSYECDIPIGAGICASYQTQTNSPRRARSVASQSIIAYTMSLGAENSVAYSNNSIAIPTNFTISVTTEILPVSMTKTSVDCTMYICGDSTECSNLLLQYGSFCTQLNRALTGIAVEQDKNTQEVFAQVKQIYKTPPIKDFGGFNFSQILPDPSKPSKRSFIEDLLFNKVTLADAGFIKQYGDCLGDIAARDLICAQKFNGLTVLPPLLTDEMIAQYCSALLAGTITSGWTFGAGAALQIPFAMQMAYRFNGIGVTQNVLYENQKLIANQFNSAIGKIQDSLSSTASALGKLQDVVNQNAQALNTLVKQLSSNFGAISSVLNDILSRLDKVEAEVQIDRLITGRLQSLQTYVTQQLIRAAEIRASANLAATKMSECVLGQSKRVDFCGKGYHLMSFPQCAPHGVVFLHVTYVPAQEKNFTTAPAICHDGKAHFPREGVFVSNGTHWFVTQRNFYEPQIITTDNTFVSGNCDVVIGIVNNTVYDPLQPELDSGGGGSDIIKLLNEQVNKEMQSSNLYMSMSSWCYTHSLDGAGLFLFDHAAEEYEHAKKLIIFLNENNVPVQLTSISAPEHKFEGLTQIFQKAYEHEQHISESINNIVDHAIKSKDHATFNFLQWYVAEQHEEEVLFKDILDKIELIGNENHGLYLADQYVKGIAKSRKS

SEQ ID NO: 9600 - protein, 1315 aa, Artificial Sequence
  SARS-CoV-2/Sweden/01/2020__EPI_ISL_411951 spike protein (1-1147)(T874C_S1055C) Ferritin construct
MFVFLVLLPLVSSQCVNLTTRTQLPPAYTNSFTRGVYYPDKVFRSSVLHSTQDLFLPFFSNVTWFHAIHVSGTNGTKRFDNPVLPFNDGVYFASTEKSNIIRGWIFGTTLDSKTQSLLIVNNATNVVIKVCEFQFCNDPFLGVYYHKNNKSWMESEFRVYSSANNCTFEYVSQPFLMDLEGKQGNFKNLREFVFKNIDGYFKIYSKHTPINLVRDLPQGFSALEPLVDLPIGINITRFQTLLALHRSYLTPGDSSSGWTAGAAAYYVGYLQPRTFLLKYNENGTITDAVDCALDPLSETKCTLKSFTVEKGIYQTSNFRVQPTESIVRFPNITNLCPFGEVFNATRFASVYAWNRKRISNCVADYSVLYNSASFSTFKCYGVSPTKLNDLCFTNVYADSFVIRGDEVRQIAPGQTGKIADYNYKLPDDFTGCVIAWNSNNLDSKVGGNYNYLYRLFRKSNLKPFERDISTEIYQAGSTPCNGVEGFNCYFPLQSYGFQPTNGVGYQPYRVVVLSFELLHAPATVCGPKKSTNLVKNKCVNFNFNGLTGTGVLTESNKKFLPFQQFGRDIADTTDAVRDPQTLEILDITPCSFGGVSVITPGTNTSNQVAVLYQDVNCTEVPVAIHADQLTPTWRVYSTGSNVFQTRAGCLIGAEHVNNSYECDIPIGAGICASYQTQTNSPRRARSVASQSIIAYTMSLGAENSVAYSNNSIAIPTNFTISVTTEILPVSMTKTSVDCTMYICGDSTECSNLLLQYGSFCTQLNRALTGIAVEQDKNTQEVFAQVKQIYKTPPIKDCGGFNFSQILPDPSKPSKRSFIEDLLFNKVTLADAGFIKQYGDCLGDIAARDLICAQKFNGLTVLPPLLTDEMIAQYCSALLAGTITSGWTFGAGAALQIPFAMQMAYRFNGIGVTQNVLYENQKLIANQFNSAIGKIQDSLSSTASALGKLQDVVNQNAQALNTLVKQLSSNFGAISSVLNDILSRLDKVEAEVQIDRLITGRLQSLQTYVTQQLIRAAEIRASANLAATKMSECVLGQSKRVDFCGKGYHLMSFPQCAPHGVVFLHVTYVPAQEKNFTTAPAICHDGKAHFPREGVFVSNGTHWFVTQRNFYEPQIITTDNTFVSGNCDVVIGIVNNTVYDPLQPELDSGGGGSDIIKLLNEQVNKEMQSSNLYMSMSSWCYTHSLDGAGLFLFDHAAEEYEHAKKLIIFLNENNVPVQLTSISAPEHKFEGLTQIFQKAYEHEQHISESINNIVDHAIKSKDHATFNFLQWYVAEQHEEEVLFKDILDKIELIGNENHGLYLADQYVKGIAKSRKS

SEQ ID NO: 9601 - protein, 1315 aa, Artificial Sequence
  SARS-CoV-2/Tianmen/HBCDC-HB-07/2020__EPI_ISL_412983 spike protein (1-1147)(T874C_S1055C) Ferritin construct
MFVFLVLLPLVSSQCVNLTTRTQLPPAYTNSFTRGVYYPDKVFRSSVLHSTQDLFLPFFSNVTWFHAIHVSGTNGTKRFDNPVLPFNDGVYFASTEKSNIIRGWIFGTTLDSKTQSLLIVNNATNVVIKVCEFQFCNDPFLGVYYHKNNKSWMESEFRVYSSANNCTFEYVSQPFLMDLEGKQGNFKNLREFVFKNIDGYFKIYSKHTPINLVRDLPQGFSALEPLVDLPIGINITRFQTLLALHRSYLTPGDSSSGWTAGAAAYYVGYLQPRTFLLKYNENGTITDAVDCALDPLSETKCTLKSFTVEKGIYQTSNFRVQPTESIVRFPNITNLCPFGEVFNATRFASVYAWNRKRISNCVADYSVLYNSASFSTFKCYGVSPTKLNDLCFTNVYADSFVIRGDEVRQIAPGQTGKIADYNYKLPDDFTGCVIAWNSNNLDSKVGGNYNYLYRLFRKSNLKPFERDISTEIYQAGSTPCNGVEGFNCYFPLQSYGFQPTNGVGYQPYRVVVLSFELLHAPATVCGPKKSTNLVKNKCVNFNFNGLTGTGVLTESNKKFLPFQQFGRDIADTTDAVRDPQTLEILDITPCSFGGVSVITPGTNTSNQVAVLYQDLNCTEVPVAIHADQLTPTWRVYSTGSNVFQTRAGCLIGAEHVNNSYECDIPIGAGICASYQTQTNSPRRARSVASQSIIAYTMSLGAENSVAYSNNSIAIPTNFTISVTTEILPVSMTKTSVDCTMYICGDSTECSNLLLQYGSFCTQLNRALTGIAVEQDKNTQEVFAQVKQIYKTPPIKDFGGFNFSQILPDPSKPSKRSFIEDLLFNKVTLADAGFIKQYGDCLGDIAARDLICAQKFNGLTVLPPLLTDEMIAQYCSALLAGTITSGWTFGAGAALQIPFAMQMAYRFNGIGVTQNVLYENQKLIANQFNSAIGKIQDSLSSTASALGKLQDVVNQNAQALNTLVKQLSSNFGAISSVLNDILSRLDKVEAEVQIDRLITGRLQSLQTYVTQQLIRAAEIRASANLAATKMSECVLGQSKRVDFCGKGYHLMSFPQCAPHGVVFLHVTYVPAQEKNFTTAPAICHDGKAHFPREGVFVSNGTHWFVTQRNFYEPQIITTDNTFVSGNCDVVIGIVNNTVYDPLQPELDSGGGGSDIIKLLNEQVNKEMQSSNLYMSMSSWCYTHSLDGAGLFLFDHAAEEYEHAKKLIIFLNENNVPVQLTSISAPEHKFEGLTQIFQKAYEHEQHISESINNIVDHAIKSKDHATFNFLQWYVAEQHEEEVLFKDILDKIELIGNENHGLYLADQYVKGIAKSRKS

SEQ ID NO: 9602 - protein, 1315 aa, Artificial Sequence
  SARS-CoV-2/Hong Kong/case42_VM20002493/2020__EPI_ISL_414527 spike protein (1-1147)(T874C_S1055C) Ferritin construct
MFVFLVLLPLVSSQCVNLTTRTQLPPAYTNSFTRGVYYPDKVFRSSVLHSTQDLFLPFFSNVTWFHAIHVSGTNGTKRFDNPVLPFNDGVYFASTEKSNIIRGWIFGTTLDSKTQSLLIVNNATNVVIKVCEFQFCNDPFLGVYYHKNNKSWMESEFRVYSSANNCTFEYVSQPFLMDLEGKQGNFKNLREFVFKNIDGYFKIYSKHTPINLVRDLPQGFSALEPLVDLPIGINITRFQTLLALHRSYLTPGDSSSGWTAGAAAYYVGYLQPRTFLLKYNENGTITDAVDCALDPLSETKCTLKSFTVEKGIYQTSNFRVQPTESIVRFPNITNLCPFGEVFNATRFASVYAWNRKRISNCVADYSVLYNSASFSTFKCYGVSPTKLNDLCFTNVYADSFVIRGDEVRQIAPGQTGKIADYNYKLPDDFTGCVIAWNSNNLDSKVGGNYNYLYRLFRKSNLKPFERDISTEIYQAGSTPCNGVEGFNCYFPLQSYGFQPTNGVGYQPYRVVVLSFELLHAPATVCGPKKSTNLVKNKCVNFNFNGLTGTGVLTESNKKFLPFQQFGRDIADTTDAVRDPQTLEILDITPCSFGGVSVITPGTNTSNQVAVLYQDVNCTEVPVAIHADQLTPTWRVYSTGSNVFQTRAGCLIGAEHVNNSYECDIPIGAGICASYQTQTNSPRRARSVASQSIIAYTMSLGAENSVAYSNNSIAIPTNFAISVTTEILPVSMTKTSVDCTMYICGDSTECSNLLLQYGSFCTQLNRALTGIAVEQDKNTQEVFAQVKQIYKTPPIKDFGGFNFSQILPDPSKPSKRSFIEDLLFNKVTLADAGFIKQYGDCLGDIAARDLICAQKFNGLTVLPPLLTDEMIAQYCSALLAGTITSGWTFGAGAALQIPFAMQMAYRFNGIGVTQNVLYENQKLIANQFNSAIGKIQDSLSSTASALGKLQDVVNQNAQALNTLVKQLSSNFGAISSVLNDILSRLDKVEAEVQIDRLITGRLQSLQTYVTQQLIRAAEIRASANLAATKMSECVLGQSKRVDFCGKGYHLMSFPQCAPHGVVFLHVTYVPAQEKNFTTAPAICHDGKAHFPREGVFVSNGTHWFVTQRNFYEPQIITTDNTFVSGNCDVVIGIVNNTVYDPLQPELDSGGGGSDIIKLLNEQVNKEMQSSNLYMSMSSWCYTHSLDGAGLFLFDHAAEEYEHAKKLIIFLNENNVPVQLTSISAPEHKFEGLTQIFQKAYEHEQHISESINNIVDHAIKSKDHATFNFLQWYVAEQHEEEVLFKDILDKIELIGNENHGLYLADQYVKGIAKSRKS

SEQ ID NO: 9603 - protein, 1315 aa, Artificial Sequence
  SARS-CoV-2/USA/CruiseA-23/2020__EPI_ISL_414482 spike protein (1-1147)(T874C_S1055C) Ferritin construct
MFVFLVLLPLVSSQCVNLTTRTQLPPAYTNSFTRGVYYPDKVFRSSVLHSTQDLFLPFFSNVTWFHAIHVSGTNGTKRFDNPVLPFNDGVYFASTEKSNIIRGWIFGTTLDSKTQSLLIVNNATNVVIKVCEFQFCNDPFLGVYYHKNNKSWMESEFRVYSSANNCTFEYVSQPFLMDLEVKQGNFKNLREFVFKNIDGYFKIYSKHTPINLVRDLPQGFSALEPLVDLPIGINITRFQTLLALHRSYLTPGDSSSGWTAGAAAYYVGYLQPRTFLLKYNENGTITDAVDCALDPLSETKCTLKSFTVEKGIYQTSNFRVQPTESIVRFPNITNLCPFGEVFNATRFASVYAWNRKRISNCVADYSVLYNSASFSTFKCYGVSPTKLNDLCFTNVYADSFVIRGDEVRQIAPGQTGKIADYNYKLPDDFTGCVIAWNSNNLDSKVGGNYNYLYRLFRKSNLKPFERDISTEIYQAGSTPCNGVEGFNCYFPLQSYGFQPTNGVGYQPYRVVVLSFELLHAPATVCGPKKSTNLVKNKCVNFNFNGLTGTGVLTESNKKFLPFQQFGRDIADTTDAVRDPQTLEILDITPCSFGGVSVITPGTNTSNQVAVLYQDVNCTEVPVAIHADQLTPTWRVYSTGSNVFQTRAGCLIGAEHVNNSYECDIPIGAGICASYQTQTNSPRRARSVASQSIIAYTMSLGAENSVAYSNNSIAIPTNFTISVTTEILPVSMTKTSVDCTMYICGDSTECSNLLLQYGSFCTQLNRALTGIAVEQDKNTQEVFAQVKQIYKTPPIKDFGGFNFSQILPDPSKPSKRSFIEDLLFNKVTLADAGFIKQYGDCLGDIAARDLICAQKFNGLTVLPPLLTDEMIAQYCSALLAGTITSGWTFGAGAALQIPFAMQMAYRFNGIGVTQNVLYENQKLIANQFNSAIGKIQDSLSSTASALGKLQDVVNQNAQALNTLVKQLSSNFGAISSVLNDILSRLDKVEAEVQIDRLITGRLQSLQTYVTQQLIRAAEIRASANLAATKMSECVLGQSKRVDFCGKGYHLMSFPQCAPHGVVFLHVTYVPAQEKNFTTAPAICHDGKAHFPREGVFVSNGTHWFVTQRNFYEPQIITTDNTFVSGNCDVVIGIVNNTVYDPLQPELDSGGGGSDIIKLLNEQVNKEMQSSNLYMSMSSWCYTHSLDGAGLFLFDHAAEEYEHAKKLIIFLNENNVPVQLTSISAPEHKFEGLTQIFQKAYEHEQHISESINNIVDHAIKSKDHATFNFLQWYVAEQHEEEVLFKDILDKIELIGNENHGLYLADQYVKGIAKSRKS

SEQ ID NO: 9604 - protein, 1315 aa, Artificial Sequence
  SARS-CoV-2/Hong Kong/case85_VM20002868/2020__EPI_ISL_414519 spike protein (1-1147)(T874C_S1055C) Ferritin construct
MFVFLVLVPLVSSQCVNLTTRTQLPPAYTNSFTRGVYYPDKVFRSSVLHSTQDLFLPFFSNVTWFHAIHVSGTNGTKRFDNPVLPFNDGVYFASTEKSNIIRGWIFGTTLDSKTQSLLIVNNATNVVIKVCEFQFCNDPFLGVYYHKNNKSWMESEFRVYSSANNCTFEYVSQPFLMDLEGKQGNFKNLREFVFKNIDGYFKIYSKHTPINLVRDLPQGFSALEPLVDLPIGINITRFQTLLALHRSYLTPGDSSSGWTAGAAAYYVGYLQPRTFLLKYNENGTITDAVDCALDPLSETKCTLKSFTVEKGIYQTSNFRVQPTESIVRFPNITNLCPFGEVFNATRFASVYAWNRKRISNCVADYSVLYNSASFSTFKCYGVSPTKLNDLCFTNVYADSFVIRGDEVRQIAPGQTGKIADYNYKLPDDFTGCVIAWNSNNLDSKVGGNYNYLYRLFRKSNLKPFERDISTEIYQAGSTPCNGVEGFNCYFPLQSYGFQPTNGVGYQPYRVVVLSFELLHAPATVCGPKKSTNLVKNKCVNFNFNGLTGTGVLTESNKKFLPFQQFGRDIADTTDAVRDPQTLEILDITPCSFGGVSVITPGTNTSNQVAVLYQDVNCTEVPVAIHADQLTPTWRVYSTGSNVFQTRAGCLIGAEHVNNSYECDIPIGAGICASYQTQTNSPRRARSVASQSIIAYTMSLGAENSVAYSNNSIAIPTNFTISVTTEILPVSMTKTSVDCTMYICGDSTECSNLLLQYGSFCTQLNRALTGIAVEQDKNTQEVFAQVKQIYKTPPIKDFGGFNFSQILPDPSKPSKRSFIEDLLFNKVTLADAGFIKQYGDCLGDIAARDLICAQKFNGLTVLPPLLTDEMIAQYCSALLAGTITSGWTFGAGAALQIPFAMQMAYRFNGIGVTQNVLYENQKLIANQFNSAIGKIQDSLSSTASALGKLQDVVNQNAQALNTLVKQLSSNFGAISSVLNDILSRLDKVEAEVQIDRLITGRLQSLQTYVTQQLIRAAEIRASANLAATKMSECVLGQSKRVDFCGKGYHLMSFPQCAPHGVVFLHVTYVPAQEKNFTTAPAICHDGKAHFPREGVFVSNGTHWFVTQRNFYEPQIITTDNTFVSGNCDVVIGIVNNTVYDPLQPELDSGGGGSDIIKLLNEQVNKEMQSSNLYMSMSSWCYTHSLDGAGLFLFDHAAEEYEHAKKLIIFLNENNVPVQLTSISAPEHKFEGLTQIFQKAYEHEQHISESINNIVDHAIKSKDHATFNFLQWYVAEQHEEEVLFKDILDKIELIGNENHGLYLADQYVKGIAKSRKS

SEQ ID NO: 9605 - protein, 1315 aa, Artificial Sequence; identical to SEQ ID NO: 9595
  SARS-CoV-2/England/200990660/2020__EPI_ISL_414523 spike protein (1-1147)(T874C_S1055C) Ferritin construct

SEQ ID NO: 9606 - protein, 1315 aa, Artificial Sequence
  SARS-CoV-2/Australia/NSW09/2020__EPI_ISL_413595 spike protein (1-1147)(T874C_S1055C) Ferritin construct
MFVFLVLLPLVSSQCVNLTTRTQLPPAYTNSFTRGVYYPDKVFRSSVLHSTQDLFLPFFSNVTWFHAIHVSGTNGTKRFDNPVLPFNDGVYFASTEKSNIIRGWIFGTTLDSKTQSLLIVNNATNVVIKVCEFQFCNDPFLGVYYHKNNKSWMESEFRVYSSANNCTFEYVSQPFLMDLEGKQGNFKNLREFVFKNIDGYFKIYSKHTPINLVRDLPQGFSALEPLVDLPIGINITRFQTLLALHRSYLTPGDSSSGWTAGAAAYYVGYLQPRTFLLKYNENGTITDAVDCALDPLSETKCTLKSFTVEKGIYQTSNFRVQPTESIVRFPNITNLCPFGEVFNATRFASVYAWNRKRISNCVADYSVLYNSASFSTFKCYGVSPTKLNDLCFTNVYADSFVIRGDEVRQIAPGQTGKIADYNYKLPDDFTGCVIAWNSNNLDSKVGGNYNYLYRLFRKSNLKPFERDISTEIYQAGSTPCNGVEGFNCYFPLQSYGFQPTNGVGYQPYRVVVLSFELLHAPATVCGPKKSTNLVKNKCVNFNFNGLTGTGVLTESNKKFLPFQQFGRDIADTTDAVRDPQTLEILDITPCSFGGVSVITPGTNTSNQVAVLYQDVNCTEVPVAIHADQLTPTWRVYSTGSNVFQTRAGCLIGAEHVNNSYECDIPIGAGICASYQTQTNSPRRARSVASQSIIAYTMSLGAENSVAYSNNSIAIPTNFTISVTTEILPVSMTKTSVDCTMYICGDSTECSNLLLQYGSFCTQLNRALTGIAVEQDKNTQEVFAQVKQIYKTPPIKDFGGFNFSQILPDPSKPSKRSFIEDLLFNKVTLADAGFIKQYGDCLGDIAARDLICAQKFNGLTVLPPLLTDEMIAQYCSALLAGTITSGWTFGAGAALQIPFAMQMAYRFNGIGVTQNVLYENQKLIANQFNSAIGKIQDSLSFTASALGKLQDVVNQNAQALNTLVKQLSSNFGAISSVLNDILSRLDKVEAEVQIDRLITGRLQSLQTYVTQQLIRAAEIRASANLAATKMSECVLGQSKRVDFCGKGYHLMSFPQCAPHGVVFLHVTYVPAQEKNFTTAPAICHDGKAHFPREGVFVSNGTHWFVTQRNFYEPQIITTDNTFVSGNCDVVIGIVNNTVYDPLQPELDSGGGGSDIIKLLNEQVNKEMQSSNLYMSMSSWCYTHSLDGAGLFLFDHAAEEYEHAKKLIIFLNENNVPVQLTSISAPEHKFEGLTQIFQKAYEHEQHISESINNIVDHAIKSKDHATFNFLQWYVAEQHEEEVLFKDILDKIELIGNENHGLYLADQYVKGIAKSRKS

SEQ ID NO: 9607 - protein, 1315 aa, Artificial Sequence; identical to SEQ ID NO: 9587
  SARS-CoV-2/Australia/NSW10/2020__EPI_ISL_413596 spike protein (1-1147)(T874C_S1055C) Ferritin construct

SEQ ID NO: 9608 - protein, 1315 aa, Artificial Sequence
  SARS-CoV-2/Switzerland/1000477797/2020__EPI_ISL_413023 spike protein (1-1147)(T874C_S1055C) Ferritin construct
MFVFLVLLPLVSSQCVNLTTRTQLPPAYTNSFTRGVYYPDKVFRSSVLHSTQDLFLPFFSNVTWFHAIHVSGTNGTKRFDNPVLPFNDGVYFASTEKSNIIRGWIFGTTLDSKTQSLLIVNNATNVVIKVCEFQFCNDPFLGVYYHKNNKSWMESEFRVYSSANNCTFEYVSQPFLMDLEGKQGNFKNLREFVFKNIDGYFNIYSKHTPINLVRDLPQGFSALEPLVDLPIGINITRFQTLLALHRSYLTPGDSSSGWTAGAAAYYVGYLQPRTFLLKYNENGTITDAVDCALDPLSETKCTLKSFTVEKGIYQTSNFRVQPTESIVRFPNITNLCPFGEVFNATRFASVYAWNRKRISNCVADYSVLYNSASFSTFKCYGVSPTKLNDLCFTNVYADSFVIRGDEVRQIAPGQTGKIADYNYKLPDDFTGCVIAWNSNNLDSKVGGNYNYLYRLFRKSNLKPFERDISTEIYQAGSTPCNGVEGFNCYFPLQSYGFQPTNGVGYQPYRVVVLSFELLHAPATVCGPKKSTNLVKNKCVNFNFNGLTGTGVLTESNKKFLPFQQFGRDIADTTDAVRDPQTLEILDITPCSFGGVSVITPGTNTSNQVAVLYQGVNCTEVPVAIHADQLTPTWRVYSTGSNVFQTRAGCLIGAEHVNNSYECDIPIGAGICASYQTQTNSPRRARSVASQSIIAYTMSLGAENSVAYSNNSIAIPTNFTISVTTEILPVSMTKTSVDCTMYICGDSTECSNLLLQYGSFCTQLNRALTGIAVEQDKNTQEVFAQVKQIYKTPPIKDFGGFNFSQILPDPSKPSKRSFIEDLLFNKVTLADAGFIKQYGDCLGDIAARDLICAQKFNGLTVLPPLLTDEMIAQYCSALLAGTITSGWTFGAGAALQIPFAMQMAYRFNGIGVTQNVLYENQKLIANQFNSAIGKIQDSLSSTASALGKLQDVVNQNAQALNTLVKQLSSNFGAISSVLNDILSRLDKVEAEVQIDRLITGRLQSLQTYVTQQLIRAAEIRASANLAATKMSECVLGQSKRVDFCGKGYHLMSFPQCAPHGVVFLHVTYVPAQEKNFTTAPAICHDGKAHFPREGVFVSNGTHWFVTQRNFYEPQIITTDNTFVSGNCDVVIGIVNNTVYDPLQPELDSGGGGSDIIKLLNEQVNKEMQSSNLYMSMSSWCYTHSLDGAGLFLFDHAAEEYEHAKKLIIFLNENNVPVQLTSISAPEHKFEGLTQIFQKAYEHEQHISESINNIVDHAIKSKDHATFNFLQWYVAEQHEEEVLFKDILDKIELIGNENHGLYLADQYVKGIAKSRKS

SEQ ID NO: 9609 - protein, 1315 aa, Artificial Sequence
  SARS-CoV-2/Belgium/BA-02291/2020__EPI_ISL_415159 spike protein (1-1147)(T874C_S1055C) Ferritin construct
MFVFLVLLPLVSSQCVNLTTRTQLPPAYTNSFTRGVYYPDKVFRSSVLHSTQDLFLPFFSNVTWFHAIHVSGTNGTKRFDNPVLPFNDGVYFASTEKSNIIRGWIFGTTLDSKTQSLLIVNNATNVVIKVCEFQFCNDPFLGVYYHKNNKSWMESEFRVYSSANNCTFEYVSQPFLMDLEGKQGNFKNLREFVFKNIDGYFKIYSKHTPINLVRDLPQGFSALEPLVDLPIGINITRFQTLLALHRSYLTPGDSSSGWTAGAAAYYVGYLQPRTFLLKYNENGTITDAVDCALDPLSETKCTLKSFTVEKGIYQTSNFRVQPTESIVRFPNITNLCPFGEVFNATRFASVYAWNRKRISNCVADYSVLYNSASFSTFKCYGVSPTKLNDLCFTNVYADSFVIRGDEVRQIAPGQTGKIADYNYKLPDDFTGCVIAWNSNNLDSKVGGNYNYLYRLFRRSNLKPFERDISTEIYQAGSTPCNGVEGFNCYFPLQSYGFQPTNGVGYQPYRVVVLSFELLPAPATVCGPKKSTNLVKNKCVNFNFNGLTGTGVLTESNKKFLPFQQFGRDIADTTDAVRDPQTLEILDITPCSFGGVSVITPGTNTSNQVAVLYQGVNCTEVPVAIHADQLTPTWRVYSTGSNVFQTRAGCLIGAEHVNNSYECDIPIGAGICASYQTQTNSPRRARSVASQSIIAYTMSLGAENSVAYSNNSIAIPTNFTISVTTEILPVSMTKTSVDCTMYICGDSTECSNLLLQYGSFCTQLNRALTGIAVEQDKNTQEVFAQVKQIYKTPPIKDFGGFNFSQILPDPSKPSKRSFIEDLLFNKVTLADAGFIKQYGDCLGDIAARDLICAQKFNGLTVLPPLLTDEMIAQYCSALLAGTITSGWTFGAGAALQIPFAMQMAYRFNGIGVTQNVLYENQKLIANQFNSAIGKIQDSLSSAAPALGKLQDVVNQNAQALNTLVKQLSSNFGAISSVLNDILSRLDKVEAEVQIDRLITGRLQSLQTYVTQQLIRAAEIRASANLAATKMSECVLGQSKRVDFCGKGYHLMSFPQCAPHGVVFLHVTYVPAQEKNFTTAPAICHDGKAHFPREGVFVSNGTHWFVTQRNFYEPQIITTDNTFVSGNCDVVIGIVNNTVYDPLQPELDSGGGGSDIIKLLNEQVNKEMQSSNLYMSMSSWCYTHSLDGAGLFLFDHAAEEYEHAKKLIIFLNENNVPVQLTSISAPEHKFEGLTQIFQKAYEHEQHISESINNIVDHAIKSKDHATFNFLQWYVAEQHEEEVLFKDILDKIELIGNENHGLYLADQYVKGIAKSRKS

SEQ ID NO: 9610 - protein, 1315 aa, Artificial Sequence
  SARS-CoV-2/USA/WA8-UW5/2020__EPI_ISL_413486 spike protein (1-1147)(T874C_S1055C) Ferritin construct
MFVFLVLLPLVSSQCVNLTTRTQLPPAYTNSFTRGVYYPDKVFRSSVLHSTQDLFLPFFSNVTWFHAIHVSGTNGTKRFDNPVLPFNDGVYFASTEKSNIIRGWIFGTTLDSKTQSLLIVNNATNVVIKVCEFQFCNDPFLGVYYHKNNKSWMESEFRVYSSANNCTFEYVSQPFLMDLEGKQGNFKNLREFVFKNIDGYFKIYSKHTPINLVRDLPQGFSALEPLVDLPIGINITRFQTLLALHRSYLTPGDSSSGWTAGAAAYYVGYLQPRTFLLKYNENGTITDAVDCALDPLSETKCTLKSFTVEKGIYQTSNFRVQPTESIVRFPNITNLCPFGEVFNATRFASVYAWNRKRISNCVADYSVLYNSASFSTFKCYGVSPTKLNDLCFTNVYADSFVIRGDEVRQIAPGQTGKIADYNYKLPDDFTGCVIAWNSNNLDSKVGGNYNYLYRLFRKSNLKPFERDISTEIYQAGSTPCNGVEGFNCYFPLQSYGFQPTNGVGYQPYRVVVLSFELLHAPATVCGPKKSTNLVKNKCVNFNFNGLTGTGVLTESNKKFLPFQQFGRDIADTTDAVRDPQTLEILDITPCSFGGVSVITPGTNTSNQVAVLYQDVNCTEVPVAIHADQLTPTWRVYSTGSNVFQTRAGCLIGAEYVNNSYECDIPIGAGICASYQTQTNSPRRARSVASQSIIAYTMSLGAENSVAYSNNSIAIPTNFTISVTTEILPVSMTKTSVDCTMYICGDSTECSNLLLQYGSFCTQLNRALTGIAVEQDKNTQEVFAQVKQIYKTPPIKDFGGFNFSQILPDPSKPSKRSFIEDLLFNKVTLADAGFIKQYGDCLGDIAARDLICAQKFNGLTVLPPLLTDEMIAQYCSALLAGTITSGWTFGAGAALQIPFAMQMAYRFNGIGVTQNVLYENQKLIANQFNSAIGKIQDSLSSTASALGKLQDVVNQNAQALNTLVKQLSSNFGAISSVLNDILSRLDKVEAEVQIDRLITGRLQSLQTYVTQQLIRAAEIRASANLAATKMSECVLGQSKRVDFCGKGYHLMSFPQCAPHGVVFLHVTYVPAQEKNFTTAPAICHDGKAHFPREGVFVSNGTHWFVTQRNFYEPQIITTDNTFVSGNCDVVIGIVNNTVYDPLQPELDSGGGGSDIIKLLNEQVNKEMQSSNLYMSMSSWCYTHSLDGAGLFLFDHAAEEYEHAKKLIIFLNENNVPVQLTSISAPEHKFEGLTQIFQKAYEHEQHISESINNIVDHAIKSKDHATFNFLQWYVAEQHEEEVLFKDILDKIELIGNENHGLYLADQYVKGIAKSRKS

SEQ ID NO: 9611 - protein, 1315 aa, Artificial Sequence
  SARS-CoV-2/England/20102000506/2020__EPI_ISL_415147 spike protein (1-1147)(T874C_S1055C) Ferritin construct
MFVFLVLLPLVSSQCVNLTTRTQLPPAYTNSFTRGVYYPDKVFRSSVLHSTQDLFLPFFSNVTWFHAIHVSGTNGTKRFDNPVLPFNDGVYFASTEKSNIIRGWIFGTTLDSKTQSLLIVNNATNVVIKVCEFQFCNDPFLGVYYHKNNKSWMESEFRVYSSANNCTFEYVSQPFLMDLEGKQGNFKNLREFVFKNIDGYFKIYSKHTPINLVRDLPQGFSALEPLVDLPIGINITRFQTLLALHRSYLTPGDSSSGWTAGAAAYYVGYLQPRTFLLKYNENGTITDAVDCALDPLSETKCTLKSFTVEKGIYQTSNFRVQPTESIVRFPNITNLCPFGEVFNATRFASVYAWNRKRISNCVADYSVLYNSASFSTFKCYGVSPTKLNDLCFTNVYADSFVIRGDEVRQIAPGQTGKIADYNYKLPDDFTGCVIAWNSNNLDSKVGGNYNYLYRLFRKSNLKPFERDISTEIYQAGSTPCNGVEGFNCYFPLQSYGFQPTNGVGYQPYRVVVLSFELLHAPATVCGPKKSTNLVKNKCVNFNFNGLTGTGVLTESNKKFLPFQQFGRDIADTTDAVRDPQTLEILDITPCSFGGVSVITPGTNTSNQVAVLYQGVNCTEVPVAIHADQLTPTWRVYSTGSNVFQTRAGCLIGAEHVNNSYECDIPIGAGICASYQTQTNSPRRARSVASQSIIAYTMSLGAENSVAYSNNSIAIPTNFTISVTTEILPVSMTKTSVDCTMYICGDSTECSNLLLQYGSFCTQLNRALTGIAVEQDKNTQEVFAQVKQIYKTPPIKDFGGFNFSQILPDPSKPSKRSFIEDLLFNKVTLADAGFIKQYGYCLGDIAARDLICAQKFNGLTVLPPLLTDEMIAQYCSALLAGTITSGWTFGAGAALQIPFAMQMAYRFNGIGVTQNVLYENQKLIANQFNSAIGKIQDSLSSTASALGKLQDVVNQNAQALNTLVKQLSSNFGAISSVLNDILSRLDKVEAEVQIDRLITGRLQSLQTYVTQQLIRAAEIRASANLAATKMSECVLGQSKRVDFCGKGYHLMSFPQCAPHGVVFLHVTYVPAQEKNFTTAPAICHDGKAHFPREGVFVSNGTHWFVTQRNFYEPQIITTDNTFVSGNCDVVIGIVNNTVYDPLQPELDSGGGGSDIIKLLNEQVNKEMQSSNLYMSMSSWCYTHSLDGAGLFLFDHAAEEYEHAKKLIIFLNENNVPVQLTSISAPEHKFEGLTQIFQKAYEHEQHISESINNIVDHAIKSKDHATFNFLQWYVAEQHEEEVLFKDILDKIELIGNENHGLYLADQYVKGIAKSRKS

SEQ ID NO: 9612 - protein, 1315 aa, Artificial Sequence
  SARS-CoV-2/Belgium/VAG-03013/2020__EPI_ISL_415155 spike protein (1-1147)(T874C_S1055C) Ferritin construct
MFVFLVLLPLVSSQCVNLTTRTQLPPAYTNSFTRGVYYPDKVFRSSVLHSTQDLFLPFFSNVTWFHAIHVSGTNGTKRFDNPVLPFNDGVYFASTEKSNIIRGWIFGTTLDSKTQSLLIVNNATNVVIKVCEFQFCNDPFLGVYYHKNNKSWMESEFRVYSSANNCTFEYVSQPFLMDLEGKQGNFKNLREFVFKNIDGYFKIYSKHTPINLVRDLPQGFSALEPLVDLPIGINITRFQTLLALHRSYLTPGDSSSGWTAGAAAYYVGYLQPRTFLLKYNENGTITDAVDCALDPLSETKCTLKSFTVEKGIYQTSNFRVQPTESIVRFPNITNLCPFGEVFNATRFASVYAWNRKRISNCVADYSVLYNSASFSTFKCYGVSPTKLNDLCFTNVYADSFVIRGDEVRQIAPGQTGKIADYNYKLPDDFTGCVIAWNSNNLDSKVGGNYNYLYRLFRKSNLKPFERDISTEIYQAGSTPCNGVEGFNCYFPLQSYGFQPTNGVGYQPYRVVVLSFELLHAPATVCGPKKSTNLVKNKCVNFNFNGLTGTGVLTESNKKFLPFQQFGRDIADTTDAVRDPQTLEILDITPCSFGGVSVITPGTNTSNQVAVLYQGVNCTEVPVAIHADQLTPTWRVYSTGSNVFQTRAGCLIGAEHVNNSYECDIPIGAGICASYQTQTNSPRRARSVASQSIIAYTMSLGAENSVAYSNNSIAIPTNFTISVTTEILPVSMTKTSVDCTMYICGDSTECSNLLLQYGSFCTQLNRALTGIAVEQDKNTQEVFAQVKQIYKTPPIKDFGGFNFSQILPDPSKPSKRSFIEDLLFNKVTLADAGFIKQYGDCLGDIAARDLICAQKFNGLTVLPPLLTDEMIAQYCSALLAGTITSGWTFGAGAALQIPFAMQMAYRFNGIGVTQNVLYENQKLIANQFNSAIGKIQDSLSSTATALGKLQDVVNQNAQALNTLVKQLSSNFGAISSVLNDILSRLDKVEAEVQIDRLITGRLQSLQTYVTQQLIRAAEIRASANLAATKMSECVLGQSKRVDFCGKGYHLMSFPQCAPHGVVFLHVTYVPAQEKNFTTAPAICHDGKAHFPREGVFVSNGTHWFVTQRNFYEPQIITTDNTFVSGNCDVVIGIVNNTVYDPLQPELDSGGGGSDIIKLLNEQVNKEMQSSNLYMSMSSWCYTHSLDGAGLFLFDHAAEEYEHAKKLIIFLNENNVPVQLTSISAPEHKFEGLTQIFQKAYEHEQHISESINNIVDHAIKSKDHATFNFLQWYVAEQHEEEVLFKDILDKIELIGNENHGLYLADQYVKGIAKSRKS

SEQ ID NO: 9613 - protein, 1315 aa, Artificial Sequence
  SARS-CoV-2/Belgium/BC-03016/2020__EPI_ISL_415157 spike protein (1-1147)(T874C_S1055C) Ferritin construct
MFVFLVLLPLVSSQCVNLTTRTQLPPAYTNSFTRGVYYPDKVFRSSVLHSTQDLFLPFFSNVTWFHAIHVSGTNGTKRFDNPVLPFNDGVYFASTEKSNIIRGWIFGTTLDSKTQSLLIVNNATNVVIKVCEFQFCNDPFLGVYYHKNNKSWMESEFRVYSSANNCTFEYVSQPFLMDLEGKQGNFKNLREFVFKNIDGYFKIYSKHTPINLVRDLPQGFSALEPLVDLPIGINITRFQTLLALHRSYLTPGDSSSGWTAGAAAYYVGYLQPRTFLLKYNENGTITDAVDCALDPLSETKCTLKSFTVEKGIYQTSNFRVQPTESIVRFPNITNLCPFGEVFNATRFASVYAWNRKRISNCVADYSVLYNSASFSTFKCYGVSPTKLNDLCFTNVYADSFVIRGDEVRQIAPGQTGKIADYNYKLPDDFTGCVIAWNSNNLDSKVGGNYNYLYRLFRKSNLKPFERDISTEIYQAGSTPCNGVEGFNCYFPLQSYGFQPTNGVGYQPYRVVVLSFELLHAPATVCGPKKSTNLVKNKCVNFNFNGLTGTGVLTESNKKFLPFQQFGRDIADTTDAVRDPQTLEILDITPCSFGGVSVITPGTNTSNQVAVLYQGVNCTEVPVAIHADQLTPTWRVYSTGSNVFQTRAGCLIGAEHVNNSYECDIPIGAGICASYQTQTNSPRRARSVASQSIIAYTMSLGAENSVAYSNNSIAIPTNFTISVTTEILPVSMTKTSVDCTMYICGDSTECSNLLLQYGSFCTQLNRALTGIAVEQDKNTQEVFAQVKQIYKTPPIKDFGGFNFSQILPDPSKPSKRSFIEDLLFNKVTLADAGFIKQYGDCLGDIAARDLICAQKFNGLTVLPPLLTDEMIAQYCSALLAGTITSGWTFGAGAALQIPFAMQMAYRFNGIGVTQNVLYENQKLIANQFNSAIGKIQDSLSSTAPALGKLQDVVNQNAQALNTLVKQLSSNFGAISSVLNDILSRLDKVEAEVQIDRLITGRLQSLQTYVTQQLIRAAEIRASANLAATKMSECVLGQSKRVDFCGKGYHLMSFPQCAPHGVVFLHVTYVPAQEKNFTTAPAICHDGKAHFPREGVFVSNGTHWFVTQRNFYEPQIITTDNTFVSGNCDVVIGIVNNTVYDPLQPELDSGGGGSDIIKLLNEQVNKEMQSSNLYMSMSSWCYTHSLDGAGLFLFDHAAEEYEHAKKLIIFLNENNVPVQLTSISAPEHKFEGLTQIFQKAYEHEQHISESINNIVDHAIKSKDHATFNFLQWYVAEQHEEEVLFKDILDKIELIGNENHGLYLADQYVKGIAKSRKS

SEQ ID NO: 9614 - protein, 1315 aa, Artificial Sequence
  SARS-CoV-2/Germany/BavPat3/2020__EPI_ISL_414521 spike protein (1-1147)(T874C_S1055C) Ferritin construct
MFVFLVLLPLVSSQCVNLTTRTQLPPAYTNSFTRGVYYPDKVFRSSVLHSTQDLFLPFFSNVTWFHAIHVSGTNGTKRFDNPVLPFNDGVYFASTEKSNIIRGWIFGTTLDSKTQSLLIVNNATNVVIKVCEFQFCNDPFLGVYYHKNNKSWMESEFRVYSSANNCTFEYVSQPFLMDLEGKQGNFKNLREFVFKNIDGYFKIYSKHTPINLVRDLPQGFSALEPLVDLPIGINITRFQTLLALHRSYLTPGDSSSGWTAGAAAYYVGYLQPRTFLLKYNENGTITDAVDCALDPLSETKCTLKSFTVEKGIYQTSNFRVQPTESIVRFPNITNLCPFGEVFNATRFASVYAWNRKRISNCVADYSVLYNSASFSTFKCYGVSPTKLNDLCFTNVYADSFVIRGDEVRQIAPGQTGKIADYNYKLPDDFTGCVIAWNSNNLDSKVGGNYNYLYRLFRKSNLKPFERDISTEIYQAGSTPCNGVEGFNCYFPLQSYGFQPTNGVGYQPYRVVVLSFELLHAPATVCGPKKSTNLVKNKCVNFNFNGLTGTGVLTESNKKFLPFQQFGRDIADTTDAVRDPQTLEILDITPCSFGGVSVITPGTNTSNQVAVLYQDVNCTEVPVAIHADQLTPTWRVYSTGSNVFQTRAGCLIGAEHVNNSYECDIPIGAGICASYQTQTNSPRRARSVASQSIIAYTMSLGAENSVAYSNNSIAIPTNFTISVTTEILPVSMTKTSVDCTMYICGDSTECSNLLLQYGSFCTQLNRALTGIAVEQDKNTQQVFAQVKQIYKTPPIKDFGGFNFSQILPDPSKPSKRSFIEDLLFNKVTLADAGFIKQYGDCLGDIAARDLICAQKFNGLTVLPPLLTDEMIAQYCSALLAGTITSGWTFGAGAALQIPFAMQMAYRFNGIGVTQNVLYENQKLIANQFNSAIGKIQDSLSSTASALGKLQDVVNQNAQALNTLVKQLSSNFGAISSVLNDILSRLDKVEAEVQIDRLITGRLQSLQTYVTQQLIRAAEIRASANLAATKMSECVLGQSKRVDFCGKGYHLMSFPQCAPHGVVFLHVTYVPAQEKNFTTAPAICHDGKAHFPREGVFVSNGTHWFVTQRNFYEPQIITTDNTFVSGNCDVVIGIVNNTVYDPLQPELDSGGGGSDIIKLLNEQVNKEMQSSNLYMSMSSWCYTHSLDGAGLFLFDHAAEEYEHAKKLIIFLNENNVPVQLTSISAPEHKFEGLTQIFQKAYEHEQHISESINNIVDHAIKSKDHATFNFLQWYVAEQHEEEVLFKDILDKIELIGNENHGLYLADQYVKGIAKSRKS

SEQ ID NO: 9615 - protein, 1315 aa, Artificial Sequence
  SARS-CoV-2/France/HF1805/2020__EPI_ISL_414628 spike protein (1-1147)(T874C_S1055C) Ferritin construct
MFVFLVLLPLVSSQCVNLTTRTQLPPAYTNSFTRGVYYPDKVFRSSVLHSTQDLFLPFFSNVTWFHAIHVSGTNGTKRFDNPVLPFNDGVYFASTEKSNIIRGWIFGTTLDSKTQSLLIVNNATNVVIKVCEFQFCNDPFLGVYYHKNNKSWMESEFRVYSSANNCTFEYVSQPFLMDLEGKQGNFKNLREFVFKNIDGYFKIYSKHTPINLVRDLPQGFSALEPLVDLPIGINITRFQTLLALHRSYLTPGDSSSGWTAGAAAYYVGYLQPRTFLLKYNENGTITDAVDCALDPLSETKCTLKSFTVEKGIYQTSNFRVQPTESIVRFPNITNLCPFGEVFNATRFASVYAWNRKRISNCVADYSVLYNSASFSTFKCYGVSPTKLNDLCFTNVYADSFVIRGDEVRQIAPGQTGKIADYNYKLPDDFTGCVIAWNSNNLDSKVGGNYNYLYRLFRKSNLKPFERDISTEIYQAGSTPCNGVEGFNCYFPLQSYGFQPTNGVGYQPYRVVVLSFELLHAPATVCGPKKSTNLVKNKCVNFNFNGLTGTGVLTESNKKFLPFQQFGRDIADTTDAVRDPQTLEILDITPCSFGGVSVITPGTNTSNQVAVLYQGVNCTEVPVAIHADQLTPTWRVYSTGSNVFQTRAGCLIGAEHVNNSYECDIPIGAGICASYQTQTNSPRRARSVASQSIIAYTMSLGAENSVAYSNNSIAIPTNFTISVTTEILPVSMTKTSVDCTMYICGDSTECSNLLLQYGSFCTQLNRALTGIAVEQDKNTQEVFAQVKQIYKTPPIKDFGGFNFSQILPDPSKPSKRSFIEDLLFNKVTLADAGFIKQYGDCLGDIAARDLICAQKFNGLTVLPPLLTDEMIAQYCSALLAGTITSGWTFGAGAALQIPFAMQMAYRFNGIGVTQNVLYENQKLIANQFNSAIGKIQDSLSSTASALGKLQDVVNQNAQALNTLVKQLSSNFGAISSVLNDILSRLDKVEAEVQIDRLITGRLQSLQTYVTQQLIRAAEIRASANLAATKMSECVLGQSKRVDFCGKGYHLMSFPQCAPHGVVFLHVTYVPAQEKNFTTAPAICHDGKAHFPREGVFVSNGTHWFVTQRNFYEPQIITTDNTFVSGNCDVVIGVVNNTVYDPLQPELDSGGGGSDIIKLLNEQVNKEMQSSNLYMSMSSWCYTHSLDGAGLFLFDHAAEEYEHAKKLIIFLNENNVPVQLTSISAPEHKFEGLTQIFQKAYEHEQHISESINNIVDHAIKSKDHATFNFLQWYVAEQHEEEVLFKDILDKIELIGNENHGLYLADQYVKGIAKSRKS

SEQ ID NO: 9616 - protein, 1315 aa, Artificial Sequence
  SARS-CoV-2/Netherlands/ZuidHolland_9/2020__EPI_ISL_414445 spike protein (1-1147)(T874C_S1055C) Ferritin construct
MFVFLVLLPLVSSQCVNLTTRTQLPPAYTNSFTRGVYYPDKVFRSSVLHSTQDLFLPFFSNVTWFHAIHVSGTNGTKRFDNPVLPFNDGVYFASTEKSNIIRGWIFGTTLDSKTQSLLIVNNATNVVIKVCEFQFCNDPFLGVYYHKNNKSWMESEFRVYSSANNCTFEYVSQPFLMDLEGKQGNFKNLREFVFKNIDGYFKIYSKHTPINLVRDLPQGFSALEPLVDLPIGINITRFQTLLALHRSYLTPGDSSSGWTAGAAAYYVGYLQPRTFLLKYNENGTITDAVDCALDPLSETKCTLKSFTVEKGIYQTSNFRVQPTESIVRFPNITNLCPFGEVFNATRFASVYAWNRKRISNCVADYSVLYNSASFSTFKCYGVSPTKLNDLCFTNVYADSFVIRGDEVRQIAPGQTGKIADYNYKLPDDFTGCVIAWNSNNLDSKVGGNYNYLYRLFRKSNLKPFERDISTEIYQAGSTPCNGVEGFNCYFPLQSYGFQPTNGVGYQPYRVVVLSFELLHAPATVCGPKKSTNLVKNKCVNFNFNGLTGTGVLTESNKKFLPFQQFGRDIADTTDAVRDPQTLEILDITPCSFGGVSVITPGTNTSNQVAVLYQGVNCTEVPVAIHADQLTPTWRVYSTGSNVFQTRAGCLIGAEHVNNSYECDIPIGAGICASYQTQTNSPRRARSVASQSIIAYTMSLGAENSVAYSNNSIAIPTNFTISVTTEILPVSMTKTSVDCTMYICGDSTECSNLLLQYGSFCTQLNRALTGIAVEQDKNTQEVFAQVKQIYKTPPIKDFGGFNFSQILPDPSKPSKRSFIEDLLFNKVTLADAGFIKQYGDCLGDIAARDLICVQKFNGLTVLPPLLTDEMIAQYCSALLAGTITSGWTFGAGAALQIPFAMQMAYRFNGIGVTQNVLYENQKLIANQFNSAIGKIQDSLSSTASALGKLQDVVNQNAQALNTLVKQLSSNFGAISSVLNDILSRLDKVEAEVQIDRLITGRLQSLQTYVTQQLIRAAEIRASANLAATKMSECVLGQSKRVDFCGKGYHLMSFPQCAPHGVVFLHVTYVPAQEKNFTTAPAICHDGKAHFPREGVFVSNGTHWFVTQRNFYEPQIITTDNTFVSGNCDVVIGIVNNTVYDPLQPELDSGGGGSDIIKLLNEQVNKEMQSSNLYMSMSSWCYTHSLDGAGLFLFDHAAEEYEHAKKLIIFLNENNVPVQLTSISAPEHKFEGLTQIFQKAYEHEQHISESINNIVDHAIKSKDHATFNFLQWYVAEQHEEEVLFKDILDKIELIGNENHGLYLADQYVKGIAKSRKS

SEQ ID NO: 9617 - protein, 1315 aa, Artificial Sequence
  SARS-CoV-2/Finland/FIN03032020A/2020__EPI_ISL_413602 spike protein (1-1147)(T874C_S1055C) Ferritin construct
MFVFLVLLPLVSSQCVNLTTRTQLPPAYTNSFTRGVYYPDKVFRSSVLHSTQDLFLPFFSNVTWFHAIHVSGTNGTKRFDNPVLPFNDGVYFASTEKSNIIRGWIFGTTLDSKTQSLLIVNNATNVVIKVCEFQFCNDPFLGVYYHKNNKSWMESEFRVYSSANNCTFEYVSQPFLMDLEGKQGNFKNLREFVFKNIDGYFKIYSKHTPINLVRDLPQGFSALEPLVDLPIGINITRFQTLLALHRSYLTPGDSSSGWTAGAAAYYVGYLQPRTFLLKYNENGTITDAVDCALDPLSETKCTLKSFTVEKGIYQTSNFRVQPTESIVRFPNITNLCPFGEVFNATRFASVYAWNRKRISNCVADYSVLYNSASFSTFKCYGVSPTKLNDLCFTNVYADSFVIRGDEVRQIAPGQTGKIADYNYKLPDDFTGCVISWNSNNLDSKVGGNYNYLYRLFRKSNLKPFERDISTEIYQAGSTPCNGVEGFNCYFPLQSYGFQPTNGVGYQPYRVVVLSFELLHAPATVCGPKKSTNLVKNKCVNFNFNGLTGTGVLTESNKKFLPFQQFGRDIADTTDAVRDPQTLEILDITPCSFGGVSVITPGTNTSNQVAVLYQGVNCTEVPVAIHADQLTPTWRVYSTGSNVFQTRAGCLIGAEHVNNSYECDIPIGAGICASYQTQTNSPRRARSVASQSIIAYTMSLGAENSVAYSNNSIAIPTNFTISVTTEILPVSMTKTSVDCTMYICGDSTECSNLLLQYGSFCTQLNRALTGIAVEQDKNTQEVFAQVKQIYKTPPIKDFGGFNFSQILPDPSKPSKRSFIEDLLFNKVTLADAGFIKQYGDCLGDIAARDLICAQKFNGLTVLPPLLTDEMIAQYCSALLAGTITSGWTFGAGAALQIPFAMQMAYRFNGIGVTQNVLYENQKLIANQFNSAIGKIQDSLSSTASALGKLQDVVNQNAQALNTLVKQLSSNFGAISSVLNDILSRLDKVEAEVQIDRLITGRLQSLQTYVTQQLIRAAEIRASANLAATKMSECVLGQSKRVDFCGKGYHLMSFPQCAPHGVVFLHVTYVPAQEKNFTTAPAICHDGKAHFPREGVFVSNGTHWFVTQRNFYEPQIITTDNTFVSGNCDVVIGIVNNTVYDPLQPELDSGGGGSDIIKLLNEQVNKEMQSSNLYMSMSSWCYTHSLDGAGLFLFDHAAEEYEHAKKLIIFLNENNVPVQLTSISAPEHKFEGLTQIFQKAYEHEQHISESINNIVDHAIKSKDHATFNFLQWYVAEQHEEEVLFKDILDKIELIGNENHGLYLADQYVKGIAKSRKS

SEQ ID NO: 9618 - protein, 1315 aa, Artificial Sequence
  SARS-CoV-2/France/GE1977/2020__EPI_ISL_414632 spike protein (1-1147)(T874C_S1055C) Ferritin construct
MFVFLVLLPLVSSQCVNLTTRTQLPPAYTNSFTRGVYYPDKVFRSSVLHSTQDLFLPFFSNVTWFHAIHVSGTNGTKRFDNPVLPFNDGVYFASTEKSNIIRGWIFGTTLDSKTQSLLIVNNATNVVIKVCEFQFCNDPFLGVYYHKNNKSWMESEFRVYSSANNCTFEYVSQPFLMDLEGKQGNFKNLREFVFKNIDGYFKIYSKHTPINLVRDLPQGFSALEPLVDLPIGINITRFQTLLALHRSYLTPGDSSSGWTAGAAAYYVGYLQPRTFLLKYNENGTITDAVDCALDPLSETKCTLKSFTVEKGIYQTSNFRVQPTESIVRFPNITNLCPFGEVFNATRFASVYAWNRKRISNCVADYSVLYNSASFSTFKCYGVSPTKLNDLCFTNVYADSFVIRGDEVRQIAPGQTGKIADYNYKLPDDFTGCVIAWNSNNLDSKVGGNYNYLYRLFRKSNLKPFERDISTEIYQAGSTPCNGVEGFNCYFPLQSYGFQPTNGVGYQPYRVVVLSFELLHAPATVCGPKKSTNLVKNKCVNFNFNGLTGTGVLTESNKKFLPFQQFGRDIADTTDAVRDPQTLEILDITPCSFGGVSVITPGTNTSNQVAVLYQGVNCTEVPVAIHADQLTPTWRVYSTGSNVFQTRAGCLIGAEHVNNSYECDIPIGAGICASYQTQTNSPRRARSVASQSIIAYTMSLGAENSVAYSNNSIAIPTNFTISVTTEILPVSMTKTSVDCTMYICGDSTECSNLLLQYGSFCTQLNRALTGIAVEQDKNTQEVFAQVKQIYKTPPIKDFGGFNFSQILPDPSKPSKRSFIEDLLFNKVTLADAGFIKQYGDCLGDIAARDLICAQKFNGLTVLPPLLTDEMIAQYCSALLAGTITSGWTFGAGAALQIPFAMQMAYRFNGIGVTQNVLYENQKLIANQFNSAIGKIQDSLFSTASALGKLQDVVNQNAQALNTLVKQLSSNFGAISSVLNDILSRLDKVEAEVQIDRLITGRLQSLQTYVTQQLIRAAEIRASANLAATKMSECVLGQSKRVDFCGKGYHLMSFPQCAPHGVVFLHVTYVPAQEKNFTTAPAICHDGKAHFPREGVFVSNGTHWFVTQRNFYEPQIITTDNTFVSGNCDVVIGIVNNTVYDPLQPELDSGGGGSDIIKLLNEQVNKEMQSSNLYMSMSSWCYTHSLDGAGLFLFDHAAEEYEHAKKLIIFLNENNVPVQLTSISAPEHKFEGLTQIFQKAYEHEQHISESINNIVDHAIKSKDHATFNFLQWYVAEQHEEEVLFKDILDKIELIGNENHGLYLADQYVKGIAKSRKS

SEQ ID NO: 9619 - protein, 1315 aa, Artificial Sequence
  SARS-CoV-2/Finland/FIN-313/2020__EPI_ISL_414641 spike protein (1-1147)(T874C_S1055C) Ferritin construct
MFVFLVLLPLVSSQCVNLTTRTQLPPAYTNSFTRGVYYPDKVFRSSVLHSTQDLFLPFFSNVTWFHAIHVSGTNGTKRFDNPVLPFNDGVYFASTEKSNIIRGWIFGTTLDSKTQSLLIVNNATNVVIKVCEFQFCNDPFLGVYYHKNNKSWMESEFRVYSSANNCTFEYVSQPFLMDLEGKQGNFKNLREFVFKNIDGYFKIYSKHTPINLVRDLPQGFSALEPLVDLPIGINITRFKTLLALHRSYLTPGDSSSGWTAGAAAYYVGYLQPRTFLLKYNENGTITDAVDCALDPLSETKCTLKSFTVEKGIYQTSNFRVQPTESIVRFPNITNLCPFGEVFNATRFASVYAWNRKRISNCVADYSVLYNSASFSTFKCYGVSPTKLNDLCFTNVYADSFVIRGDEVRQIAPGQTGKIADYNYKLPDDFTGCVIAWNSNNLDSKVGGNYNYLYRLFRKSNLKPFERDISTEIYQAGSTPCNGVEGFNCYFPLQSYGFQPTNGVGYQPYRVVVLSFELLHAPATVCGPKKSTNLVKNKCVNFNFNGLTGTGVLTESNKKFLPFQQFGRDIADTTDAVRDPQTLEILDITPCSFGGVSVITPGTNTSNQVAVLYQGVNCTEVPVAIHADQLTPTWRVYSTGSNVFQTRAGCLIGAEHVNNSYECDIPIGAGICASYQTQTNSPRRARSVASQSIIAYTMSLGAENSVAYSNNSIAIPTNFTISVTTEILPVSMTKTSVDCTMYICGDSTECSNLLLQYGSFCTQLNRALTGIAVEQDKNTQEVFAQVKQIYKTPPIKDFGGFNFSQILPDPSKPSKRSFIEDLLFNKVTLADAGFIKQYGDCLGDIAARDLICAQKFNGLTVLPPLLTDEMIAQYCSALLAGTITSGWTFGAGAALQIPFAMQMAYRFNGIGVTQNVLYENQKLIANQFNSAIGKIQDSLSSTASALGKLQDVVNQNAQALNTLVKQLSSNFGAISSVLNDILSRLDKVEAEVQIDRLITGRLQSLQTYVTQQLIRAAEIRASANLAATKMSECVLGQSKRVDFCGKGYHLMSFPQCAPHGVVFLHVTYVPAQEKNFTTAPAICHDGKAHFPREGVFVSNGTHWFVTQRNFYEPQIITTDNTFVSGNCDVVIGIVNNTVYDPLQPELDSGGGGSDIIKLLNEQVNKEMQSSNLYMSMSSWCYTHSLDGAGLFLFDHAAEEYEHAKKLIIFLNENNVPVQLTSISAPEHKFEGLTQIFQKAYEHEQHISESINNIVDHAIKSKDHATFNFLQWYVAEQHEEEVLFKDILDKIELIGNENHGLYLADQYVKGIAKSRKS

SEQ ID NO: 9620 - protein, 1315 aa, Artificial Sequence
  SARS-CoV-2/Netherlands/ZuidHolland_2/2020__EPI_ISL_414556 spike protein (1-1147)(T874C_S1055C) Ferritin construct
MFVFLVLLPLVSSQCVNLTTRTQLPPAYTNSFTRGVYYPDKVFRSSVLHSTQDLFLPFFSNVTWFHAIHVSGTNGTKRFDNPVLPFNDGVYFASTEKSNIIRGWIFGTTLDSKTQSLLIVNNATNVVIKVCEFQFCNDPFLGVYYHKNNKSWMESEFRVYSSANNCTFEYVSQPFLMDLEGKQGNFKNLREFVFKNIDGYFKIYSKHTPINLVRDLPQGFSALEPLVDLPIGINITRFQTLLALHRSYLTPGDSSSGWTAGAAAYYVGYLQPRTFLLKYNENGTITDAVDCALDPLSETKCTLKSFTVEKGIYQTSNFRVQPTESIVRFPNITNLCPFGEVFNATRFASVYAWNRKRISNCVADYSVLYNSASFSTFKCYGVSPTKLNDLCFTNVYADSFVIRGDEVRQIAPGQTGKIADYNYKLPDDFTGCVIAWNSNNLDSKVGGNYNYLYRLFRKSNLKPFERDISTEIYQAGSTPCNGVEGFNCYFPLQSYGFQPTNGVGYQPYRVVVLSFELLHAPATVCGPKKSTNLVKNKCVNFNFNGLTGTGVLTESNKKFLPFQQFGRDIADTTDAVRDPQTLEILDITPCSFGGVSVITPGTNTSNQVAVLYQGVNCTEVPVAIHADQLTPTWRVYSTGSNVFQTRAGCLIGAEHVNNSYECDIPIGAGICASYQTQTNSPRRARSVASQSIIAYTMSLGAENSVAYSNNSIAIPTNFTISVTTEILPVSMTKTSVDCTMYICGDSTECSNLLLQYGSFCTQLNRALTGIALEQDKNTQEVFAQVKQIYKTPPIKDFGGFNFSQILPDPSKPSKRSFIEDLLFNKVTLADAGFIKQYGDCLGDIAARDLICAQKFNGLTVLPPLLTDEMIAQYCSALLAGTITSGWTFGAGAALQIPFAMQMAYRFNGIGVTQNVLYENQKLIANQFNSAIGKIQDSLSSTASALGKLQDVVNQNAQALNTLVKQLSSNFGAISSVLNDILSRLDKVEAEVQIDRLITGRLQSLQTYVTQQLIRAAEIRASANLAATKMSECVLGQSKRVDFCGKGYHLMSFPQCAPHGVVFLHVTYVPAQEKNFTTAPAICHDGKAHFPREGVFVSNGTHWFVTQRNFYEPQIITTDNTFVSGNCDVVIGIVNNTVYDPLQPELDSGGGGSDIIKLLNEQVNKEMQSSNLYMSMSSWCYTHSLDGAGLFLFDHAAEEYEHAKKLIIFLNENNVPVQLTSISAPEHKFEGLTQIFQKAYEHEQHISESINNIVDHAIKSKDHATFNFLQWYVAEQHEEEVLFKDILDKIELIGNENHGLYLADQYVKGIAKSRKS

SEQ ID NO: 9621 - protein, 1315 aa, Artificial Sequence
  SARS-CoV-2/USA/WA-UW31/2020__EPI_ISL_414618 spike protein (1-1147)(T874C_S1055C) Ferritin construct
MFVFLVLLPLVSSQCVNLTTRTQLPPAYTNSFTRGVYYPDKVFRSSVLHSTQDLFLPFFSNVTWFHAIHVSGTNGTKRFDNPVLPFNDGVYFASTEKSNIIRGWIFGTTLDSKTQSLLIVNNATNVVIKVCEFQFCNDPFLGVYYHKNNKSWMESEFRVYSSANNCTFEYVSQPFLMDLEGKQGNFKNLREFVFKNIDGYFKIYSKHTPINLVRDLPQGFSALEPLVDLPIGINITRFQTLLALHRSYLTPGDSSSGWTAGAAAYYVGYLQPRTFLLKYNENGTITDAVDCALDPLSETKCTLKSFTVEKGIYQTSNFRVQPTESIVRFPNITNLCPFGEVFNATRFASVYAWNRKRISNCVADYSVLYNSASFSTFKCYGVSPTKLNDLCFTNVYADSFVIRGDEVRQIAPGQTGKIADYNYKLPDDFTGCVIAWNSNNLDSKVGGNYNYLYRLFRKSNLKPFERDISTEIYQAGSTPCNGAEGFNCYFPLQSYGFQPTNGVGYQPYRVVVLSFELLHAPATVCGPKKSTNLVKNKCVNFNFNGLTGTGVLTESNKKFLPFQQFGRDIADTTDAVRDPQTLEILDITPCSFGGVSVITPGTNTSNQVAVLYQDVNCTEVPVAIHADQLTPTWRVYSTGSNVFQTRAGCLIGAEHVNNSYECDIPIGAGICASYQTQTNSPRRARSVASQSIIAYTMSLGAENSVAYSNNSIAIPTNFTISVTTEILPVSMTKTSVDCTMYICGDSTECSNLLLQYGSFCTQLNRALTGIAVEQDKNTQEVFAQVKQIYKTPPIKDFGGFNFSQILPDPSKPSKRSFIEDLLFNKVTLADAGFIKQYGDCLGDIAARDLICAQKFNGLTVLPPLLTDEMIAQYCSALLAGTITSGWTFGAGAALQIPFAMQMAYRFNGIGVTQNVLYENQKLIANQFNSAIGKIQDSLSSTASALGKLQDVVNQNAQALNTLVKQLSSNFGAISSVLNDILSRLDKVEAEVQIDRLITGRLQSLQTYVTQQLIRAAEIRASANLAATKMSECVLGQSKRVDFCGKGYHLMSFPQCAPHGVVFLHVTYVPAQEKNFTTAPAICHDGKAHFPREGVFVSNGTHWFVTQRNFYEPQIITTDNTFVSGNCDVVIGIVNNTVYDPLQPELDSGGGGSDIIKLLNEQVNKEMQSSNLYMSMSSWCYTHSLDGAGLFLFDHAAEEYEHAKKLIIFLNENNVPVQLTSISAPEHKFEGLTQIFQKAYEHEQHISESINNIVDHAIKSKDHATFNFLQWYVAEQHEEEVLFKDILDKIELIGNENHGLYLADQYVKGIAKSRKS

SEQ ID NO: 9622 - protein, 1315 aa, Artificial Sequence
  SARS-CoV-2/South Korea/SNU01/2020__EPI_ISL_411929 spike protein (1-1147)(T874C_S1055C) Ferritin construct
MFVFLVLLPLVSSQCVNLTTRTQLPPAYTNSFTRGVYYPDKVFRSSVLHSTQDLFLPFFSNVTWFHAIHVSGTNGTKRFDNPVLPFNDGVYFASTEKSNIIRGWIFGTTLDSKTQSLLIVNNATNVVIKVCEFQFCNDPFLGVYYHKNNKSWMESEFRVYSSANNCTFEYVSQPFLMDLEGKQGNFKNLREFVFKNIDGYFKIYSKHTPINLVRDLPQGFWALEPLVDLPIGINITRFQTLLALHRSYLTPGDSSSGWTAGAAAYYVGYLQPRTFLLKYNENGTITDAVDCALDPLSETKCTLKSFTVEKGIYQTSNFRVQPTESIVRFPNITNLCPFGEVFNATRFASVYAWNRKRISNCVADYSVLYNSASFSTFKCYGVSPTKLNDLCFTNVYADSFVIRGDEVRQIAPGQTGKIADYNYKLPDDFTGCVIAWNSNNLDSKVGGNYNYLYRLFRKSNLKPFERDISTEIYQAGSTPCNGVEGFNCYFPLQSYGFQPTNGVGYQPYRVVVLSFELLHAPATVCGPKKSTNLVKNKCVNFNFNGLTGTGVLTESNKKFLPFQQFGRDIADTTDAVRDPQTLEILDITPCSFGGVSVITPGTNTSNQVAVLYQDVNCTEVPVAIHADQLTPTWRVYSTGSNVFQTRAGCLIGAEHVNNSYECDIPIGAGICASYQTQTNSPRRARSVASQSIIAYTMSLGAENSVAYSNNSIAIPTNFTISVTTEILPVSMTKTSVDCTMYICGDSTECSNLLLQYGSFCTQLNRALTGIAVEQDKNTQEVFAQVKQIYKTPPIKDFGGFNFSQILPDPSKPSKRSFIEDLLFNKVTLADAGFIKQYGDCLGDIAARDLICAQKFNGLTVLPPLLTDEMIAQYCSALLAGTITSGWTFGAGAALQIPFAMQMAYRFNGIGVTQNVLYENQKLIANQFNSAIGKIQDSLSSTASALGKLQDVVNQNAQALNTLVKQLSSNFGAISSVLNDILSRLDKVEAEVQIDRLITGRLQSLQTYVTQQLIRAAEIRASANLAATKMSECVLGQSKRVDFCGKGYHLMSFPQCAPHGVVFLHVTYVPAQEKNFTTAPAICHDGKAHFPREGVFVSNGTHWFVTQRNFYEPQIITTDNTFVSGNCDVVIGIVNNTVYDPLQPELDSGGGGSDIIKLLNEQVNKEMQSSNLYMSMSSWCYTHSLDGAGLFLFDHAAEEYEHAKKLIIFLNENNVPVQLTSISAPEHKFEGLTQIFQKAYEHEQHISESINNIVDHAIKSKDHATFNFLQWYVAEQHEEEVLFKDILDKIELIGNENHGLYLADQYVKGIAKSRKS

SEQ ID NO: 9623 - protein, 1315 aa, Artificial Sequence
  SARS-CoV-2/China/WF0004/2020__EPI_ISL_413694 spike protein (1-1147)(T874C_S1055C) Ferritin construct
MFVFLVLLPLVSSQCVNLTTRTQLPPAYTNSFTRGVYYPDKVFRSSVLHSTQDLFLPFFSNVTWFHAIHVSGTNGTKRFDNPVLPFNDGVYFASTEKSNIIRGWIFGTTLDSKTQSLLIVNNATNVVIKVCEFQFCNDPFLGVYYHKNNKSWTESEFRVYSSANNCTFEYVSQPFLMDLEGKQGNFKNLREFVFKNIDGYFKIYSKHTPINLVRDLPQGFSALEPLVDLPIGINITRFQTLLALHRSYLTPGDSSSGWTAGAAAYYVGYLQPRTFLLKYNENGTITDAVDCALDPLSETKCTLKSFTVEKGIYQTSNFRVQPTESIVRFPNITNLCPFGEVFNATRFASVYAWNRKRISNCVADYSVLYNSASFSTFKCYGVSPTKLNDLCFTNVYADSFVIRGDEVRQIAPGQTGKIADYNYKLPDDFTGCVIAWNSNNLDSKVGGNYNYLYRLFRKSNLKPFERDISTEIYQAGSTPCNGVEGFNCYFPLQSYGFQPTNGVGYQPYRVVVLSFELLHAPATVCGPKKSTNLVKNKCVNFNFNGLTGTGVLTESNKKFLPFQQFGRDIADTTDAVRDPQTLEILDITPCSFGGVSVITPGTNTSNQVAVLYQDVNCTEVPVAIHADQLTPTWRVYSTGSNVFQTRAGCLIGAEHVNNSYECDIPIGAGICASYQTQTNSPRRARSVASQSIIAYTMSLGAENSVAYSNNSIAIPTNFTISVTTEILPVSMTKTSVDCTMYICGDSTECSNLLLQYGSFCTQLNRALTGIAVEQDKNTQEVFAQVKQIYKTPPIKDFGGFNFSQILPDPSKPSKRSFIEDLLFNKVTLADAGFIKQYGDCLGDIAARDLICAQKFNGLTVLPPLLTDEMIAQYCSALLAGTITSGWTFGAGAALQIPFAMQMAYRFNGIGVTQNVLYENQKLIANQFNSAIGKIQDSLSSTASALGKLQDVVNQNAQALNTLVKQLSSNFGAISSVLNDILSRLDKVEAEVQIDRLITGRLQSLQTYVTQQLIRAAEIRASANLAATKMSECVLGQSKRFDFCGKGYHLMSFPQCAPHGVVFLHVTYVPAQEKNFTTAPAICHDGKAHFPREGVFVSNGTHWFVTQRNFYEPQIITTDNTFVSGNCDVVIGIVNNTVYDPLQPELDSGGGGSDIIKLLNEQVNKEMQSSNLYMSMSSWCYTHSLDGAGLFLFDHAAEEYEHAKKLIIFLNENNVPVQLTSISAPEHKFEGLTQIFQKAYEHEQHISESINNIVDHAIKSKDHATFNFLQWYVAEQHEEEVLFKDILDKIELIGNENHGLYLADQYVKGIAKSRKS

SEQ ID NO: 9624 - protein, 1315 aa, Artificial Sequence
  SARS-CoV-2/China/WF0028/2020__EPI_ISL_413791 spike protein (1-1147)(T874C_S1055C) Ferritin construct
MFVFLVLLPLVSSQCVNLTTRTQLPPAYTNSFTRGVYYPDKVFRSSVLHSTQDLFLPFFSNVTWFHAIHVSGTNGTKRFDNPVLPFNDGVYFASTEKSNIIRGWIFGTTLDSKTQSLLIVNNATNVVIKVCEFQFCNDPFLGVYYHKNNKSWMESEFRVYSSANNCTFEYVSQPFLMDLEGKQGNFKNLREFVFKNIDGYFKIYSKHTPINLVRDLPQGFSALEPLVDLPIGINITRFQTLLALHRSYLTPGDSSSGWTAGAAAYYVGYLQPRTFLLKYNENGTITDAVDCALDPLSETKCTLKSFTVEKGIYQTSNFRVQPTESIVRFPNITNLCPFGEVFNATRFASVYAWNRKRISNCVADYSVLYNSASFSTFKCYGVSPTKLNDLCFTNVYADSFVIRGDEVRQIAPGQTGKIADYNYKLPDDFTGCVIAWNSNNLDSKVGGNYNYLYRLFRKSNLKPFERDISTEIYQAGSTPCNGVEGFNCYFPLQSYGFQPTNGVGYQPYRVVVLSFELLHAPATVCGPKKSTNLVKNKCVNFNFNGLTGTGVLTESNKKFLPFQQFGRDIADTTDAVRDPQTLEILDITPCSFGGVSVITPGTNTSNQVAVLYQDVNCTEVPVAIHADQLTPTWRVYSTGSNVFQTRAGCLIGAEHVNNSYECDIPIGAGICASYQTQTNSPRRARSVASQSIIAYTMSLGAENSVAYSNNSIAIPTNFTISVTTEILPVSMTKTSVDCTMYICGDSTECSNLLLQYGSFCTQLNRALTGIAVEQDKNTQEVFAQVKQIYKTPPIKDFGGFNFSQILPDPSKPSKRSFIEDLLFNKVTLADAGFIKQYGDCLGDIAARDLICAQKFNGLTVLPPLLTDEMIAQYCSALLAGTITSGWTFGAGAALQIPFAMQMAYRFNGIGVTQNVLYENQKLIANQFNSAIGKIQDSLSSTASALGKLQDVVNQNAQALNTLVKQLSSNFGAISSVLNDILSRLDKVEAEVQIDRLITGRLQSLQTYVTQQLIRAAEIRASANLAATKMSECVLGQSKRVDFCGKGYHLMSFPQCAPHGVVFLHVTYVPAQEKNFTTAPAICHDGKAHFPREGVFVSNGTHWFVTQRNFYEPQIITTDNTFVSGNCDVVIGIVNNTVYDPLQPELESGGGGSDIIKLLNEQVNKEMQSSNLYMSMSSWCYTHSLDGAGLFLFDHAAEEYEHAKKLIIFLNENNVPVQLTSISAPEHKFEGLTQIFQKAYEHEQHISESINNIVDHAIKSKDHATFNFLQWYVAEQHEEEVLFKDILDKIELIGNENHGLYLADQYVKGIAKSRKS

SEQ ID NO: 9625 - protein, 1315 aa, Artificial Sequence
  SARS-CoV-2/2019-nCoV/USA-CruiseA-18/2020__MT159716.1 spike protein (1-1147)(T874C_S1055C) Ferritin construct
MFVFLVLLPLVSSQCVNLTTRTQLPPAYTNSFTRGVYYPDKVFRSSVLHSTQDLFLPFFSNVTWFHAIHVSGTNGTKRFDNPVLPFNDGVYFASTEKSNIIRGWIFGTTLDSKTQSLLIVNNATNVVIKVCEFQFCNDPFLGVYYHKNNKSWMESELRVYSSANNCTFEYVSQPFLMDLEGKQGNFKNLREFVFKNIDGYFKIYSKHTPINLVRDLPQGFSALEPLVDLPIGINITRFQTLLALHRSYLTPGDSSSGWTAGAAAYYVGYLQPRTFLLKYNENGTITDAVDCALDPLSETKCTLKSFTVEKGIYQTSNFRVQPTESIVRFPNITNLCPFGEVFNATRFASVYAWNRKRISNCVADYSVLYNSASFSTFKCYGVSPTKLNDLCFTNVYADSFVIRGDEVRQIAPGQTGKIADYNYKLPDDFTGCVIAWNSNNLDSKVGGNYNYLYRLFRKSNLKPFERDISTEIYQAGSTPCNGVEGFNCYFPLQSYGFQPTNGVGYQPYRVVVLSFELLHAPATVCGPKKSTNLVKNKCVNFNFNGLTGTGVLTESNKKFLPFQQFGRDIADTTDAVRDPQTLEILDITPCSFGGVSVITPGTNTSNQVAVLYQDVNCTEVPVAIHADQLTPTWRVYSTGSNVFQTRAGCLIGAEHVNNSYECDIPIGAGICASYQTQTNSPRRARSVASQSIIAYTMSLGAENSVAYSNNSIAIPTNFTISVTTEILPVSMTKTSVDCTMYICGDSTECSNLLLQYGSFCTQLNRALTGIAVEQDKNTQEVFAQVKQIYKTPPIKDFGGFNFSQILPDPSKPSKRSFIEDLLFNKVTLADAGFIKQYGDCLGDIAARDLICAQKFNGLTVLPPLLTDEMIAQYCSALLAGTITSGWTFGAGAALQIPFAMQMAYRFNGIGVTQNVLYENQKLIANQFNSAIGKIQDSLSSTASALGKLQDVVNQNAQALNTLVKQLSSNFGAISSVLNDILSRLDKVEAEVQIDRLITGRLQSLQTYVTQQLIRAAEIRASANLAATKMSECVLGQSKRVDFCGKGYHLMSFPQCAPHGVVFLHVTYVPAQEKNFTTAPAICHDGKAHFPREGVFVSNGTHWFVTQRNFYEPQIITTDNTFVSGNCDVVIGIVNNTVYDPLQPELDSGGGGSDIIKLLNEQVNKEMQSSNLYMSMSSWCYTHSLDGAGLFLFDHAAEEYEHAKKLIIFLNENNVPVQLTSISAPEHKFEGLTQIFQKAYEHEQHISESINNIVDHAIKSKDHATFNFLQWYVAEQHEEEVLFKDILDKIELIGNENHGLYLADQYVKGIAKSRKS

SEQ ID NO: 9626 - protein, 1315 aa, Artificial Sequence
  SARS-CoV-2/SARS-CoV-2/Yunnan-01/human/2020/CHN__MT049951.1 spike protein (1-1147)(T874C_S1055C) Ferritin construct
MFVFLVLLPLVSSQCVNLTTRTQLPPANTNSFTRGVYYPDKVFRSSVLHSTQDLFLPFFSNVTWFHAIHVSGTNGTKRFDNPVLPFNDGVYFASTEKSNIIRGWIFGTTLDSKTQSLLIVNNATNVVIKVCEFQFCNDPFLGVYYHKNNKSWMESEFRVYSSANNCTFEYVSQPFLMDLEGKQGNFKNLREFVFKNIDGYFKIYSKHTPINLVRDLPQGFSALEPLVDLPIGINITRFQTLLALHRSYLTPGDSSSGWTAGAAAYYVGYLQPRTFLLKYNENGTITDAVDCALDPLSETKCTLKSFTVEKGIYQTSNFRVQPTESIVRFPNITNLCPFGEVFNATRFASVYAWNRKRISNCVADYSVLYNSASFSTFKCYGVSPTKLNDLCFTNVYADSFVIRGDEVRQIAPGQTGKIADYNYKLPDDFTGCVIAWNSNNLDSKVGGNYNYLYRLFRKSNLKPFERDISTEIYQAGSTPCNGVEGFNCYFPLQSYGFQPTNGVGYQPYRVVVLSFELLHAPATVCGPKKSTNLVKNKCVNFNFNGLTGTGVLTESNKKFLPFQQFGRDIADTTDAVRDPQTLEILDITPCSFGGVSVITPGTNTSNQVAVLYQDVNCTEVPVAIHADQLTPTWRVYSTGSNVFQTRAGCLIGAEHVNNSYECDIPIGAGICASYQTQTNSPRRARSVASQSIIAYTMSLGAENSVAYSNNSIAIPTNFTISVTTEILPVSMTKTSVDCTMYICGDSTECSNLLLQYGSFCTQLNRALTGIAVEQDKNTQEVFAQVKQIYKTPPIKDFGGFNFSQILPDPSKPSKRSFIEDLLFNKVTLADAGFIKQYGDCLGDIAARDLICAQKFNGLTVLPPLLTDEMIAQYCSALLAGTITSGWTFGAGAALQIPFAMQMAYRFNGIGVTQNVLYENQKLIANQFNSAIGKIQDSLSSTASALGKLQDVVNQNAQALNTLVKQLSSNFGAISSVLNDILSRLDKVEAEVQIDRLITGRLQSLQTYVTQQLIRAAEIRASANLAATKMSECVLGQSKRVDFCGKGYHLMSFPQCAPHGVVFLHVTYVPAQEKNFTTAPAICHDGKAHFPREGVFVSNGTHWFVTQRNFYEPQIITTDNTFVSGNCDVVIGIVNNTVYDPLQPELDSGGGGSDIIKLLNEQVNKEMQSSNLYMSMSSWCYTHSLDGAGLFLFDHAAEEYEHAKKLIIFLNENNVPVQLTSISAPEHKFEGLTQIFQKAYEHEQHISESINNIVDHAIKSKDHATFNFLQWYVAEQHEEEVLFKDILDKIELIGNENHGLYLADQYVKGIAKSRKS

SEQ ID NO: 9627 - protein, 1315 aa, Artificial Sequence
  SARS-CoV-2/USA/WA-UW292/2020__EPI_ISL_418077 spike protein (1-1147)(T874C_S1055C) Ferritin construct
MFVFLVLLPLVSSQCVNLTTRTQLPPAYTNSFTRGVYYPDKVFRSSVLHSTQDLFLPFFSNVTWFHAIHVSGTNGTKRFDNPVLPFNDGVYFASTEKSNIIRGWIFGTTLDSKTQSLLIVNNATNVVIKVCEFQFCNDPFLGVYYHKNNKSWMESEFRVYSSANNCTFEYVSQPFLMDLEGKQGNFKNLREFVFKNIDGYFKIYSKHTPINLVRDLPQGFSALEPLVDLPIGINITRFQTLLALHRSYLTPGDSSSGWTAGAAAYYVGYLQPRTFLLKYNENGTITDAVDCALDPLSETKCTLKSFTVEKGIYQTSNFRVQPTESIVRFPNITNLCPFGEVFNATRFASVYAWNRKRISNCVADYSVLYNSASFSTFKCYGVSPTKLNDLCFTNVYADSFVIRGDEVRQIAPGQTGKIADYNYKLPDDFTGCVIAWNSNNLDSKVGGNYNYLYRLFRKSNLKPFERDISTEIYQASSTPCNGVEGFNCYFPLQSYGFQPTNGVGYQPYRVVVLSFELLHAPATVCGPKKSTNLVKNKCVNFNFNGLTGTGVLTESNKKFLPFQQFGRDIADTTDAVRDPQTLEILDITPCSFGGVSVITPGTNTSNQVAVLYQDVNCTEVPVAIHADQLTPTWRVYSTGSNVFQTRAGCLIGAEHVNNSYECDIPIGAGICASYQTQTNSPRRARSVASQSIIAYTMSLGAENSVAYSNNSIAIPTNFTISVTTEILPVSMTKTSVDCTMYICGDSTECSNLLLQYGSFCTQLNRALTGIAVEQDKNTQEVFAQVKQIYKTPPIKDFGGFNFSQILPDPSKPSKRSFIEDLLFNKVTLADAGFIKQYGDCLGDIAARDLICAQKFNGLTVLPPLLTDEMIAQYCSALLAGTITSGWTFGAGAALQIPFAMQMAYRFNGIGVTQNVLYENQKLIANQFNSAIGKIQDSLSSTASALGKLQDVVNQNAQALNTLVKQLSSNFGAISSVLNDILSRLDKVEAEVQIDRLITGRLQSLQTYVTQQLIRAAEIRASANLAATKMSECVLGQSKRVDFCGKGYHLMSFPQCAPHGVVFLHVTYVPAQEKNFTTAPAICHDGKAHFPREGVFVSNGTHWFVTQRNFYEPQIITTDNTFVSGNCDVVIGIVNNTVYDPLQPELDSGGGGSDIIKLLNEQVNKEMQSSNLYMSMSSWCYTHSLDGAGLFLFDHAAEEYEHAKKLIIFLNENNVPVQLTSISAPEHKFEGLTQIFQKAYEHEQHISESINNIVDHAIKSKDHATFNFLQWYVAEQHEEEVLFKDILDKIELIGNENHGLYLADQYVKGIAKSRKS

SEQ ID NO: 9628 - protein, 1315 aa, Artificial Sequence
  SARS-CoV-2/Iceland/192/2020__EPI_ISL_417819 spike protein (1-1147)(T874C_S1055C) Ferritin construct
MFVFFVLLPLVSSQCVNLTTRTQLPPAYTNSFTRGVYYPDKVFRSSVLHSTQDLFLPFFSNVTWFHAIHVSGTNGTKRFDNPVLPFNDGVYFASTEKSNIIRGWIFGTTLDSKTQSLLIVNNATNVVIKVCEFQFCNDPFLGVYYHKNNKSWMESEFRVYSSANNCTFEYVSQPFLMDLEGKQGNFKNLREFVFKNIDGYFKIYSKHTPINLVRDLPQGFSALEPLVDLPIGINITRFQTLLALHRSYLTPGDSSSGWTAGAAAYYVGYLQPRTFLLKYNENGTITDAVDCALDPLSETKCTLKSFTVEKGIYQTSNFRVQPTESIVRFPNITNLCPFGEVFNATRFASVYAWNRKRISNCVADYSVLYNSASFSTFKCYGVSPTKLNDLCFTNVYADSFVIRGDEVRQIAPGQTGKIADYNYKLPDDFTGCVIAWNSNNLDSKVGGNYNYLYRLFRKSNLKPFERDISTEIYQAGSTPCNGVEGFNCYFPLQSYGFQPTNGVGYQPYRVVVLSFELLHAPATVCGPKKSTNLVKNKCVNFNFNGLTGTGVLTESNKKFLPFQQFGRDIADTTDAVRDPQTLEILDITPCSFGGVSVITPGTNTSNQVAVLYQGVNCTEVPVAIHADQLTPTWRVYSTGSNVFQTRAGCLIGAEHVNNSYECDIPIGAGICASYQTQTNSPRRARSVASQSIIAYTMSLGAENSVAYSNNSIAIPTNFTISVTTEILPVSMTKTSVDCTMYICGDSTECSNLLLQYGSFCTQLNRALTGIAVEQDKNTQEVFAQVKQIYKTPPIKDFGGFNFSQILPDPSKPSKRSFIEDLLFNKVTLADAGFIKQYGDCLGDIAARDLICAQKFNGLTVLPPLLTDEMIAQYCSALLAGTITSGWTFGAGAALQIPFAMQMAYRFNGIGVTQNVLYENQKLIANQFNSAIGKIQDSLSSTASALGKLQDVVNQNAQALNTLVKQLSSNFGAISSVLNDILSRLDKVEAEVQIDRLITGRLQSLQTYVTQQLIRAAEIRASANLAATKMSECVLGQSKRVDFCGKGYHLMSFPQCAPHGVVFLHVTYVPAQEKNFTTAPAICHDGKAHFPREGVFVSNGTHWFVTQRNFYEPQIITTDNTFVSGNCDVVIGIVNNTVYDPLQPELDSGGGGSDIIKLLNEQVNKEMQSSNLYMSMSSWCYTHSLDGAGLFLFDHAAEEYEHAKKLIIFLNENNVPVQLTSISAPEHKFEGLTQIFQKAYEHEQHISESINNIVDHAIKSKDHATFNFLQWYVAEQHEEEVLFKDILDKIELIGNENHGLYLADQYVKGIAKSRKS

SEQ ID NO: 9629 - protein, 1315 aa, Artificial Sequence
  SARS-CoV-2/Belgium/ULG-6939/2020__EPI_ISL_417020 spike protein (1-1147)(T874C_S1055C) Ferritin construct
MFVFLVLLPLVSSQCVNLTTRTQLPPAYTNSFTRGVYYPDKVFRSSVLHSTQDLFLPFFSNVTWFHAIHVSGTNGTKRFDNPVLPFNDGVYFASTEKSNIIRGWIFGTTLDSKTQSLLIVNNATNVVIKVCEFQFCNDPFLGVYYHKNNKSWMESEFRVYSSANNCTFEYVSQPFLMDLEGKQGNFKNLREFVFKNIDGYFKIYSKHTPINLVRDLPQGFSALEPLVDLPIGINITRFQTLLALHRSYLTPGDSSSGWTAGAAAYYVGYLQPRTFLLKYNENGTITDAVDCALDPLSETKCTLKSFTVEKGIYQTSNFRVQPTESIVRFPNITNLCPFGEVFNATRFASVYAWNRKRISNCVADYSVLYNSASFSTFKCYGVSPTKLNDLCFTNVYADSFVIRGDEVRQIAPGQTGKIADYNYKLPDDFTGCVIAWNSNNLDSKVGGNYNYLYRLFRKSNLKPFERDISTEIYQAGSTPCNGVEGFNCYFPLQSYGFQPTNGVGYQPYRVVVLSFELLHAPATVCGPKKSTNLVKNKCVNFNFNGLTGTGVLTESNKKFLPFQQFGRDIADTTDAVRDPQTLEILDITPCSFGGVSVITPGTNTSNQVAVLYQGVNCTEVPVAIHADQLTPTWRVYSTGSNVFQTRAGCLIGAEHVNNSYECDIPIGAGICASYQTQTNSPRRARSVASQSIIAYTMSLGAENSVVYSNNSIAIPTNFTISVTTEILPVSMTKTSVDCTMYICGDSTECSNLLLQYGSFCTQLNRALTGIAVEQDKNTQEVFAQVKQIYKTPPIKDFGGFNFSQILPDPSKPSKRSFIEDLLFNKVTLADAGFIKQYGDCLGDIAARDLICAQKFNGLTVLPPLLTDEMIAQYCSALLAGTITSGWTFGAGAALQIPFAMQMAYRFNGIGVTQNVLYENQKLIANQFNSAIGKIQDSLSSTASALGKLQDVVNQNAQALNTLVKQLSSNFGAISSVLNDILSRLDKVEAEVQIDRLITGRLQSLQTYVTQQLIRAAEIRASANLAATKMSECVLGQSKRVDFCGKGYHLMSFPQCAPHGVVFLHVTYVPAQEKNFTTAPAICHDGKAHFPREGVFVSNGTHWFVTQRNFYEPQIITTDNTFVSGNCDVVIGIVNNTVYDPLQPELDSGGGGSDIIKLLNEQVNKEMQSSNLYMSMSSWCYTHSLDGAGLFLFDHAAEEYEHAKKLIIFLNENNVPVQLTSISAPEHKFEGLTQIFQKAYEHEQHISESINNIVDHAIKSKDHATFNFLQWYVAEQHEEEVLFKDILDKIELIGNENHGLYLADQYVKGIAKSRKS

SEQ ID NO: 9630 - protein, 1315 aa, Artificial Sequence
  SARS-CoV-2/France/HF2496/2020__EPI_ISL_418231 spike protein (1-1147)(T874C_S1055C) Ferritin construct
MFVFLVLLPLVSSQCVNLTTRTQLPPAYTNSFTRGVYYPDKVFRSSVLHSTQDLFLPFFSNVTWFHAIHVSGTNGTKRFDNPVLPFNDGVYFASTEKSNIIRGWIFGTTLDSKTQSLLIVNNATNVVIKVCEFQFCNDPFLGVYYHKNNKSWMESEFRVYSSANNCTFEYVSQPFLMDLEGKQGNFKNLREFVFKNIDGYFKIYSKHTPINLVRDLPQGFSALEPLVDLPIGINITRFQTLLALHRSYLTPGDSSSGWTAGAAAYYVGYLQPRTFLLKYNENGTITDAVDCALDPLSETKCTLKSFTVEKGIYQTSNFRVQPTESIVRFPNITNLCPFGEVFNATRFASVYAWNRKRISNCVADYSVLYNSASFSTFKCYGVSPTKLNDLCFTNVYADSFVIRGDEVRQIAPGQTGKIADYNYKLPDDFTGCVIAWNSNNLDSKVGGNYNYLYRLFRKSNLKPFERDISTEIYQAGSTPCNGVEGFNCYFPLQSYGFQPTNGVGYQPYRVVVLSFELLHAPATVCGPKKSTNLVKNKCVNFNFNGLTGTGVLTESNKKFLPFQQFGRDIADTTDAVRDPQTLEILDITPCSFGGVSVITPGTNTSNQVAVLYQGVNCTEVPVAIHADQLTPTWRVYSTGSNVFQTRAGCLIGAEHVNNSYECDIPIGAGICASYQTQTNSPRRARSVASQSIIAYTMSLGAENSVAYSNNSIAIPTNFTISVTTEILPVSMTKTSVDCTMYICGDSTECSNLLLQYGSFCTQLNRALTGIAVEQDKNTQEVFAQVKQIYKTPPIKDFGGFNFSQILPDPSKPSKRSFIEDLLFNKVTLADAGFIKQYGDCLGDIVARDLICAQKFNGLTVLPPLLTDEMIAQYCSALLAGTITSGWTFGAGAALQIPFAMQMAYRFNGIGVTQNVLYENQKLIANQFNSAIGKIQDSLSSTASALGKLQDVVNQNAQALNTLVKQLSSNFGAISSVLNDILSRLDKVEAEVQIDRLITGRLQSLQTYVTQQLIRAAEIRASANLAATKMSECVLGQSKRVDFCGKGYHLMSFPQCAPHGVVFLHVTYVPAQEKNFTTAPAICHDGKAHFPREGVFVSNGTHWFVTQRNFYEPQIITTDNTFVSGNCDVVIGIVNNTVYDPLQPELDSGGGGSDIIKLLNEQVNKEMQSSNLYMSMSSWCYTHSLDGAGLFLFDHAAEEYEHAKKLIIFLNENNVPVQLTSISAPEHKFEGLTQIFQKAYEHEQHISESINNIVDHAIKSKDHATFNFLQWYVAEQHEEEVLFKDILDKIELIGNENHGLYLADQYVKGIAKSRKS

SEQ ID NO: 9631 - protein, 1315 aa, Artificial Sequence
  SARS-CoV-2/USA/WA-UW291/2020__EPI_ISL_418076 spike protein (1-1147)(T874C_S1055C) Ferritin construct
MFVFLVLLPLVSSQCVNLTTRTQLPPAYTNSFTRGVYYPDKVFRSSVLHSTQDLFLPFFSNVTWFHAIHVSGTNGTKRFDNPVLPFNDGVYFASTEKSNIIRGWIFGTTLDSKTQSLLIVNNATNVVIKVCEFQFCNDPFLGVYYHKNNKSWMESEFRVYSSANNCTFEYVSQPFLMDLEGKQGNFKNLREFVFKNIDGYFKIYSKHTPINLVRDLPQGFSALEPLVDLPIGINITRFQTLLALHRSYLTPGDSSSGWTAGAAAYYVGYLQPRTFLLKYNENGTITDAVDCALDPLSETKCTLKSFTVEKGIYQTSNFRVQPTESIVRFPNITNLCPFGEVFNATRFASVYAWNRKRISNCVADYSVLYNSASFSTFKCYGVSPTKLNDLCFTNVYADSFVIRGDEVRQIAPGQTGKIADYNYKLPDDFTGCVIAWNSNNLDSKVGGNYNYLYRLFRKSNLKPFERDISTEIYQAGSTPCNGVEGFNCYFPLQSYGFQPTNGVGYQPYRVVVLSFELLHAPATVCGPKKSTNLVKNKCVNFNFNGLTGTGVLTESNKKFLPFQQFGRDIADTTDAVRDPQTLEILDITPCSFGGVSVITPGTNTSNQVAVLYQGVNCTEVPVAIHADQLTPTWRVYSTGSNVFQTRAGCLIGAEHVNNSYECDIPIGAGICASYQTQTNSPRRARSVASQSIIAYTMSLGAENSVAYSNNSIAIPTNFTISVTTEILPVSMTKTSVDCTMYICGDSTECSNLLLQYGSFCTQLNRALTGIAVEQDKNTQEVFAQVKQIYKTPPIKDFGGFNFSQILPDPSKPSKRSFIEDLLFNKVTLADAGFIKQYGDCLGDIAARDLICAQKFNGLTVLPPLLTDEMIAQYCSALLAGTITSGWTFGAGAALQIPFAMQMAYRFNGIGVTQNVLYENQKLIANQFNSAIGKIQYSLSSTASALGKLQDVVNQNAQALNTLVKQLSSNFGAISSVLNDILSRLDKVEAEVQIDRLITGRLQSLQTYVTQQLIRAAEIRASANLAATKMSECVLGQSKRVDFCGKGYHLMSFPQCAPHGVVFLHVTYVPAQEKNFTTAPAICHDGKAHFPREGVFVSNGTHWFVTQRNFYEPQIITTDNTFVSGNCDVVIGIVNNTVYDPLQPELDSGGGGSDIIKLLNEQVNKEMQSSNLYMSMSSWCYTHSLDGAGLFLFDHAAEEYEHAKKLIIFLNENNVPVQLTSISAPEHKFEGLTQIFQKAYEHEQHISESINNIVDHAIKSKDHATFNFLQWYVAEQHEEEVLFKDILDKIELIGNENHGLYLADQYVKGIAKSRKS

SEQ ID NO: 9632 - protein, 1315 aa, Artificial Sequence; identical to SEQ ID NO: 9595
  SARS-CoV-2/Portugal/PT0034/2020__EPI_ISL_418019 spike protein (1-1147)(T874C_S1055C) Ferritin construct

SEQ ID NO: 9633 - protein, 1315 aa, Artificial Sequence; identical to SEQ ID NO: 9587
  SARS-CoV-2/Iceland/202/2020__EPI_ISL_417750 spike protein (1-1147)(T874C_S1055C) Ferritin construct

SEQ ID NO: 9634 - protein, 1315 aa, Artificial Sequence
  SARS-CoV-2/USA/WA-UW261/2020__EPI_ISL_418046 spike protein (1-1147)(T874C_S1055C) Ferritin construct
MFVFLVLLPLVSSQCVNLTTRTQLPPAYTNSFTRGVYYPDKVFRSSVLHSTQDLFLPFFSNVTWFHAIHVSGTNGTKRFDNPVLPFNDGVYFASTEKSNIIRGWIFGTTLDSKTQSLLIVNNATNVVIKVCEFQFCNDPFLGVYYHKNNKSWMESEFRVYSSANNCTFEYVSQPFLMDLEGKQGNFKNLREFVFKNIDGYFKIYSKHTPINLVRDLPQGFSALEPLVDLPIGINITRFQTLLALHRSYLTPGDSSSGWTAGAAAYYVGYLQPRTFLLKYNENGTITDAVDCALDPLSETKCTLKSFTVEKGIYQTSNFRVQPTESIVRFPNITNLCPFGEVFNATRFTSVYAWNRKRISNCVADYSVLYNSASFSTFKCYGVSPTKLNDLCFTNVYADSFVIRGDEVRQIAPGQTGKIADYNYKLPDDFTGCVIAWNSNNLDSKVGGNYNYLYRLFRKSNLKPFERDISTEIYQAGSTPCNGVEGFNCYFPLQSYGFQPTNGVGYQPYRVVVLSFELLHAPATVCGPKKSTNLVKNKCVNFNFNGLTGTGVLTESNKKFLPFQQFGRDIADTTDAVRDPQTLEILDITPCSFGGVSVITPGTNTSNQVAVLYQDVNCTEVPVAIHADQLTPTWRVYSTGSNVFQTRAGCLIGAEHVNNSYECDIPIGAGICASYQTQTNSPRRARSVASQSIIAYTMSLGAENSVAYSNNSIAIPTNFTISVTTEILPVSMTKTSVDCTMYICGDSTECSNLLLQYGSFCTQLNRALTGIAVEQDKNTQEVFAQVKQIYKTPPIKDFGGFNFSQILPDPSKPSKRSFIEDLLFNKVTLADAGFIKQYGDCLGDIAARDLICAQKFNGLTVLPPLLTDEMIAQYCSALLAGTITSGWTFGAGAALQIPFAMQMAYRFNGIGVTQNVLYENQKLIANQFNSAIGKIQDSLSSTASALGKLQDVVNQNAQALNTLVKQLSSNFGAISSVLNDILSRLDKVEAEVQIDRLITGRLQSLQTYVTQQLIRAAEIRASANLAATKMSECVLGQSKRVDFCGKGYHLMSFPQCAPHGVVFLHVTYVPAQEKNFTTAPAICHDGKAHFPREGVFVSNGTHWFVTQRNFYEPQIITTDNTFVSGNCDVVIGIVNNTVYDPLQPELDSGGGGSDIIKLLNEQVNKEMQSSNLYMSMSSWCYTHSLDGAGLFLFDHAAEEYEHAKKLIIFLNENNVPVQLTSISAPEHKFEGLTQIFQKAYEHEQHISESINNIVDHAIKSKDHATFNFLQWYVAEQHEEEVLFKDILDKIELIGNENHGLYLADQYVKGIAKSRKS

SEQ ID NO: 9635 - protein, 1315 aa, Artificial Sequence
  SARS-CoV-2/Portugal/PT0035/2020__EPI_ISL_418020 spike protein (1-1147)(T874C_S1055C) Ferritin construct
MFVFLVLLPLVSSQCVNLTTRTQLPPAYTNSFTRGVYYPDKVFRSSVLHSTQDLFLPFFSNVTWFHAIHVSGTNGTKRFDNPVLPFNDGVYFASTEKSNIIRGWIFGTTLDSKTQSLLIVNNATNVVIKVCEFQFCNDPFLGVYYHKNNKSWMESEFRVYSSANNCTFEYVSQPFLMDLEGKQGNFKNLREFVFKNIDGYFKIYSKHTPINLVRDLPQGFSALEPLVDLPIGINITRFQTLLALHRSYLTPGDSSSGWTAGAAAYYVGYLQPRTFLLKYNENGTITDAVDCALDPLSETKCTLKSFTVEKGIYQTSNFRVQPTESIVRFPNITNLCPFGEVFNATRFASVYAWNRKRISNCVADYSVLYNSASFSTFKCYGVSPTKLNDLCFTNVYADSFVIRGDEVRQIAPGQTGKIADYNYKLPDDFTGCVIAWNSNNLDSKVGGNYNYLYRLFRKSNLKPFERDISTEIYQAGSTPCNGVEGFNCYFPLQSYGFQPTNGVGYQPYRVVVLSFELLHAPATVCGPKKSTNLVKNKCVNFNFNGLTGTGVLTESNKKFLPFQQFGRDIADTTDAVRDPQTLEILDITPCSFGGVSVITPGTNTSNQVAVLYQDVNCTEVPVAIHADQLTPTWRVYSTGSNVFQTRAGCLIGAEHVNNSYECDIPIGAGICASYQTQTNSPRRARSVASQSIIAYTMSLGAENSVAYSNNSIAIPTNFTISVTTEILPVSMTKTSVDCTMYICGDSTECSNLLLQYGSFCTQLNRALTGIAVEQDKNTQEVFAQVKQIYKTPPIKDFGGFNFSQILPDPSKPSKRSFIEDLLFNKVTLADAGFIKQYGDCLGDISARDLICAQKFNGLTVLPPLLTDEMIAQYCSALLAGTITSGWTFGAGAALQIPFAMQMAYRFNGIGVTQNVLYENQKLIANQFNSAIGKIQDSLSSTASALGKLQDVVNQNAQALNTLVKQLSSNFGAISSVLNDILSRLDKVEAEVQIDRLITGRLQSLQTYVTQQLIRAAEIRASANLAATKMSECVLGQSKRVDFCGKGYHLMSFPQCAPHGVVFLHVTYVPAQEKNFTTAPAICHDGKAHFPREGVFVSNGTHWFVTQRNFYEPQIITTDNTFVSGNCDVVIGIVNNTVYDPLQPELDSGGGGSDIIKLLNEQVNKEMQSSNLYMSMSSWCYTHSLDGAGLFLFDHAAEEYEHAKKLIIFLNENNVPVQLTSISAPEHKFEGLTQIFQKAYEHEQHISESINNIVDHAIKSKDHATFNFLQWYVAEQHEEEVLFKDILDKIELIGNENHGLYLADQYVKGIAKSRKS

SEQ ID NO: 9636 - protein, 1315 aa, Artificial Sequence
  SARS-CoV-2/USA/NY-NYUMC7/2020__EPI_ISL_418192 spike protein (1-1147)(T874C_S1055C) Ferritin construct
MFVFLVLLPLVSSQCVNLTTRTQLPPAYTNSFTRGVYYPDKVFRSSVLHSTQDLFLPFFSNVTWFHAIHVSGTNGTKRFDNPVLPFNDGVYFASTEKSNIIRGWIFGTTLDSKTQSLLIVNNATNVVIKVCEFQFCNDPFLGVYHHKNNKSWMESEFRVYSSANNCTFEYVSQPFLMDLEGKQGNFKNLREFVFKNIDGYFKIYSKHTPINLVRDLPQGFSALEPLVDLPIGINITRFQTLLALHRSYLTPGDSSSGWTAGAAAYYVGYLQPRTFLLKYNENGTITDAVDCALDPLSETKCTLKSFTVEKGIYQTSNFRVQPTESIVRFPNITNLCPFGEVFNATRFASVYAWNRKRISNCVADYSVLYNSASFSTFKCYGVSPTKLNDLCFTNVYADSFVIRGDEVRQIAPGQTGKIADYNYKLPDDFTGCVIAWNSNNLDSKVGGNYNYLYRLFRKSNLKPFERDISTEIYQAGSTPCNGVEGFNCYFPLQSYGFQPTNGVGYQPYRVVVLSFELLHAPATVCGPKKSTNLVKNKCVNFNFNGLTGTGVLTESNKKFLPFQQFGRDIADTTDAVRDPQTLEILDITPCSFGGVSVITPGTNTSNQVAVLYQGVNCTEVPVAIHADQLTPTWRVYSTGSNVFQTRAGCLIGAEHVNNSYECDIPIGAGICASYQTQTNSPRRARSVASQSIIAYTMSLGAENSVAYSNNSIAIPTNFTISVTTEILPVSMTKTSVDCTMYICGDSTECSNLLLQYGSFCTQLNRALTGIAVEQDKNTQEVFAQVKQIYKTPPIKDFGGFNFSQILPDPSKPSKRSFIEDLLFNKVTLADAGFIKQYGDCLGDIAARDLICAQKFNGLTVLPPLLTDEMIAQYCSALLAGTITSGWTFGAGAALQIPFAMQMAYRFNGIGVTQNVLYENQKLIANQFNSAIGKIQDSLSSTASALGKLQDVVNQNAQALNTLVKQLSSNFGAISSVLNDILSRLDKVEAEVQIDRLITGRLQSLQTYVTQQLIRAAEIRASANLAATKMSECVLGQSKRVDFCGKGYHLMSFPQCAPHGVVFLHVTYVPAQEKNFTTAPAICHDGKAHFPREGVFVSNGTHWFVTQRNFYEPQIITTDNTFVSGNCDVVIGIVNNTVYDPLQPELDSGGGGSDIIKLLNEQVNKEMQSSNLYMSMSSWCYTHSLDGAGLFLFDHAAEEYEHAKKLIIFLNENNVPVQLTSISAPEHKFEGLTQIFQKAYEHEQHISESINNIVDHAIKSKDHATFNFLQWYVAEQHEEEVLFKDILDKIELIGNENHGLYLADQYVKGIAKSRKS

SEQ ID NO: 9637 - protein, 1315 aa, Artificial Sequence
  SARS-CoV-2/Iceland/189/2020__EPI_ISL_417709 spike protein (1-1147)(T874C_S1055C) Ferritin construct
MFVFLVLLPLVSSQCVNLTTRTQLPPAYTNSFTRGVYYPDKVFRSSVLHSTQDLFLPFFSNVTWFHAIHVSGTNGTKRFDNPVLPFNDGVYFASTEKSNIIRGWIFGTTLDSKTQSLLIVNNATNVVIKVCEFQFCNDPFLGVYYHKNNKSWMESEFRVYSSANNCTFEYVSQPFLMDLEGKQGNFKNLREFVFKNIDGYFKIYSKHTPINLVRDLPQGFSALEPLVDLPIGINITRFQTLLALHRSYLTPGDSSSGWTAGAAAYYVGYLQPRTFLLKYNENGTITDAVDCALDPLSETKCTLKSFTVEKGIYQTSNFRVQPTESIVRFPNITNLCPFGEVFNATRFASVYAWNRKRISNCVADYSVLYNSASFSTFKCYGVSPTKLNDLCFTNVYADSFVIRGDEVRQIAPGQTGKIADYNYKLPDDFTGCVIAWNSNNLDSKVGGNYNYLYRLFRKSNLKPFERDISTEIYQAGSTPCNGVEGFNCYFPLQSYGFQPTNGVGYQPYRVVVLSFELLHAPATVCGPKKSTNLVKNKCVNFNFNGLTGTGVLTESNKKFLPFQQFGRDIADTTDAVRDPQTLEILDITPCSFGGVSVITPGTNTSNQVAVLYQGVNCTEVPVAIHADQLTPTWRVYSTGSNVFQTRAGCLIGAEHVNNSYECDIPIGAGICASYQTQTNSPRRARSVASQSIIAYTMSLGAENSVAYSNNSIAIPTNFTISVTTEILPVSMTKTSVDCTMYICGDSTECSNLLLQYGSFCTQLNRALTGIAVEQDKNTQEVFAQVKQIYKTPPIKDFGGFNFSQILPDPSKPSKRSFIEDLLFNKVTLADAGFTKQYGDCLGDIAARDLICAQKFNGLTVLPPLLTDEMIAQYCSALLAGTITSGWTFGAGAALQIPFAMQMAYRFNGIGVTQNVLYENQKLIANQFNSAIGKIQDSLSSTASALGKLQDVVNQNAQALNTLVKQLSSNFGAISSVLNDILSRLDKVEAEVQIDRLITGRLQSLQTYVTQQLIRAAEIRASANLAATKMSECVLGQSKRVDFCGKGYHLMSFPQCAPHGVVFLHVTYVPAQEKNFTTAPAICHDGKAHFPREGVFVSNGTHWFVTQRNFYEPQIITTDNTFVSGNCDVVIGIVNNTVYDPLQPELDSGGGGSDIIKLLNEQVNKEMQSSNLYMSMSSWCYTHSLDGAGLFLFDHAAEEYEHAKKLIIFLNENNVPVQLTSISAPEHKFEGLTQIFQKAYEHEQHISESINNIVDHAIKSKDHATFNFLQWYVAEQHEEEVLFKDILDKIELIGNENHGLYLADQYVKGIAKSRKS

SEQ ID NO: 9638 - protein, 1315 aa, Artificial Sequence
  SARS-CoV-2/Australia/NSW56/2020__EPI_ISL_417408 spike protein (1-1147)(T874C_S1055C) Ferritin construct
MFVFLVLLPLVSSQCVNLTTRTQLPPAYTNSFTRGVYYPDKVFRSSVLHSTQDLFLPFFSNVTWFHAIHVSGTNGTKRFDNPVLPFNDGVYFASTEKSNIIRGWIFGTTLDSKTQSLLIVNNATNVVIKVCEFQFCNDPFLGVYYHKNNKSWMESEFRVYSSANNCTFEYVSQPFLMDLEGKQGNFKNLREFVFKNIDGYFKIYSKHTPINLVRDLPQGFSALEPLVDLPIGINITRFQTLLALHRSYLTPGDSSSGWTAGAAAYYVGYLQPRTFLLKYNENGTITDAVDCALDPLSETKCTLKSFTVEKGIYQTSNFRVQPTESIVRFPNITNLCPFGEVFNATRFASVYAWNRKRISNCVADYSVLYNSASFSTFKCYGVSPTKLNDLCFTNVYADSFVIRGDEVRQIAPGQTGKIADYNYKLPDDFTGCVIAWNSNNLDSKVGGNYNYLYRLFRKSNLKPFERDISTEIYQAGSTPCNGVEGFNCYFPLQSYGFQPTNGVGYQPYRVVVLSFELLHAPATVCGPKKSTNLVKNKCVNFNFNGLTGTGVLTESNKKFLPFQQFGRDIADTTDAVRDPQTLEILDITPCSFGGVSVITPGTNTSNQVAVLYQDVNCTEVPVAIHADQLTPTWRVYSTGSNVFQTRAGCLIGAEHVNNSYECDIPIGAGICASYQTQTNSPRRARSVASQSIIAYTMSLGAENSVAYSNNSIAIPTNFTISVTTEILPVSMTKTSVDCTMYICGDSTECSNLLLQYGSFCTQLNRALTGIAVEQDKNTQEVFAQVKQIYKTPPIKDFGGFNFSQILPDSSKPSKRSFIEDLLFNKVTLADAGFIKQYGDCLGDIAARDLICAQKFNGLTVLPPLLTDEMIAQYCSALLAGTITSGWTFGAGAALQIPFAMQMAYRFNGIGVTQNVLYENQKLIANQFNSAIGKIQDSLSSTASALGKLQDVVNQNAQALNTLVKQLSSNFGAISSVLNDILSRLDKVEAEVQIDRLITGRLQSLQTYVTQQLIRAAEIRASANLAATKMSECVLGQSKRVDFCGKGYHLMSFPQCAPHGVVFLHVTYVPAQEKNFTTAPAICHDGKAHFPREGVFVSNGTHWFVTQRNFYEPQIITTDNTFVSGNCDVVIGIVNNTVYDPLQPELDSGGGGSDIIKLLNEQVNKEMQSSNLYMSMSSWCYTHSLDGAGLFLFDHAAEEYEHAKKLIIFLNENNVPVQLTSISAPEHKFEGLTQIFQKAYEHEQHISESINNIVDHAIKSKDHATFNFLQWYVAEQHEEEVLFKDILDKIELIGNENHGLYLADQYVKGIAKSRKS

SEQ ID NO: 9639 - protein, 1315 aa, Artificial Sequence
  SARS-CoV-2/Iceland/280/2020__EPI_ISL_417608 spike protein (1-1147)(T874C_S1055C) Ferritin construct
MFVFLVLLPLVSSQCVNLTTRTQLPPAYTNSFTRGVYYPDKVFRSSVLHSTQDLFLPFFSNVTWFHAIHVSGTNGTKRFDNPVLPFNDGVYFASTEKSNIIRGWIFGTTLDSKTQSLLIVNNATNVVIKVCEFQFCNDPFLGVYYHKNNKSWMESEFRVYSSANNCTFEYVSQPFLMDLEGKQGNFKNLREFVFKNIDGYFKIYSKHTPINLVRDLPQGFSALEPLVDLPIGINITRFQTLLALHRSYLTPGDSSSGWTAGAAAYYVGYLQPRTFLLKYNENGTITDAVDCALDPLSETKCTLKSFTVEKGIYQTSNFRVQPTESIVRFPNITNLCPFGEVFNATRFASVYAWNRKRISNCVADYSVLYNSASFSTFKCYGVSPTKLNDLCFTNVYADSFVIRGDEVRQIAPGQTGKIADYNYKLPDDFTGCVIAWNSNNLDSKVGGNYNYLYRLFRKSNLKPFERDISTEIYQAGSTPCNGVEGFNCYFPLQSYGFQPTNGVGYQPYRVVVLSFELLHAPATVCGPKKSTNLVKNKCVNFNFNGLTGTGVLTESNKKFLPFQQFGRDIADTTDAVRDPQTLEILDITPCSFGGVSVITPGTNTSNQVAVLYQGVNCTEVPVAIHADQLTPTWRVYSTGSNVFQTRAGCLIGAEHVNNSYECDIPIGAGICASYHTQTNSPRRARSVASQSIIAYTMSLGAENSVAYSNNSIAIPTNFTISVTTEILPVSMTKTSVDCTMYICGDSTECSNLLLQYGSFCTQLNRALTGIAVEQDKNTQEVFAQVKQIYKTPPIKDFGGFNFSQILPDPSKPSKRSFIEDLLFNKVTLADAGFIKQYGDCLGDIAARDLICAQKFNGLTVLPPLLTDEMIAQYCSALLAGTITSGWTFGAGAALQIPFAMQMAYRFNGIGVTQNVLYENQKLIANQFNSAIGKIQDSLSSTASALGKLQDVVNQNAQALNTLVKQLSSNFGAISSVLNDILSRLDKVEAEVQIDRLITGRLQSLQTYVTQQLIRAAEIRASANLAATKMSECVLGQSKRVDFCGKGYHLMSFPQCAPHGVVFLHVTYVPAQEKNFTTAPAICHDGKAHFPREGVFVSNGTHWFVTQRNFYEPQIITTDNTFVSGNCDVVIGIVNNTVYDPLQPELDSGGGGSDIIKLLNEQVNKEMQSSNLYMSMSSWCYTHSLDGAGLFLFDHAAEEYEHAKKLIIFLNENNVPVQLTSISAPEHKFEGLTQIFQKAYEHEQHISESINNIVDHAIKSKDHATFNFLQWYVAEQHEEEVLFKDILDKIELIGNENHGLYLADQYVKGIAKSRKS

SEQ ID NO: 9640 - protein, 1315 aa, Artificial Sequence; identical to SEQ ID NO: 9595
  SARS-CoV-2/Iceland/247/2020__EPI_ISL_417575 spike protein (1-1147)(T874C_S1055C) Ferritin construct

SEQ ID NO: 9641 - protein, 1315 aa, Artificial Sequence
  SARS-CoV-2/Iceland/238/2020__EPI_ISL_417566 spike protein (1-1147)(T874C_S1055C) Ferritin construct
MFVFLVLLPLVSSQCVNLTTRTQLPPAYTNSFTRGVYYPDKVFRSSVLHSTQDLFLPFFSNVTWFHAIHVSGTNGTKRFDNPVLPFNDGVYFASTEKSNIIRGWIFGTTLDSKTQSLLIVNNATNVVIKVCEFQFCNDPFLGVYYHKNNKSWMESEFRVYSSANNCTFEYVSQPFLMDLEGKQGNFKNLREFVFKNIDGYFKIYSKHTPINLVRDLPQGFSALEPLVDLPIGINITRFQTLLALHRSYLTPGDSSSGWTAGAAAYYVGYLQPRTFLLKYNENGTITDAVDCALDPLSETKCTLKSFTVEKGIYQTSNFRVQPTESIVRFPNITNLCPFGEVFNATRFASVYAWNRKRISNCVADYSVLYNSASFSTFKCYGVSPTKLNDLCFTNVYADSFVIRGDEVRQIAPGQTGKIADYNYKLPDDFTGCVIAWNSNNLDSKVGGNYNYLYRLFRKSNLKPFERDISTEIYQAGSTPCNGVEGFNCYFPLQSYGFQPTNGVGYQPYRVVVLSFELLHAPATVCGPKKSTNLVKNKCVNFNFNGLTGTGVLTESNKKFLPFQQFGRDIADTTDAVRDPQTLEILDITPCSFGGVSVITPGTNTSNQVAVLYQGVNCTEVPVAIHADQLTPTWRVYSTGSNVFQTRAGCLIGAEHVNNSYECDIPIGAGICASYQTQTNSPRRARSVASQSIIAYTMSLGAENSVAYSNNSIAIPTNFTISVTTEILPVSMTKTSVDCTMYICGDSTECSNLLLQYGSFCTQLNRALTGIAVEQDKNTQEVFAQVKQIYKTPPIKDFGGFNFSQILPDPSKPSKRSFIEDLLFNKVTLADVGFIKQYGDCLGDIAARDLICAQKFNGLTVLPPLLTDEMIAQYCSALLAGTITSGWTFGAGAALQIPFAMQMAYRFNGIGVTQNVLYENQKLIANQFNSAIGKIQDSLSSTASALGKLQDVVNQNAQALNTLVKQLSSNFGAISSVLNDILSRLDKVEAEVQIDRLITGRLQSLQTYVTQQLIRAAEIRASANLAATKMSECVLGQSKRVDFCGKGYHLMSFPQCAPHGVVFLHVTYVPAQEKNFTTAPAICHDGKAHFPREGVFVSNGTHWFVTQRNFYEPQIITTDNTFVSGNCDVVIGIVNNTVYDPLQPELDSGGGGSDIIKLLNEQVNKEMQSSNLYMSMSSWCYTHSLDGAGLFLFDHAAEEYEHAKKLIIFLNENNVPVQLTSISAPEHKFEGLTQIFQKAYEHEQHISESINNIVDHAIKSKDHATFNFLQWYVAEQHEEEVLFKDILDKIELIGNENHGLYLADQYVKGIAKSRKS

SEQ ID NO: 9642 - protein, 1315 aa, Artificial Sequence
  SARS-CoV-2/Greece/16/2020__EPI_ISL_418265 spike protein (1-1147)(T874C_S1055C) Ferritin construct
MFVFLVLLPLVSSQCVNLTTRTQLPPAYTNSFTRGVYYPDKVFRSSVLHSTQDLFLPFFSNVTWFHAIHVSGTNGTKRFDNPVLPFNDGVYFASTEKSNIIRGWIFGTTLDSKTQSLLIVNNATNVVIKVCEFQFCNDPFLGVYYHKNNKSWMESEFRVYSSANNCTFEYVSQPFLMDLEGKQGNFKNLREFVFKNVDGYFKIYSKHTPINLVRDLPQGFSALEPLVDLPIGINITRFQTLLALHRSYLTPGDSSSGWTAGAAAYYVGYLQPRTFLLKYNENGTITDAVDCALDPLSETKCTLKSFTVEKGIYQTSNFRVQPTESIVRFPNITNLCPFGEVFNATRFASVYAWNRKRISNCVADYSVLYNSASFSTFKCYGVSPTKLNDLCFTNVYADSFVIRGDEVRQIAPGQTGKIADYNYKLPDDFTGCVIAWNSNNLDSKVGGNYNYLYRLFRKSNLKPFERDISTEIYQAGSTPCNGVEGFNCYFPLQSYGFQPTNGVGYQPYRVVVLSFELLHAPATVCGPKKSTNLVKNKCVNFNFNGLTGTGVLTESNKKFLPFQQFGRDIADTTDAVRDPQTLEILDITPCSFGGVSVITPGTNTSNQVAVLYQDVNCTEVPVAIHADQLTPTWRVYSTGSNVFQTRAGCLIGAEHVNNSYECDIPIGAGICASYQTQTNSPRRARSVASQSIIAYTMSLGAENSVAYSNNSIAIPTNFTISVTTEILPVSMTKTSVDCTMYICGDSTECSNLLLQYGSFCTQLNRALTGIAVEQDKNTQEVFAQVKQIYKTPPIKDFGGFNFSQILPDPSKPSKRSFIEDLLFNKVTLADAGFIKQYGDCLGDIAARDLICAQKFNGLTVLPPLLTDEMIAQYCSALLAGTITSGWTFGAGAALQIPFAMQMAYRFNGIGVTQNVLYENQKLIANQFNSAIGKIQDSLSSTASALGKLQDVVNQNAQALNTLVKQLSSNFGAISSVLNDILSRLDKVEAEVQIDRLITGRLQSLQTYVTQQLIRAAEIRASANLAATKMSECVLGQSKRVDFCGKGYHLMSFPQCAPHGVVFLHVTYVPAQEKNFTTAPAICHDGKAHFPREGVFVSNGTHWFVTQRNFYEPQIITTDNTFVSGNCDVVIGIVNNTVYDPLQPELDSGGGGSDIIKLLNEQVNKEMQSSNLYMSMSSWCYTHSLDGAGLFLFDHAAEEYEHAKKLIIFLNENNVPVQLTSISAPEHKFEGLTQIFQKAYEHEQHISESINNIVDHAIKSKDHATFNFLQWYVAEQHEEEVLFKDILDKIELIGNENHGLYLADQYVKGIAKSRKS

SEQ ID NO: 9643 - protein, 1315 aa, Artificial Sequence
  SARS-CoV-2/Iceland/319/2020__EPI_ISL_417648 spike protein (1-1147)(T874C_S1055C) Ferritin construct
MFVFLVLLPLVSSQCVNLTTRTQLPPAYTNSFTRGVYYPDKVFRSSVLHSTQDLFLPFFSNVTWFHAIHVSGTNGTKRFDNPVLPFNDGVYFASTEKSNIIRGWIFGTTLDSKTQSLLIVNNATNVVIKVCEFQFCNDPFLGVYYHKNNKSWMESEFRVYSSANNCTFEYVSQPFLIDLEGKQGNFKNLREFVFKNIDGYFKIYSKHTPINLVRDLPQGFSALEPLVDLPIGINITRFQTLLALHRSYLTPGDSSSGWTAGAAAYYVGYLQPRTFLLKYNENGTITDAVDCALDPLSETKCTLKSFTVEKGIYQTSNFRVQPTESIVRFPNITNLCPFGEVFNATRFASVYAWNRKRISNCVADYSVLYNSASFSTFKCYGVSPTKLNDLCFTNVYADSFVIRGDEVRQIAPGQTGKIADYNYKLPDDFTGCVIAWNSNNLDSKVGGNYNYLYRLFRKSNLKPFERDISTEIYQAGSTPCNGVEGFNCYFPLQSYGFQPTNGVGYQPYRVVVLSFELLHAPATVCGPKKSTNLVKNKCVNFNFNGLTGTGVLTESNKKFLPFQQFGRDIADTTDAVRDPQTLEILDITPCSFGGVSVITPGTNTSNQVAVLYQGVNCTEVPVAIHADQLTPTWRVYSTGSNVFQTRAGCLIGAEHVNNSYECDIPIGAGICASYQTQTNSPRRARSVASQSIIAYTMSLGAENSVAYSNNSIAIPTNFTISVTTEILPVSMTKTSVDCTMYICGDSTECSNLLLQYGSFCTQLNRALTGIAVEQDKNTQEVFAQVKQIYKTPPIKDFGGFNFSQILPDPSKPSKRSFIEDLLFNKVTLADAGFIKQYGDCLGDIAARDLICAQKFNGLTVLPPLLTDEMIAQYCSALLAGTITSGWTFGAGAALQIPFAMQMAYRFNGIGVTQNVLYENQKLIANQFNSAIGKIQDSLSSTASALGKLQDVVNQNAQALNTLVKQLSSNFGAISSVLNDILSRLDKVEAEVQIDRLITGRLQSLQTYVTQQLIRAAEIRASANLAATKMSECVLGQSKRVDFCGKGYHLMSFPQCAPHGVVFLHVTYVPAQEKNFTTAPAICHDGKAHFPREGVFVSNGTHWFVTQRNFYEPQIITTDNTFVSGNCDVVIGIVNNTVYDPLQPELDSGGGGSDIIKLLNEQVNKEMQSSNLYMSMSSWCYTHSLDGAGLFLFDHAAEEYEHAKKLIIFLNENNVPVQLTSISAPEHKFEGLTQIFQKAYEHEQHISESINNIVDHAIKSKDHATFNFLQWYVAEQHEEEVLFKDILDKIELIGNENHGLYLADQYVKGIAKSRKS

SEQ ID NO: 9644 - protein, 1315 aa, Artificial Sequence
  SARS-CoV-2/Congo/94/2020__EPI_ISL_417947 spike protein (1-1147)(T874C_S1055C) Ferritin construct
MFVFLVLLPLVSSQCVNLTTRTQLPPAYTNSFTRGVYYPDKVFRSSVLHSTQDLFLPFFSNVTWFHAIHVSGTNGTKRFDNPVLPFNDGVYFASTEKSNIIRGWIFGTTLDSKTQSLLIVNNATNVVIKVCEFQFCNDPFLGVYYHKNNKSWMESEFRVYSSANNCTFEYVSQPFLMDLEGKQGNFKNLREFVFKNIDGYFKIYSKHTPINLVRDLPQGFSALEPLVDLPIGINITRFQTLLALHRSYLTPGDSSSGWTAGAAAYYVGYLQPRTFLLKYNENGTITDAVDCALDPLSETKCTLKSFTVEKGIYQTSNFRVQPTESIVRFPNITNLCPFGEVFNATRFASVYAWNRKRISNCVADYSVLYNSASFSTFKCYGVSPTKLNDLCFTNVYADSFVIRGDEVRQIAPGQTGKIADYNYKLPDDFTGCVIAWNSNNLDSKVGGNYNYLYRLFRKSNLKPFERDISTEIYQAGSTPCNGVEGFNCYFPLQSYGFQPTNGVGYQPYRVVVLSFELLHAPATVCGPKKSTNLVKNKCVNFNFNGLTGTGVLTESNKKFLPFQQFGRDIADTTDAVRDPQTLEILDITPCSFGGVSVITPGTNTSNQVAVLYQGVNCTEVPVAIHADQLTPTWRVYSTGSNVFQTRAGCLIGAEHVNNSYECDIPIGAGICASYQTQTNSPRRARSVASQSIIAYTMSLGAENSVAYSNNSIAIPTNFTISVTTEILPVSMTKTSVDCTMYICGDSTECSNLLLQYGSFCTQLNRALTGIAVEQDKNTQEVFAQVKQIYKTPPIKDFGGFNFSQILPDPSKPSKRSFIEDILFNKVTLADAGFIKQYGDCLGDIAARDLICAQKFNGLTVLPPLLTDEMIAQYCSALLAGTITSGWTFGAGAALQIPFAMQMAYRFNGIGVTQNVLYENQKLIANQFNSAIGKIQDSLSSTASALGKLQDVVNQNAQALNTLVKQLSSNFGAISSVLNDILSRLDKVEAEVQIDRLITGRLQSLQTYVTQQLIRAAEIRASANLAATKMSECVLGQSKRVDFCGKGYHLMSFPQCAPHGVVFLHVTYVPAQEKNFTTAPAICHDGKAHFPREGVFVSNGTHWFVTQRNFYEPQIITTDNTFVSGNCDVVIGIVNNTVYDPLQPELDSGGGGSDIIKLLNEQVNKEMQSSNLYMSMSSWCYTHSLDGAGLFLFDHAAEEYEHAKKLIIFLNENNVPVQLTSISAPEHKFEGLTQIFQKAYEHEQHISESINNIVDHAIKSKDHATFNFLQWYVAEQHEEEVLFKDILDKIELIGNENHGLYLADQYVKGIAKSRKS

SEQ ID NO: 9645 - protein, 1315 aa, Artificial Sequence
  SARS-CoV-2/Congo/158/2020__EPI_ISL_417950 spike protein (1-1147)(T874C_S1055C) Ferritin construct
MFVFLVLLPLVSSQCVNLTTRTQLPPAYTNSFTRGVYYPDKVFRSSVLHSTQDLFLPFFSNVTWFHAIHVSGTNGTKRFDNPVLPFNDGVYFASTEKSNIIRGWIFGTTLDSKTQSLLIVNNATNVVIKVCEFQFCNDPFLGVYYHKNNKSWMESEFRVYSSANNCTFEYVSQPFLMDLEGKQGNFKNLREFVFKNIDGYFKIYSKHTPINLVRDLPQGFSALEPLVDLPIGINITRFQTLLALHRSYLTPGDSSSGWTAGAAAYYVGYLQPRTFLLKYNENGTITDAVDCALDPLSETKCTLKSFTVEKGIYQTSNFRVQPTESIVRFPNITNLCPFGEVFNATRFASVYAWNRKRISNCVADYSVLYNSASFSTFKCYGVSPTKLNDLCFTNVYADSFVIRGDEVRQIAPGQTGKIADYNYKLPDDFTGCVIAWNSNNLDSKVGGNYNYLYRLFRKSNLKPFERDISTEIYQAGSTPCNGVEGFNCYFPLQSYGFQPTNGVGYQPYRVVVLSFELLHAPATVCGPKKSTNLVKNKCVNFNFNGLTGTGVLTESNKKFLPFQQFGRDIADTTDAVRDPQTLEILDITPCSFGGVSVITPGTNTSNQVAVLYQDVNCTEVPVAIHADQLTPTWRVYSTGSNVFQTRAGCLIGAEHVNNSYECDIPIGAGICASYQTQTNSPRRARSVASQSIIAYTMSLGAENSVAYSNNSIAIPTNFTISVTTEILPVSMTKTSVDCTMYICGDSTECSNLLLQYGSFCTQLNRALTGIAVEQDKNTQEVFAQVKQIYKTPPIKDFGGFNFSQILPDPSKPSKRSFIEDLLFNKVTLADAGFIKQYGDCLGDIAARDLICAQKFNGLTVLPPLLTDEMIAQYCSALLAGTITSGWTFGAGAALQIPFAMQMAYRFNGIGVTQNVLYENQKLIANQFNSAIGKIQDSLSSTASALGKLQDVVNQNAQALNTLVKQLSSNFGAISSVLNDILSRLDKVEAEVQIDRLITGRLQSLQTYVTQQLIRAAEIRASANLAATKMSECVLGQSKRVDFCGKGYHLMSFPQCAPHGVVFLHVTYVPAQEKNFTTAPAICHDGKAHFPREGVFVSNGTHWFVTQRNFYEPQIITTDNTFLSGNCDVVIGIVNNTVYDPLQPELDSGGGGSDIIKLLNEQVNKEMQSSNLYMSMSSWCYTHSLDGAGLFLFDHAAEEYEHAKKLIIFLNENNVPVQLTSISAPEHKFEGLTQIFQKAYEHEQHISESINNIVDHAIKSKDHATFNFLQWYVAEQHEEEVLFKDILDKIELIGNENHGLYLADQYVKGIAKSRKS

SEQ ID NO: 9646 - protein, 1315 aa, Artificial Sequence
  SARS-CoV-2/USA/UT-00034/2020__EPI_ISL_417977 spike protein (1-1147)(T874C_S1055C) Ferritin construct
MFVFLVLLPLVSSQCVNLTTRTQLPPAYTNSFTRGVYYPDKVFRSSVLHSTQDLFLPFFSNVTWFHAIHVSGTNGTKRFDNPVLPFNDGVYFASTEKSNIIRGWIFGTTLDSKTQSLLIVNNATNVVIKVCEFQFCNDPFLGVYYYKNNKSWMESEFRVYSSANNCTFEYVSQPFLMDLEGKQGNFKNLREFVFKNIDGYFKIYSKHTPINLVRDLPQGFSALEPLVDLPIGINITRFQTLLALHRSYLTPGDSSSGWTAGAAAYYVGYLQPRTFLLKYNENGTITDAVDCALDPLSETKCTLKSFTVEKGIYQTSNFRVQPTESIVRFPNITNLCPFGEVFNATRFASVYAWNRKRISNCVADYSVLYNSASFSTFKCYGVSPTKLNDLCFTNVYADSFVIRGDEVRQIAPGQTGKIADYNYKLPDDFTGCVIAWNSNNLDSKVGGNYNYLYRLFRKSNLKPFERDISTEIYQAGSTPCNGVEGFNCYFPLQSYGFQPTNGVGYQPYRVVVLSFELLHAPATVCGPKKSTNLVKNKCVNFNFNGLTGTGVLTESNKKFLPFQQFGRDIADTTDAVRDPQTLEILDITPCSFGGVSVITPGTNTSNQVAVLYQGVNCTEVPVAIHADQLTPTWRVYSTGSNVFQTRAGCLIGAEHVNNSYECDIPIGAGICASYQTQTNSPRRARSVASQSIIAYTMSLGAENSVAYSNNSIAIPTNFTISVTTEILPVSMTKTSVDCTMYICGDSTECSNLLLQYGSFCTQLNRALTGIAVEQDKNTQEVFAQVKQIYKTPPIKDFGGFNFSQILPDPSKPSKRSFIEDLLFNKVTLADAGFIKQYGDCLGDIAARDLICAQKFNGLTVLPPLLTDEMIAQYCSALLAGTITSGWTFGAGAALQIPFAMQMAYRFNGIGVTQNVLYENQKLIANQFNSAIGKIQDSLSSTASALGKLQDVVNQNAQALNTLVKQLSSNFGAISSVLNDILSRLDKVEAEVQIDRLITGRLQSLQTYVTQQLIRAAEIRASANLAATKMSECVLGQSKRVDFCGKGYHLMSFPQCAPHGVVFLHVTYVPAQEKNFTTAPAICHDGKAHFPREGVFVSNGTHWFVTQRNFYEPQIITTDNTFVSGNCDVVIGIVNNTVYDPLQPELDSGGGGSDIIKLLNEQVNKEMQSSNLYMSMSSWCYTHSLDGAGLFLFDHAAEEYEHAKKLIIFLNENNVPVQLTSISAPEHKFEGLTQIFQKAYEHEQHISESINNIVDHAIKSKDHATFNFLQWYVAEQHEEEVLFKDILDKIELIGNENHGLYLADQYVKGIAKSRKS

SEQ ID NO: 9647 - protein, 1315 aa, Artificial Sequence
  SARS-CoV-2/USA/UT-00033/2020__EPI_ISL_417976 spike protein (1-1147)(T874C_S1055C) Ferritin construct
MFVFLVLLPLVSSQCVNLTTRTQLPPAYTNSFTRGVYYPDKVFRSSVLHSTQDLFLPFFSNVTWFHAIHVSGTNGTKRFDNPVLPFNDGVYFASTEKSNIIRGWIFGTTLDSKTQSLLIVNNATNVVIKVCEFQFCNDPFLGVYYHKNNKSWMESEFRVYSSANNCTFEYVSQPFLMDLEGKQGNFKNLREFVFKNIDGYFKIYSKHTPINLVRDLPQGFSALEPLVDLPIGINITRFQTLLALHRSYLTPGDSSSGLTAGAAAYYVGYLQPRTFLLKYNENGTITDAVDCALDPLSETKCTLKSFTVEKGIYQTSNFRVQPTESIVRFPNITNLCPFGEVFNATRFASVYAWNRKRISNCVADYSVLYNSASFSTFKCYGVSPTKLNDLCFTNVYADSFVIRGDEVRQIAPGQTGKIADYNYKLPDDFTGCVIAWNSNNLDSKVGGNYNYLYRLFRKSNLKPFERDISTEIYQAGSTPCNGVEGFNCYFPLQSYGFQPTNGVGYQPYRVVVLSFELLHAPATVCGPKKSTNLVKNKCVNFNFNGLTGTGVLTESNKKFLPFQQFGRDIADTTDAVRDPQTLEILDITPCSFGGVSVITPGTNTSNQVAVLYQGVNCTEVPVAIHADQLTPTWRVYSTGSNVFQTRAGCLIGAEHVNNSYECDIPIGAGICASYQTQTNSPRRARSVASQSIIAYTMSLGAENSVAYSNNSIAIPTNFTISVTTEILPVSMTKTSVDCTMYICGDSTECSNLLLQYGSFCTQLNRALTGIAVEQDKNTQEVFAQVKQIYKTPPIKDFGGFNFSQILPDPSKPSKRSFIEDLLFNKVTLADAGFIKQYGDCLGDIAARDLICAQKFNGLTVLPPLLTDEMIAQYCSALLAGTITSGWTFGAGAALQIPFAMQMAYRFNGIGVTQNVLYENQKLIANQFNSAIGKIQDSLSSTASALGKLQDVVNQNAQALNTLVKQLSSNFGAISSVLNDILSRLDKVEAEVQIDRLITGRLQSLQTYVTQQLIRAAEIRASANLAATKMSECVLGQSKRVDFCGKGYHLMSFPQCAPHGVVFLHVTYVPAQEKNFTTAPAICHDGKAHFPREGVFVSNGTHWFVTQRNFYEPQIITTDNTFVSGNCDVVIGIVNNTVYDPLQPELDSGGGGSDIIKLLNEQVNKEMQSSNLYMSMSSWCYTHSLDGAGLFLFDHAAEEYEHAKKLIIFLNENNVPVQLTSISAPEHKFEGLTQIFQKAYEHEQHISESINNIVDHAIKSKDHATFNFLQWYVAEQHEEEVLFKDILDKIELIGNENHGLYLADQYVKGIAKSRKS

SEQ ID NO: 9648 - protein, 1315 aa, Artificial Sequence
  SARS-CoV-2/USA/WI-13/2020__EPI_ISL_417516 spike protein (1-1147)(T874C_S1055C) Ferritin construct
MFVFLVLLPLVSSQCVNLTTRTQLPPAYTNSFTRGVYYPDKVFRSSVLHSTQDLFLPFFSNVTWFHAIHVSGTNGTKRFDNPVLPFNDGVYFASTEKSNIIRGWIFGTTLDSKTQSLLIVNNATNVVIKVCEFQFCNDPFLGVYYHKNNKSWMESEFRVYSSANNCTFEYVSQPFLMDLEGKQGNFKNLREFVFKNIDGYFKIYSKHTPINLVRDLPQGFSALEPLVDLPIGINITRFQTLLALHRSYLTPGDSSSGWTAGAAAYYVGYLQPRTFLLKYNENGTITDAVDCALDPLSETKCTLKSFTVEKGIYQTSNFRVLPTESIVRFPNITNLCPFGEVFNATRFASVYAWNRKRISNCVADYSVLYNSASFSTFKCYGVSPTKLNDLCFTNVYADSFVIRGDEVRQIAPGQTGKIADYNYKLPDDFTGCVIAWNSNNLDSKVGGNYNYLYRLFRKSNLKPFERDISTEIYQAGSTPCNGVEGFNCYFPLQSYGFQPTNGVGYQPYRVVVLSFELLHAPATVCGPKKSTNLVKNKCVNFNFNGLTGTGVLTESNKKFLPFQQFGRDIADTTDAVRDPQTLEILDITPCSFGGVSVITPGTNTSNQVAVLYQGVNCTEVPVAIHADQLTPTWRVYSTGSNVFQTRAGCLIGAEHVNNSYECDIPIGAGICASYQTQTNSPRRARSVASQSIIAYTMSLGAENSVAYSNNSIAIPTNFTISVTTEILPVSMTKTSVDCTMYICGDSTECSNLLLQYGSFCTQLNRALTGIAVEQDKNTQEVFAQVKQIYKTPPIKDFGGFNFSQILPDPSKPSKRSFIEDLLFNKVTLADAGFIKQYGDCLGDIAARDLICAQKFNGLTVLPPLLTDEMIAQYCSALLAGTITSGWTFGAGAALQIPFAMQMAYRFNGIGVTQNVLYENQKLIANQFNSAIGKIQDSLSSTASALGKLQDVVNQNAQALNTLVKQLSSNFGAISSVLNDILSRLDKVEAEVQIDRLITGRLQSLQTYVTQQLIRAAEIRASANLAATKMSECVLGQSKRVDFCGKGYHLMSFPQCAPHGVVFLHVTYVPAQEKNFTTAPAICHDGKAHFPREGVFVSNGTHWFVTQRNFYEPQIITTDNTFVSGNCDVVIGIVNNTVYDPLQPELDSGGGGSDIIKLLNEQVNKEMQSSNLYMSMSSWCYTHSLDGAGLFLFDHAAEEYEHAKKLIIFLNENNVPVQLTSISAPEHKFEGLTQIFQKAYEHEQHISESINNIVDHAIKSKDHATFNFLQWYVAEQHEEEVLFKDILDKIELIGNENHGLYLADQYVKGIAKSRKS

SEQ ID NO: 9649 - protein, 1314 aa, Artificial Sequence
  SARS-CoV-2/India/1-27/2020__EPI_ISL_413522 spike protein (1-1146)(T873C_S1054C) Ferritin construct
MFVFLVLLPLVSSQCVNLTTRTQLPPAYTNSFTRGVYYPDKVFRSSVLHSTQDLFLPFFSNVTWFHAIHVSGTNGTKRFDNPVLPFNDGVYFASTEKSNIIRGWIFGTTLDSKTQSLLIVNNATNVVIKVCEFQFCNDPFLGVYHKNNKSWMESEFRVYSSANNCTFEYVSQPFLMDLEGKQGNFKNLREFVFKNIDGYFKIYSKHTPINLVRDLPQGFSALEPLVDLPIGINITRFQTLLALHRSYLTPGDSSSGWTAGAAAYYVGYLQPRTFLLKYNENGTITDAVDCALDPLSETKCTLKSFTVEKGIYQTSNFRVQPTESIVRFPNITNLCPFGEVFNATRFASVYAWNRKRISNCVADYSVLYNSASFSTFKCYGVSPTKLNDLCFTNVYADSFVIRGDEVIQIAPGQTGKIADYNYKLPDDFTGCVIAWNSNNLDSKVGGNYNYLYRLFRKSNLKPFERDISTEIYQAGSTPCNGVEGFNCYFPLQSYGFQPTNGVGYQPYRVVVLSFELLHAPATVCGPKKSTNLVKNKCVNFNFNGLTGTGVLTESNKKFLPFQQFGRDIADTTDAVRDPQTLEILDITPCSFGGVSVITPGTNTSNQVAVLYQDVNCTEVPVAIHADQLTPTWRVYSTGSNVFQTRAGCLIGAEHVNNSYECDIPIGAGICASYQTQTNSPRRARSVASQSIIAYTMSLGAENSVAYSNNSIAIPTNFTISVTTEILPVSMTKTSVDCTMYICGDSTECSNLLLQYGSFCTQLNRALTGIAVEQDKNTQEVFAQVKQIYKTPPIKDFGGFNFSQILPDPSKPSKRSFIEDLLFNKVTLADAGFIKQYGDCLGDIAARDLICAQKFNGLTVLPPLLTDEMIAQYCSALLAGTITSGWTFGAGAALQIPFAMQMAYRFNGIGVTQNVLYENQKLIANQFNSAIGKIQDSLSSTASALGKLQDVVNQNAQALNTLVKQLSSNFGAISSVLNDILSRLDKVEAEVQIDRLITGRLQSLQTYVTQQLIRAAEIRASANLAATKMSECVLGQSKRVDFCGKGYHLMSFPQCAPHGVVFLHVTYVPAQEKNFTTAPAICHDGKAHFPREGVFVSNGTHWFVTQRNFYEPQIITTDNTFVSGNCDVVIGIVNNTVYDPLQPELDSGGGGSDIIKLLNEQVNKEMQSSNLYMSMSSWCYTHSLDGAGLFLFDHAAEEYEHAKKLIIFLNENNVPVQLTSISAPEHKFEGLTQIFQKAYEHEQHISESINNIVDHAIKSKDHATFNFLQWYVAEQHEEEVLFKDILDKIELIGNENHGLYLADQYVKGIAKSRKS

SEQ ID NO: 9650 - protein, 1309 aa, Artificial Sequence
  SARS-CoV-2/pangolin/Guangxi/P4L/2017__EPI_ISL_410538 spike protein (1-1141)(T868C_S1049C) Ferritin construct
MFVFLFVLPLVSSQCVNLTTRTGIPPGYTNSSTRGVYYPDKVFRSSILHLTQDLFLPFFSNVTWFNTINYQGGFKKFDNPVLPFNDGVYFASTEKSNIIRGWIFGTTLDARTQSLLIVNNATNVVIKVCEFQFCTDPFLGVYYHNNNKTWVENEFRVYSSANNCTFEYISQPFLMDLEGKQGNFKNLREFVFKNVDGYFKIYSKHTPIDLVRDLPRGFAALEPLVDLPIGINITRFQTLLALHRSYLTPGNLESGWTTGAAAYYVGYLQQRTFLLSYNQNGTITDAVDCSLDPLSETKCTLKSLTVEKGIYQTSNFRVQPTISIVRFPNITNLCPFGEVFNASKFASVYAWNRKRISNCVADYSVLYNSTSFSTFKCYGVSPTKLNDLCFTNVYADSFVVKGDEVRQIAPGQTGVIADYNYKLPDDFTGCVIAWNSVKQDALTGGNYGYLYRLFRKSKLKPFERDISTEIYQAGSTPCNGQVGLNCYYPLERYGFHPTTGVNYQPFRVVVLSFELLNGPATVCGPKLSTTLVKDKCVNFNFNGLTGTGVLTTSKKQFLPFQQFGRDISDTTDAVRDPQTLEILDITPCSFGGVSVITPGTNTSNQVAVLYQDVNCTEVPMAIHAEQLTPAWRVYSAGANVFQTRAGCLVGAEHVNNSYECDIPVGAGICASYHSMSSLRSVNQRSIIAYTMSLGAENSVAYSNNSIAIPTNFTISVTTEILPVSMTKTSVDCTMYICGDSIECSNLLLQYGSFCTQLNRALTGIAVEQDKNTQEVFAQVKQIYKTPPIKDFGGFNFSQILPDPSKPSKRSFIEDLLFNKVTLADAGFIKQYGDCLGDIAARDLICAQKFNGLTVLPPLLTDEMIAQYCSALLAGTITSGWTFGAGAALQIPFAMQMAYRFNGIGVTQNVLYENQKLIANQFNSAIGKIQDSLSSTASALGKLQDVVNQNAQALNTLVKQLSSNFGAISSVLNDILSRLDKVEAEVQIDRLITGRLQSLQTYVTQQLIRAAEIRASANLAATKMSECVLGQSKRVDFCGKGYHLMSFPQCAPHGVVFLHVTYVPAQEKNFTTAPAICHEGKAHFPREGVFVSNGTHWFITQRNFYEPQIITTDNTFVSGSCDVVIGIVNNTVYDPLQPELDSGGGGSDIIKLLNEQVNKEMQSSNLYMSMSSWCYTHSLDGAGLFLFDHAAEEYEHAKKLIIFLNENNVPVQLTSISAPEHKFEGLTQIFQKAYEHEQHISESINNIVDHAIKSKDHATFNFLQWYVAEQHEEEVLFKDILDKIELIGNENHGLYLADQYVKGIAKSRKS

SEQ ID NO: 9651 - protein, 1309 aa, Artificial Sequence
  SARS-CoV-2/pangolin/Guangxi/P5L/2017__EPI_ISL_410540 spike protein (1-1141)(T868C_S1049C) Ferritin construct
MFVFLFVLPLVSSQCVNLTTRTGIPPGYTNSSTRGVYYPDKVFRSSILHLTQDLFLPFFSNVTWFNTINYQGGFKKFDNPVLPFNDGVYFASTEKSNIIRGWIFGTTLDARTQSLLIVNNATNVVIKVCEFQFCTDPFLGVYYHNNNKTWVENEFRVYSSANNCTFEYISQPFLMDLEGKQGNFKNLREFVFKNVDGYFKIYSKHTPIDLVRDLPRGFAALEPLVDLPIGINITRFQTLLALHRSYLTPGKLESGWTTGAAAYYVGYLQQRTFLLSYNQNGTITDAVDCSLDPLSETKCTLKSLTVEKGIYQTSNFRVQPTISIVRFPNITNLCPFGEVFNASKFASVYAWNRKRISNCVADYSVLYNSTSFSTFKCYGVSPTKLNDLCFTNVYADSFVVKGDEVRQIAPGQTGVIADYNYKLPDDFTGCVIAWNSVKQDALTGGNYGYLYRLFRKSKLKPFERDISTEIYQAGSTPCNGQVGLNCYYPLERYGFHPTTGVNYQPFRVVVLSFELLNGPATVCGPKLSTTLVKDKCVNFNFNGLTGTGVLTTSKKQFLPFQQFGRDISDTTDAVRDPQTLEILDITPCSFGGVSVITPGTNTSNQVAVLYQDVNCTEVPMAIHAEQLTPAWRVYSAGANVFQTRAGCLVGAEHVNNSYECDIPVGAGICASYHSMSSFRSVNQRSIIAYTMSLGAENSVAYSNNSIAIPTNFTISVTTEILPVSMTKTSVDCTMYICGDSIECSNLLLQYGSFCTQLNRALTGIAVEQDKNTQEVFAQVKQIYKTPPIKDFGGFNFSQILPDPSKPSKRSFIEDLLFNKVTLADAGFIKQYGDCLGDIAARDLICAQKFNGLTVLPPLLTDEMIAQYCSALLAGTITSGWTFGAGAALQIPFAMQMAYRFNGIGVTQNVLYENQKLIANQFNSAIGKIQDSLSSTASALGKLQDVVNQNAQALNTLVKQLSSNFGAISSVLNDILSRLDKVEAEVQIDRLITGRLQSLQTYVTQQLIRAAEIRASANLAATKMSECVLGQSKRVDFCGKGYHLMSFPQCAPHGVVFLHVTYVPAQEKNFTTAPAICHEGKAHFPREGVFVSNGTHWFITQRNFYEPQIITTDNTFVSGSCDVVIGIVNNTVYDPLQPELDSGGGGSDIIKLLNEQVNKEMQSSNLYMSMSSWCYTHSLDGAGLFLFDHAAEEYEHAKKLIIFLNENNVPVQLTSISAPEHKFEGLTQIFQKAYEHEQHISESINNIVDHAIKSKDHATFNFLQWYVAEQHEEEVLFKDILDKIELIGNENHGLYLADQYVKGIAKSRKS

SEQ ID NO: 9652 - protein, 1309 aa, Artificial Sequence
  SARS-CoV-2/pangolin/Guangxi/P5E/2017__EPI_ISL_410541 spike protein (1-1141)(T868C_S1049C) Ferritin construct
MFVFLFVLPLVSSQCVNLTTRTGIPPGYTNSSTRGVYYPDKVFRSSILHLTQDLFLPFFSNVTWFNTITYQGGSKKFDNPVLPFNDGVYFASTEKSNIIRGWIFGTTLDARTQSLLIVNNATNVVIKVCEFQFCTDPFLGVYYHNNNKTWVENEFRVYSSANNCTFEYISQPFLMDLEGKQGNFKNLREFVFKNVDGYFKIYSKHTPIDLVRDLPRGFAALEPLVDLPIGINITRFQTLLALHRSYLTPGKLESGWTTGAAAYYVGYLQQRTFLLSYNQNGTITDAVDCSLDPLSETKCTLKSLTVEKGIYQTSNFRVQPTISIVRFPNITNLCPFGEVFNASKFASVYAWNRKRISNCVADYSVLYNSTSFSTFKCYGVSPTKLNDLCFTNVYADSFVVKGDEVRQIAPGQTGVIADYNYKLPDDFTGCVIAWNSVKQDALTGDNYGYLYRLFRKSKLKPFERDISTEIYQAGSTPCNGQVGLNCYYPLERYGFHPTTGVNYQPFRVVVLSFELLNGPATVCGPKLSTTLVKDKCVNFNFNGLTGTGVLTTSKKQFLPFQQFGRDISDTTDAVRDPQTLEILDITPCSFGGVSVITPGTNTSNQVAVLYQDVNCTEVPMAIHAEQLTPAWRVYSAGANVFQTRAGCLVGAEHVNNSYECDIPVGAGICASYHSMSSFRSVNQRSIIAYTMSLGAENSVAYSNNSIAIPTNFTISVTTEILPVSMTKTSVDCTMYICGDSIECSNLLLQYGSFCTQLNRALTGIAVEQDKNTQEVFAQVKQIYKTPPIKDFGGFNFSQILPDPSKPSKRSFIEDLLFNKVTLADAGFIKQYGDCLGDIAARDLICAQKFNGLTVLPPLLTDEMIAQYCSALLAGTITSGWTFGAGAALQIPFAMQMAYRFNGIGVTQNVLYENQKLIANQFNSAIGKIQDSLSSTASALGKLQDVVNQNAQALNTLVKQLSSNFGAISSVLNDILSRLDKVEAEVQIDRLITGRLQSLQTYVTQQLIRAAEIRASANLAATKMSECVLGQSKRVDFCGKGYHLMSFPQCAPHGVVFLHVTYVPAQEKNFTTAPAICHEGKAHFPREGVFVSNGTHWFITQRNFYEPQIITTDNTFVSGSCDVVIGIVNNTVYDPLQPELDSGGGGSDIIKLLNEQVNKEMQSSNLYMSMSSWCYTHSLDGAGLFLFDHAAEEYEHAKKLIIFLNENNVPVQLTSISAPEHKFEGLTQIFQKAYEHEQHISESINNIVDHAIKSKDHATFNFLQWYVAEQHEEEVLFKDILDKIELIGNENHGLYLADQYVKGIAKSRKS

SEQ ID NO: 9653 - protein, 1307 aa, Artificial Sequence
  SARS-CoV-2/pangolin/Guangxi/P1E/2017__EPI_ISL_410539 spike protein (1-1139)(T866C_S1047C) Ferritin construct
MFVFLFVLPLVSSQCVNLTTRTGIQPGYTNSSTRGVYYPDKVFRSSILHLTQDLFLPFFSNVTWFNTINYQGGFKKFDNPVLPFNDGVYFASTEKSNIIRGWIFGTTLDARTQSLLIVNNATNVVIKVCEFQFCTDPFLGVYYHNNNKTWVENEFRVYSSANNCTFEYISQPFLMDLEGKQGNFKNLREFVFKNVDGYFKIYSKHTPIDLVRDLPRGFAALEPLVDLPIGINITRFQTLLALHRSYLTPGKLESGWTTGAAAYYVGYLQQRTFLLSYNQNGTITDAVDCSLDPLSETKCTLKSLTVEKGIYQTSNFRVQPTISIVRFPNITNLCPFGEVFNASKFASVYAWNRKRISNCVADYSVLYNSTSFSTFKCYGVSPTKLNDLCFTNVYADSFVVKGDEVRQIAPGQTGVIADYNYKLPDDFTGCVIAWNSVKQDALTGGNYLYRLFRKSKLKPFERDISTEIYQAGSTPCNGQVGLNCYYPLERYGFHPTTGVNYQPFRVVVLSFELLNGPATVCGPKLSTTLVKDKCVNFNFNGLTGTGVLTTSKKQFLPFQQFGRDISDTTDAVRDPQTLEILDITPCSFGGVSVITPGTNTSNQVAVLYQDVNCTEVPMAIHAEQLTPAWRVYSAGANVFQTRAGCLVGAEHVNNSYECDIPVGAGICASYHSMSSLRSVNQRSIIAYTMSLGAENSVAYSNNSIAIPTNFTISVTTEILPVSMTKTSVDCTMYICGDSIECSNLLLQYGSFCTQLNRALTGIAVEQDKNTQEVFAQVKQIYKTPPIKDFGGFNFSQILPDPSKPSKRSFIEDLLFNKVTLADAGFIKQYGDCLGDIAARDLICAQKFNGLTVLPPLLTDEMIAQYCSALLAGTITSGWTFGAGAALQIPFAMQMAYRFNGIGVTQNVLYENQKLIANQFNSAIGKIQDSLSSTASALGKLQDVVNQNAQALNTLVKQLSSNFGAISSVLNDILSRLDKVEAEVQIDRLITGRLQSLQTYVTQQLIRAAEIRASANLAATKMSECVLGQSKRVDFCGKGYHLMSFPQCAPHGVVFLHVTYVPAQEKNFTTAPAICHEGKAHFPREGVFVSNGTHWFITQRNFYEPQIITTDNTFVSGSCDVVIGIVNNTVYDPLQPELDSGGGGSDIIKLLNEQVNKEMQSSNLYMSMSSWCYTHSLDGAGLFLFDHAAEEYEHAKKLIIFLNENNVPVQLTSISAPEHKFEGLTQIFQKAYEHEQHISESINNIVDHAIKSKDHATFNFLQWYVAEQHEEEVLFKDILDKIELIGNENHGLYLADQYVKGIAKSRKS

SEQ ID NO: 9654 - protein, 1177 aa, Artificial Sequence
  SARS-CoV-2/Wuhan/WIV05/2019__EPI_ISL_402128 spike protein (1-1147) Foldon construct
MFVFLVLLPLVSSQCVNLTTRTQLPPAYTNSFTRGVYYPDKVFRSSVLHSTQDLFLPFFSNVTWFHAIHVSGTNGTKRFDNPVLPFNDGVYFASTEKSNIIRGWIFGTTLDSKTQSLLIVNNATNVVIKVCEFQFCNDPFLGVYYHKNNKSWMESEFRVYSSANNCTFEYVSQPFLMDLEGKQGNFKNLREFVFKNIDGYFKIYSKHTPINLVRDLPQGFSALEPLVDLPIGINITRFQTLLALHRSYLTPGDSSSGWTAGAAAYYVGYLQPRTFLLKYNENGTITDAVDCALDPLSETKCTLKSFTVEKGIYQTSNFRVQPTESIVRFPNITNLCPFGEVFNATRFASVYAWNRKRISNCVADYSVLYNSASFSTFKCYGVSPTKLNDLCFTNVYADSFVIRGDEVRQIAPGQTGKIADYNYKLPDDFTGCVIAWNSNNLDSKVGGNYNYLYRLFRKSNLKPFERDISTEIYQAGSTPCNGVEGFNCYFPLQSYGFQPTNGVGYQPYRVVVLSFELLHAPATVCGPKKSTNLVKNKCVNFNFNGLTGTGVLTESNKKFLPFQQFGRDIADTTDAVRDPQTLEILDITPCSFGGVSVITPGTNTSNQVAVLYQDVNCTEVPVAIHADQLTPTWRVYSTGSNVFQTRAGCLIGAEHVNNSYECDIPIGAGICASYQTQTNSPRRARSVASQSIIAYTMSLGAENSVAYSNNSIAIPTNFTISVTTEILPVSMTKTSVDCTMYICGDSTECSNLLLQYGSFCTQLNRALTGIAVEQDKNTQEVFAQVKQIYKTPPIKDFGGFNFSQILPDPSKPSKRSFIEDLLFNKVTLADAGFIKQYGDCLGDIAARDLICAQKFNGLTVLPPLLTDEMIAQYTSALLAGTITSGWTFGAGAALQIPFAMQMAYRFNGIGVTQNVLYENQKLIANQFNSAIGKIQDSLSSTASALGKLQDVVNQNAQALNTLVKQLSSNFGAISSVLNDILSRLDKVEAEVQIDRLITGRLQSLQTYVTQQLIRAAEIRASANLAATKMSECVLGQSKRVDFCGKGYHLMSFPQSAPHGVVFLHVTYVPAQEKNFTTAPAICHDGKAHFPREGVFVSNGTHWFVTQRNFYEPQIITTDNTFVSGNCDVVIGIVNNTVYDPLQPELDSGGSGYIPEAPRDGQAYVRKDGEWVLLSTFL

SEQ ID NO: 9655 - protein, 1173 aa, Artificial Sequence
  SARS-CoV-2/bat/Yunnan/RaTG13/2013__EPI_ISL_402131 spike protein (1-1143) Foldon construct
MFVFLVLLPLVSSQCVNLTTRTQLPPAYTNSSTRGVYYPDKVFRSSVLHLTQDLFLPFFSNVTWFHAIHVSGTNGIKRFDNPVLPFNDGVYFASTEKSNIIRGWIFGTTLDSKTQSLLIVNNATNVVIKVCEFQFCNDPFLGVYYHKNNKSWMESEFRVYSSANNCTFEYVSQPFLMDLEGKQGNFKNLREFVFKNIDGYFKIYSKHTPINLVRDLPPGFSALEPLVDLPIGINITRFQTLLALHRSYLTPGDSSSGWTAGAAAYYVGYLQPRTFLLKYNENGTITDAVDCALDPLSETKCTLKSFTVEKGIYQTSNFRVQPTDSIVRFPNITNLCPFGEVFNATTFASVYAWNRKRISNCVADYSVLYNSTSFSTFKCYGVSPTKLNDLCFTNVYADSFVITGDEVRQIAPGQTGKIADYNYKLPDDFTGCVIAWNSKHIDAKEGGNFNYLYRLFRKANLKPFERDISTEIYQAGSKPCNGQTGLNCYYPLYRYGFYPTDGVGHQPYRVVVLSFELLNAPATVCGPKKSTNLVKNKCVNFNFNGLTGTGVLTESNKKFLPFQQFGRDIADTTDAVRDPQTLEILDITPCSFGGVSVITPGTNASNQVAVLYQDVNCTEVPVAIHADQLTPTWRVYSTGSNVFQTRAGCLIGAEHVNNSYECDIPIGAGICASYQTQTNSRSVASQSIIAYTMSLGAENSVAYSNNSIAIPTNFTISVTTEILPVSMTKTSVDCTMYICGDSTECSNLLLQYGSFCTQLNRALTGIAVEQDKNTQEVFAQVKQIYKTPPIKDFGGFNFSQILPDPSKPSKRSFIEDLLFNKVTLADAGFIKQYGDCLGDIAARDLICAQKFNGLTVLPPLLTDEMIAQYTSALLAGTITSGWTFGAGAALQIPFAMQMAYRFNGIGVTQNVLYENQKLIANQFNSAIGKIQDSLSSTASALGKLQDVVNQNAQALNTLVKQLSSNFGAISSVLNDILSRLDKVEAEVQIDRLITGRLQSLQTYVTQQLIRAAEIRASANLAATKMSECVLGQSKRVDFCGKGYHLMSFPQSAPHGVVFLHVTYVPAQEKNFTTAPAICHDGKAHFPREGVFVSNGTHWFVTQRNFYEPQIITTDNTFVSGSCDVVIGIVNNTVYDPLQPELDSGGSGYIPEAPRDGQAYVRKDGEWVLLSTFL

SEQ ID NO: 9656 - protein, 1177 aa, Artificial Sequence
  SARS-CoV-2/Wuhan/HBCDC-HB-01/2019__EPI_ISL_402132 spike protein (1-1147) Foldon construct
MFVFLVLLPLVSSQCVNLTTRTQLPPAYTNSITRGVYYPDKVFRSSVLHSTQDLFLPFFSNVTWFHAIHVSGTNGTKRFDNPVLPFNDGVYFASTEKSNIIRGWIFGTTLDSKTQSLLIVNNATNVVIKVCEFQFCNDPFLGVYYHKNNKSWMESEFRVYSSANNCTFEYVSQPFLMDLEGKQGNFKNLREFVFKNIDGYFKIYSKHTPINLVRDLPQGFSALEPLVDLPIGINITRFQTLLALHRSYLTPGDSSSGWTAGAAAYYVGYLQPRTFLLKYNENGTITDAVDCALDPLSETKCTLKSFTVEKGIYQTSNFRVQPTESIVRFPNITNLCPFGEVFNATRFASVYAWNRKRISNCVADYSVLYNSASFSTFKCYGVSPTKLNDLCFTNVYADSFVIRGDEVRQIAPGQTGKIADYNYKLPDDFTGCVIAWNSNNLDSKVGGNYNYLYRLFRKSNLKPFERDISTEIYQAGSTPCNGVEGFNCYFPLQSYGFQPTNGVGYQPYRVVVLSFELLHAPATVCGPKKSTNLVKNKCVNFNFNGLTGTGVLTESNKKFLPFQQFGRDIADTTDAVRDPQTLEILDITPCSFGGVSVITPGTNTSNQVAVLYQDVNCTEVPVAIHADQLTPTWRVYSTGSNVFQTRAGCLIGAEHVNNSYECDIPIGAGICASYQTQTNSPRRARSVASQSIIAYTMSLGAENSVAYSNNSIAIPTNFTISVTTEILPVSMTKTSVDCTMYICGDSTECSNLLLQYGSFCTQLNRALTGIAVEQDKNTQEVFAQVKQIYKTPPIKDFGGFNFSQILPDPSKPSKRSFIEDLLFNKVTLADAGFIKQYGDCLGDIAARDLICAQKFNGLTVLPPLLTDEMIAQYTSALLAGTITSGWTFGAGAALQIPFAMQMAYRFNGIGVTQNVLYENQKLIANQFNSAIGKIQDSLSSTASALGKLQDVVNQNAQALNTLVKQLSSNFGAISSVLNDILSRLDKVEAEVQIDRLITGRLQSLQTYVTQQLIRAAEIRASANLAATKMSECVLGQSKRVDFCGKGYHLMSFPQSAPHGVVFLHVTYVPAQEKNFTTAPAICHDGKAHFPREGVFVSNGTHWFVTQRNFYEPQIITTDNTFVSGNCDVVIGIVNNTVYDPLQPELDSGGSGYIPEAPRDGQAYVRKDGEWVLLSTFL

SEQ ID NO: 9657 - protein, 1177 aa, Artificial Sequence
  SARS-CoV-2/Guangdong/20SF028/2020__EPI_ISL_403936 spike protein (1-1147) Foldon construct
MFVFLVLLPLVSSQCVNLTTRTQLPPAYTNSFTRGVYYPDKVFRSSVLYSTQDLFLPFFSNVTWFHAIHVSGTNGTKRFDNPVLPFNDGVYFASTEKSNIIRGWIFGTTLDSKTQSLLIVNNATNVVIKVCEFQFCNDPFLGVYYHKNNKSWMESEFRVYSSANNCTFEYVSQPFLMDLEGKQGNFKNLREFVFKNIDGYFKIYSKHTPINLVRDLPQGFSALEPLVDLPIGINITRFQTLLALHRSYLTPGDSSSGWTAGAAAYYVGYLQPRTFLLKYNENGTITDAVDCALDPLSETKCTLKSFTVEKGIYQTSNFRVQPTESIVRFPNITNLCPFGEVFNATRFASVYAWNRKRISNCVADYSVLYNSASFSTFKCYGVSPTKLNDLCFTNVYADSFVIRGDEVRQIAPGQTGKIADYNYKLPDDFTGCVIAWNSNNLDSKVGGNYNYLYRLFRKSNLKPFERDISTEIYQAGSTPCNGVEGFNCYFPLQSYGFQPTNGVGYQPYRVVVLSFELLHAPATVCGPKKSTNLVKNKCVNFNFNGLTGTGVLTESNKKFLPFQQFGRDIADTTDAVRDPQTLEILDITPCSFGGVSVITPGTNTSNQVAVLYQDVNCTEVPVAIHADQLTPTWRVYSTGSNVFQTRAGCLIGAEHVNNSYECDIPIGAGICASYQTQTNSPRRARSVASQSIIAYTMSLGAENSVAYSNNSIAIPTNFTISVTTEILPVSMTKTSVDCTMYICGDSTECSNLLLQYGSFCTQLNRALTGIAVEQDKNTQEVFAQVKQIYKTPPIKDFGGFNFSQILPDPSKPSKRSFIEDLLFNKVTLADAGFIKQYGDCLGDIAARDLICAQKFNGLTVLPPLLTDEMIAQYTSALLAGTITSGWTFGAGAALQIPFAMQMAYRFNGIGVTQNVLYENQKLIANQFNSAIGKIQDSLSSTASALGKLQDVVNQNAQALNTLVKQLSSNFGAISSVLNDILSRLDKVEAEVQIDRLITGRLQSLQTYVTQQLIRAAEIRASANLAATKMSECVLGQSKRVDFCGKGYHLMSFPQSAPHGVVFLHVTYVPAQEKNFTTAPAICHDGKAHFPREGVFVSNGTHWFVTQRNFYEPQIITTDNTFVSGNCDVVIGIVNNTVYDPLQPELDSGGSGYIPEAPRDGQAYVRKDGEWVLLSTFL

SEQ ID NO: 9658 - protein, 1177 aa, Artificial Sequence
  SARS-CoV-2/Shenzhen/SZTH-001/2020__EPI_ISL_406592 spike protein (1-1147) Foldon construct
MFVFLVLLPLVSSQCVNLTTRTQLPPAYTNSFTRGVYYPDKVFRSSVLHSTQDLFLPFFSNVTWFHAIHVSGTNGTKRFDNPVLPFNDGVYFASTEKSNIIRGWIFGTTLDSKTQSLLIVNNATNVVIKVCEFQFCNDPFLGVYYHKNNKSWMESEFRVYSSANNCTFEYVSQPFLMDLEGKQGNFKNLREFVFKNIDGYFKIYSKHTPINLVRDLPQGFSALEPLVDLPIGINITRFQTLLALHRSYLTPGDSSSGWTAGAAAYYVGYLQPRTFLLKYNENGTITDAVDCALDPLSETKCTLKSFTVEKGIYQTSNFRVQPTESIVRFPNITNLCPFGEVFNATRFASVYAWNRKRISNCVADYSVLYNSASFSTFKCYGVSPTKLNDLCFTNVYADSFVIRGDEVRQIAPGQTGKIADYNYKLPDDFTGCVIAWNSNNLDSKVGGNYNYLYRLFRKSNLKPFERDISTEIYQAGSTPCNGVEGFNCYFPLQSYGFQPTNGVGYQPYRVVVLSFELLHAPATVCGPKKSTNLVKNKCVNFNFNGLTGTGVLTESNKKFLPFQQFGRDIADTTDAVRDPQTLEILDITPCSFGGVSVITPGTNTSNQVAVLYQDVNCTEVPVAIHADQLTPTWRVYSTGSNVFQTRAGCLIGAEHVNNSYECDIPIGAGICASYQTQTNSPRRARSVASQSIIAYTMSLGAENSVAYSNNSIAIPTNFTISVTTEILPVSMTKTSVDCTMYICGDSTECSNLLLQYGSFCTQLNRALTGIAVEQDKNTQEVFAQVKQIYKTPPIKDFGGFNFSQILPDPSKPSKRSFIEDLLFNKVTLADAGFIKQYGDCLGDIAARDLICAQKFNGLTVLPPLLTDEMIAQYTSALLAGTITSGWTFGAGAALQIPFAMQMAYRFNGIGVTQNVLYENQKLIANQFNSAIGKIQDSLSSTASALGKLQDVVNQNAQALNTLVKQLSSNFGAISSVLNDILSRLDKVEAEVQIDRLITGRLQSLQTYVTQQLIRAAEIRASANLAATKMSECVLGQSKRVDFCGKGYHLMSFPQSAPHGVVFLHVTYVPAQEKNFTTAPAICHDGKAHFPREGVFVSNGTHWFVTQRNFYEPQIITTDNTFVSGNCDVLIGIVNNTVYDPLQPELDSGGSGYIPEAPRDGQAYVRKDGEWVLLSTFL

SEQ ID NO: 9659 - protein, 1177 aa, Artificial Sequence
  SARS-CoV-2/Shenzhen/SZTH-004/2020__EPI_ISL_406595 spike protein (1-1147) Foldon construct
MFVFLVLLPLVSSQCVNLTTRTQLPPAYTNSFTRGVYYPDKVFRSSVLHSTQDLFLPFFSNVTWFHAIHVSGTNGTKRFDNPVLPFNDGVYFASTEKSNIIRGWIFGTTLDSKTQSLLIVNNATNVVIKVCEFQFCNDPFLGVYYHKNNKSWMESEFRVYSSANNCTFEYVSQPFLMDLEGKQGNFKNLREFVFKNIDGYFKIYSKHTPINLVRDLPQGFSALEPLVDLPIGINITRFQTLLALHRSYLTPGDSSSGWTAGAAAYYVGYLQPRTFLLKYNENGTITDAVDCALDPLSETKCTLKSFTVEKGIYQTSNFRVQPTESIVRFPNITNLCPFGEVFNATRFASVYAWDRKRISNCVAYYSVLYNSASFSTFKCYGVSPTKLNDLCFTNVYADSFVIRGDEVRQIAPGQTGKIADYNYKLPDDFTGCVIAWNSNNLDSKVGGNYNYLYRLFRKSNLKPFERDISTEIYQAGSTPCNGVEGFNCYFPLQSYGFQPTNGVGYQPYRVVVLSFELLHAPATVCGPKKSTNLVKNKCVNFNFNGLTGTGVLTESNKKFLPFQQFGRDIADTTDAVRDPQTLEILDITPCSFGGVSVITPGTNTSNQVAVLYQDVNCTEVPVAIHADQLTPTWRVYSTGSNVFQTRAGCLIGAEHVNNSYECDIPIGAGICASYQTQTNSPRRARSVASQSIIAYTMSLGAENSVAYSNNSIAIPTNFTISVTTEILPVSMTKTSVDCTMYICGDSTECSNLLLQYGSFCTQLNRALTGIAVEQDKNTQEVFAQVKQIYKTPPIKDFGGFNFSQILPDPSKPSKRSFIEDLLFNKVTLADAGFIKQYGDCLGDIAARDLICAQKFNGLTVLPPLLTDEMIAQYTSALLAGTITSGWTFGAGAALQIPFAMQMAYRFNGIGVTQNVLYENQKLIANQFNSAIGKIQDSLSSTASALGKLQDVVNQNAQALNTLVKQLSSNFGAISSVLNDILSRLDKVEAEVQIDRLITGRLQSLQTYVTQQLIRAAEIRASANLAATKMSECVLGQSKRVDFCGKGYHLMSFPQSAPHGVVFLHVTYVPAQEKNFTTAPAICHDGKAHFPREGVFVSNGTHWFVTQRNFYEPQIITTDNTFVSGNCDVVIGIVNNTVYDPLQPELDSGGSGYIPEAPRDGQAYVRKDGEWVLLSTFL

SEQ ID NO: 9660 - protein, 1177 aa, Artificial Sequence
  SARS-CoV-2/France/IDF0372/2020__EPI_ISL_406596 spike protein (1-1147) Foldon construct
MFVFLVLLPLVSSQCVNLTTRTQLPPAYTNSFTRGVYYPDKVFRSSVLHSTQDLFLPFFSNVTWFHAIHVSGTNGTKRFDNPVLPFNDGVYFASTEKSNIIRGWIFGTTLDSKTQSLLIVNNATNVVIKVCEFQFCNDPFLGVYYHKNNKSWMESEFRVYSSANNCTFEYVSQPFLMDLEGKQGNFKNLREFVFKNIDGYFKIYSKHTPINLVRDLPQGFSALEPLVDLPIGINITRFQTLLALHRSYLTPGDSSSGWTAGAAAYYVGYLQPRTFLLKYNENGTITDAVDCALDPLSETKCTLKSFTVEKGIYQTSNFRVQPTESIVRFPNITNLCPFGEVFNATRFASVYAWNRKRISNCVADYSFLYNSASFSTFKCYGVSPTKLNDLCFTNVYADSFVIRGDEVRQIAPGQTGKIADYNYKLPDDFTGCVIAWNSNNLDSKVGGNYNYLYRLFRKSNLKPFERDISTEIYQAGSTPCNGVEGFNCYFPLQSYGFQPTNGVGYQPYRVVVLSFELLHAPATVCGPKKSTNLVKNKCVNFNFNGLTGTGVLTESNKKFLPFQQFGRDIADTTDAVRDPQTLEILDITPCSFGGVSVITPGTNTSNQVAVLYQDVNCTEVPVAIHADQLTPTWRVYSTGSNVFQTRAGCLIGAEHVNNSYECDIPIGAGICASYQTQTNSPRRARSVASQSIIAYTMSLGAENSVAYSNNSIAIPTNFTISVTTEILPVSMTKTSVDCTMYICGDSTECSNLLLQYGSFCTQLNRALTGIAVEQDKNTQEVFAQVKQIYKTPPIKDFGGFNFSQILPDPSKPSKRSFIEDLLFNKVTLADAGFIKQYGDCLGDIAARDLICAQKFNGLTVLPPLLTDEMIAQYTSALLAGTITSGWTFGAGAALQIPFAMQMAYRFNGIGVTQNVLYENQKLIANQFNSAIGKIQDSLSSTASALGKLQDVVNQNAQALNTLVKQLSSNFGAISSVLNDILSRLDKVEAEVQIDRLITGRLQSLQTYVTQQLIRAAEIRASANLAATKMSECVLGQSKRVDFCGKGYHLMSFPQSAPHGVVFLHVTYVPAQEKNFTTAPAICHDGKAHFPREGVFVSNGTHWFVTQRNFYEPQIITTDNTFVSGNCDVVIGIVNNTVYDPLQPELDSGGSGYIPEAPRDGQAYVRKDGEWVLLSTFL

SEQ ID NO: 9661 - protein, 1177 aa, Artificial Sequence
  SARS-CoV-2/Australia/VIC01/2020__EPI_ISL_406844 spike protein (1-1147) Foldon construct
MFVFLVLLPLVSSQCVNLTTRTQLPPAYTNSFTRGVYYPDKVFRSSVLHSTQDLFLPFFSNVTWFHAIHVSGTNGTKRFDNPVLPFNDGVYFASTEKSNIIRGWIFGTTLDSKTQSLLIVNNATNVVIKVCEFQFCNDPFLGVYYHKNNKSWMESEFRVYSSANNCTFEYVSQPFLMDLEGKQGNFKNLREFVFKNIDGYFKIYSKHTPINLVRDLPQGFSALEPLVDLPIGINITRFQTLLALHRRYLTPGDSSSGWTAGAAAYYVGYLQPRTFLLKYNENGTITDAVDCALDPLSETKCTLKSFTVEKGIYQTSNFRVQPTESIVRFPNITNLCPFGEVFNATRFASVYAWNRKRISNCVADYSVLYNSASFSTFKCYGVSPTKLNDLCFTNVYADSFVIRGDEVRQIAPGQTGKIADYNYKLPDDFTGCVIAWNSNNLDSKVGGNYNYLYRLFRKSNLKPFERDISTEIYQAGSTPCNGVEGFNCYFPLQSYGFQPTNGVGYQPYRVVVLSFELLHAPATVCGPKKSTNLVKNKCVNFNFNGLTGTGVLTESNKKFLPFQQFGRDIADTTDAVRDPQTLEILDITPCSFGGVSVITPGTNTSNQVAVLYQDVNCTEVPVAIHADQLTPTWRVYSTGSNVFQTRAGCLIGAEHVNNSYECDIPIGAGICASYQTQTNSPRRARSVASQSIIAYTMSLGAENSVAYSNNSIAIPTNFTISVTTEILPVSMTKTSVDCTMYICGDSTECSNLLLQYGSFCTQLNRALTGIAVEQDKNTQEVFAQVKQIYKTPPIKDFGGFNFSQILPDPSKPSKRSFIEDLLFNKVTLADAGFIKQYGDCLGDIAARDLICAQKFNGLTVLPPLLTDEMIAQYTSALLAGTITSGWTFGAGAALQIPFAMQMAYRFNGIGVTQNVLYENQKLIANQFNSAIGKIQDSLSSTASALGKLQDVVNQNAQALNTLVKQLSSNFGAISSVLNDILSRLDKVEAEVQIDRLITGRLQSLQTYVTQQLIRAAEIRASANLAATKMSECVLGQSKRVDFCGKGYHLMSFPQSAPHGVVFLHVTYVPAQEKNFTTAPAICHDGKAHFPREGVFVSNGTHWFVTQRNFYEPQIITTDNTFVSGNCDVVIGIVNNTVYDPLQPELDSGGSGYIPEAPRDGQAYVRKDGEWVLLSTFL

SEQ ID NO: 9662 - protein, 1177 aa, Artificial Sequence
  SARS-CoV-2/Germany/BavPat1/2020__EPI_ISL_406862 spike protein (1-1147) Foldon construct
MFVFLVLLPLVSSQCVNLTTRTQLPPAYTNSFTRGVYYPDKVFRSSVLHSTQDLFLPFFSNVTWFHAIHVSGTNGTKRFDNPVLPFNDGVYFASTEKSNIIRGWIFGTTLDSKTQSLLIVNNATNVVIKVCEFQFCNDPFLGVYYHKNNKSWMESEFRVYSSANNCTFEYVSQPFLMDLEGKQGNFKNLREFVFKNIDGYFKIYSKHTPINLVRDLPQGFSALEPLVDLPIGINITRFQTLLALHRSYLTPGDSSSGWTAGAAAYYVGYLQPRTFLLKYNENGTITDAVDCALDPLSETKCTLKSFTVEKGIYQTSNFRVQPTESIVRFPNITNLCPFGEVFNATRFASVYAWNRKRISNCVADYSVLYNSASFSTFKCYGVSPTKLNDLCFTNVYADSFVIRGDEVRQIAPGQTGKIADYNYKLPDDFTGCVIAWNSNNLDSKVGGNYNYLYRLFRKSNLKPFERDISTEIYQAGSTPCNGVEGFNCYFPLQSYGFQPTNGVGYQPYRVVVLSFELLHAPATVCGPKKSTNLVKNKCVNFNFNGLTGTGVLTESNKKFLPFQQFGRDIADTTDAVRDPQTLEILDITPCSFGGVSVITPGTNTSNQVAVLYQGVNCTEVPVAIHADQLTPTWRVYSTGSNVFQTRAGCLIGAEHVNNSYECDIPIGAGICASYQTQTNSPRRARSVASQSIIAYTMSLGAENSVAYSNNSIAIPTNFTISVTTEILPVSMTKTSVDCTMYICGDSTECSNLLLQYGSFCTQLNRALTGIAVEQDKNTQEVFAQVKQIYKTPPIKDFGGFNFSQILPDPSKPSKRSFIEDLLFNKVTLADAGFIKQYGDCLGDIAARDLICAQKFNGLTVLPPLLTDEMIAQYTSALLAGTITSGWTFGAGAALQIPFAMQMAYRFNGIGVTQNVLYENQKLIANQFNSAIGKIQDSLSSTASALGKLQDVVNQNAQALNTLVKQLSSNFGAISSVLNDILSRLDKVEAEVQIDRLITGRLQSLQTYVTQQLIRAAEIRASANLAATKMSECVLGQSKRVDFCGKGYHLMSFPQSAPHGVVFLHVTYVPAQEKNFTTAPAICHDGKAHFPREGVFVSNGTHWFVTQRNFYEPQIITTDNTFVSGNCDVVIGIVNNTVYDPLQPELDSGGSGYIPEAPRDGQAYVRKDGEWVLLSTFL

SEQ ID NO: 9663 - protein, 1177 aa, Artificial Sequence
  SARS-CoV-2/Wuhan/HBCDC-HB-02/2020__EPI_ISL_412978 spike protein (1-1147) Foldon construct
MFVFLVLLPLVSSQCVNLTTRTQLPPAYTNSFTRGVYYPDKVFRSSVLHSTQDLFLPFFSNVTWFHAIHVSGTNGTKRFDNPVLPFNDGVYFASTEKSNIIRGWIFGTTLDSKTQSLLIVNNATNVVIKVCEFQFCNDPFLGVYYHKNNKSWMESEFRVYSSANNCTFEYVSQPFLMDLEGKQGNFKNLREFVFKNIDGYFKIYSKHTPINLVRDLPQGFSALEPLVDLPIGINITRFQTLLALHRSYLTPGDSSSGWTAGAAAYYVGYLQPRTFLLKYNENGTITDAVDCALDPLSETKCTLKSFTVEKGIYQTSNFRVQPTESIVRFPNITNLCPFGEVFNATRFASVYAWNRKRISNCVADYSVLYNSASFSTFKCYGVSPTKLNDLCFTNVYADSFVIRGDEVRQIAPGQTGKIADYNYKLPDDFTGCVIAWNSNNLDSKVGGNYNYLYRLFRKSNLKPFERDISTEIYQAGSTPCNGVEGFNCYFPLQSYGFQPTNGVGYQPYRVVVLSFELLHAPATVCGPKKSTNLVKNKCVNFNFNGLTGTGVLTESNKKFLPFQQFGRDIADTTDAVRDPQTLEILDITPCSFGGVSVITPGTNTSNQVAVLYQDVNCTEVPVAIHADQLTPTWRVYSTGSNVFQTRAGCLIGAEHVNNSYECDIPIGAGICASYQTQTNSPRRARSVASQSIIAYTMSLGAENSVAYSNNSIAIPTNFTISVTTEILPVSMTKTSVDCTMYICGDSTECSNFLLQYGSFCTQLNRALTGIAVEQDKNTQEVFAQVKQIYKTPPIKDFGGFNFSQILPDPSKPSKRSFIEDLLFNKVTLADAGFIKQYGDCLGDIAARDLICAQKFNGLTVLPPLLTDEMIAQYTSALLAGTITSGWTFGAGAALQIPFAMQMAYRFNGIGVTQNVLYENQKLIANQFNSAIGKIQDSLSSTASALGKLQDVVNQNAQALNTLVKQLSSNFGAISSVLNDILSRLDKVEAEVQIDRLITGRLQSLQTYVTQQLIRAAEIRASANLAATKMSECVLGQSKRVDFCGKGYHLMSFPQSAPHGVVFLHVTYVPAQEKNFTTAPAICHDGKAHFPREGVFVSNGTHWFVTQRNFYEPQIITTDNTFVSGNCDVVIGIVNNTVYDPLQPELDSGGSGYIPEAPRDGQAYVRKDGEWVLLSTFL

SEQ ID NO: 9664 - protein, 1177 aa, Artificial Sequence
  SARS-CoV-2/Australia/QLD02/2020__EPI_ISL_407896 spike protein (1-1147) Foldon construct
MFVFLVLLPLVSSQCVNLTTRTQLPPAYTNSFTRGVYYPDKVFRSSVLHSTQDLFLPFFSNVTWFHAIHVSGTNGTKRFDNPVLPFNDGVYFASTEKSNIIRGWIFGTTLDSKTQSLLIVNNATNVVIKVCEFQFCNDPFLGVYYHKNNKSWMESEFRVYSSANNCTFEYVSQPFLMDLEGKQGNFKNLREFVFKNIDGYFKIYSKHTPINLVRDLPQGFSALEPLVDLPIGINITRFQTLLALHRSYLTPGDSSSGWTAGAAAYYVGYLQPRTFLLKYNENGTITDAVDCALDPLSETKCTLKSFTVEKGIYQTSNFRVQPTESIVRFPNITNLCPFGEVFNATRFASVYAWNRKRISNCVADYSVLYNSASFSTFKCYGVSPTKLNDLCFTNVYADSFVIRGDEVRQIAPGQTGKIADYNYKLPDDFTGCVIAWNSNNLDSKVGGNYNYLYRLFRKSNLKPFERDISTEIYQAGSTPCNGVEGFNCYFPLQSYGFQPTNGVGYQPYRVVVLSFELLHAPATVCGPKKSTNLVKNKCVNFNFNGLTGTGVLTESNKKFLPFQQFGRDIADTTDAVRDPQTLEILDITPCSFGGVSVITPGTNTSNQVAVLYQDVNCTEVPVAIHADQLTPTWRVYSTGSNVFQTRAGCLIGAEHVNNSYECDIPIGAGICASYQTQTNSPRRARSVASQSIIAYTMSLGAENSVAYSNNSIAIPTNFTISVTTEILPVSMTKTSVDCTMYICGDSTECSNLLLQYGSFCTQLNRALTGIAVEQDKNTQEVFAQVKQIYKTPPIKDFGGFNFSQILPDPSKPSKRSFIEDLLFNKVTLADAGFIKQYGDCLGDIAARDLICAQKFNGLTVLPPLLTDEMIAQYTSALLAGTITSGWTFGAGAALQIPFAMQMAYRFNGIGVTQNVLYENQKLIANQFNSAIGKIQDSLSSTASALGKLQDVVNQNAQALNTLVKQLSSNFGAISSVLNDILSRLDKVEAEVQIDRLITGRLQSLQTYVTQQLIRAAEIRASANLAATKMSECVLGQSKRVDFCGKGYHLMSFPQSAPHGVVFLHVTYVPAQEKNFTTAPAICHDGKAHFPREGVFVSNGTHWFVTQRNFYEPQIITTDNTFVSGNCDVVIGIVNNTVYDPLQLELDSGGSGYIPEAPRDGQAYVRKDGEWVLLSTFL

SEQ ID NO: 9665 - protein, 1177 aa, Artificial Sequence
  SARS-CoV-2/India/1-31/2020__EPI_ISL_413523 spike protein (1-1147) Foldon construct
MFVFLVLLPLVSSQCVNLTTRTQLPPAYTNSFTRGVYYPDKVFRSSVLHSTQDLFLPFFSNVTWFHAIHVSGTNGTKRFDNPVLPFNDGVYFASTEKSNIIRGWIFGTTLDSKTQSLLIVNNATNVVIKVCEFQFCNDPFLGVYYHKNNKSWMESEFRVYSSANNCTFEYVSQPFLMDLEGKQGNFKNLREFVFKNIDGYFKIYSKHTPINLVRDLPQGFSALEPLVDLPIGINITRFQTLLALHRSYLTPGDSSSGWTAGAAAYYVGYLQPRTFLLKYNENGTITDAVDCALDPLSETKCTLKSFTVEKGIYQTSNFRVQPTESIVRFPNITNLCPFGEVFNATRFASVYAWNRKRISNCVADYSVLYNSASFSTFKCYGVSPTKLNDLCFTNVYADSFVIRGDEVRQIAPGQTGKIADYNYKLPDDFTGCVIAWNSNNLDSKVGGNYNYLYRLFRKSNLKPFERDISTEIYQAGSTPCNGVEGFNCYFPLQSYGFQPTNGVGYQPYRVVVLSFELLHAPATVCGPKKSTNLVKNKCVNFNFNGLTGTGVLTESNKKFLPFQQFGRDIADTTDAVRDPQTLEILDITPCSFGGVSVITPGTNTSNQVAVLYQDVNCTEVPVAIHADQLTPTWRVYSTGSNVFQTRAGCLIGAEHVNNSYECDIPIGAGICASYQTQTNSPRRARSVASQSIIAYTMSLGAENSVAYSNNSIAIPTNFTISVTTEILPVSMTKTSVDCTMYICGDSTECSNLLLQYGSFCTQLNRALTGIAVEQDKNTQEVFAQVKQIYKTPPIKDFGGFNFSQILPDPSKPSKRSFIEDLLFNKVTLADAGFIKQYGDCLGDIAARDLICAQKFNGLTVLPPLLTDEMIAQYTSALLAGTITSGWTFGAGAALQIPFAMQMAYRFNGIGVTQNVLYENQKLIANQFNSVIGKIQDSLSSTASALGKLQDVVNQNAQALNTLVKQLSSNFGAISSVLNDILSRLDKVEAEVQIDRLITGRLQSLQTYVTQQLIRAAEIRASANLAATKMSECVLGQSKRVDFCGKGYHLMSFPQSAPHGVVFLHVTYVPAQEKNFTTAPAICHDGKAHFPREGVFVSNGTHWFVTQRNFYEPQIITTDNTFVSGNCDVVIGIVNNTVYDPLQPELDSGGSGYIPEAPRDGQAYVRKDGEWVLLSTFL

SEQ ID NO: 9666 - protein, 1177 aa, Artificial Sequence
  SARS-CoV-2/Guangdong/GD2020087-P0008/2020__EPI_ISL_413863 spike protein (1-1147) Foldon construct
MFVFLVLLPLVSSQCVNLTTRTQLPPAYTNSFTRGVYYPDKVFRSSVLHSTQDLFLPFFSNVTWFHAIHVSGTNGTKRFDNPVLPFNDGVYFASTEKSNIIRGWIFGTTLDSKTQSLLIVNNATNVVIKVCEFQFCNDPFLGVYYHKNNKSWMESEFRVYSSANNCTFEYVSQPFLMDLEGKQGNFKNLREFVFKNIDGYFKIYSKHTPINLVRDLPQGFSALEPLVDLPIGINITRFQTLLALHRSYLTPGDSSSGWTAGAAAYYVGYLQPRTFLLKYNENGTITDAVDCALDPLSETKCTLKSFTVEKGIYQTSNFRVQPTESIVRFPNITNLCPFGEVFNATRFASVYAWNRKRISNCVADYSVLYNSASFSTFKCYGVSPTKLNDLCFTNVYADSFVIRGDEVREIAPGQTGKIADYNYKLPDDFTGCVIAWNSNNLDSKVGGNYNYLYRLFRKSNLKPFERDISTEIYQAGSTPCNGVEGFNCYFPLQSYGFQPTNGVGYQPYRVVVLSFELLHAPATVCGPKKSTNLVKNKCVNFNFNGLTGTGVLTESNKKFLPFQQFGRDIADTTDAVRDPQTLEILDITPCSFGGVSVITPGTNTSNQVAVLYQDVNCTEVPVAIHADQLTPTWRVYSTGSNVFQTRAGCLIGAEHVNNSYECDIPIGAGICASYQTQTNSPRRARSVASQSIIAYTMSLGAENSVAYSNNSIAIPTNFTISVTTEILPVSMTKTSVDCTMYICGDSTECSNLLLQYGSFCTQLNRALTGIAVEQDKNTQEVFAQVKQIYKTPPIKDFGGFNFSQILPDPSKPSKRSFIEDLLFNKVTLADAGFIKQYGDCLGDIAARDLICAQKFNGLTVLPPLLTDEMIAQYTSALLAGTITSGWTFGAGAALQIPFAMQMAYRFNGIGVTQNVLYENQKLIANQFNSAIGKIQDSLSSTASALGKLQDVVNQNAQALNTLVKQLSSNFGAISSVLNDILSRLDKVEAEVQIDRLITGRLQSLQTYVTQQLIRAAEIRASANLAATKMSECVLGQSKRVDFCGKGYHLMSFPQSAPHGVVFLHVTYVPAQEKNFTTAPAICHDGKAHFPREGVFVSNGTHWFVTQRNFYEPQIITTDNTFVSGNCDVVIGIVNNTVYDPLQPELDSGGSGYIPEAPRDGQAYVRKDGEWVLLSTFL

SEQ ID NO: 9667 - protein, 1177 aa, Artificial Sequence
  SARS-CoV-2/Sweden/01/2020__EPI_ISL_411951 spike protein (1-1147) Foldon construct
MFVFLVLLPLVSSQCVNLTTRTQLPPAYTNSFTRGVYYPDKVFRSSVLHSTQDLFLPFFSNVTWFHAIHVSGTNGTKRFDNPVLPFNDGVYFASTEKSNIIRGWIFGTTLDSKTQSLLIVNNATNVVIKVCEFQFCNDPFLGVYYHKNNKSWMESEFRVYSSANNCTFEYVSQPFLMDLEGKQGNFKNLREFVFKNIDGYFKIYSKHTPINLVRDLPQGFSALEPLVDLPIGINITRFQTLLALHRSYLTPGDSSSGWTAGAAAYYVGYLQPRTFLLKYNENGTITDAVDCALDPLSETKCTLKSFTVEKGIYQTSNFRVQPTESIVRFPNITNLCPFGEVFNATRFASVYAWNRKRISNCVADYSVLYNSASFSTFKCYGVSPTKLNDLCFTNVYADSFVIRGDEVRQIAPGQTGKIADYNYKLPDDFTGCVIAWNSNNLDSKVGGNYNYLYRLFRKSNLKPFERDISTEIYQAGSTPCNGVEGFNCYFPLQSYGFQPTNGVGYQPYRVVVLSFELLHAPATVCGPKKSTNLVKNKCVNFNFNGLTGTGVLTESNKKFLPFQQFGRDIADTTDAVRDPQTLEILDITPCSFGGVSVITPGTNTSNQVAVLYQDVNCTEVPVAIHADQLTPTWRVYSTGSNVFQTRAGCLIGAEHVNNSYECDIPIGAGICASYQTQTNSPRRARSVASQSIIAYTMSLGAENSVAYSNNSIAIPTNFTISVTTEILPVSMTKTSVDCTMYICGDSTECSNLLLQYGSFCTQLNRALTGIAVEQDKNTQEVFAQVKQIYKTPPIKDCGGFNFSQILPDPSKPSKRSFIEDLLFNKVTLADAGFIKQYGDCLGDIAARDLICAQKFNGLTVLPPLLTDEMIAQYTSALLAGTITSGWTFGAGAALQIPFAMQMAYRFNGIGVTQNVLYENQKLIANQFNSAIGKIQDSLSSTASALGKLQDVVNQNAQALNTLVKQLSSNFGAISSVLNDILSRLDKVEAEVQIDRLITGRLQSLQTYVTQQLIRAAEIRASANLAATKMSECVLGQSKRVDFCGKGYHLMSFPQSAPHGVVFLHVTYVPAQEKNFTTAPAICHDGKAHFPREGVFVSNGTHWFVTQRNFYEPQIITTDNTFVSGNCDVVIGIVNNTVYDPLQPELDSGGSGYIPEAPRDGQAYVRKDGEWVLLSTFL

SEQ ID NO: 9668 - protein, 1177 aa, Artificial Sequence
  SARS-CoV-2/Tianmen/HBCDC-HB-07/2020__EPI_ISL_412983 spike protein (1-1147) Foldon construct
MFVFLVLLPLVSSQCVNLTTRTQLPPAYTNSFTRGVYYPDKVFRSSVLHSTQDLFLPFFSNVTWFHAIHVSGTNGTKRFDNPVLPFNDGVYFASTEKSNIIRGWIFGTTLDSKTQSLLIVNNATNVVIKVCEFQFCNDPFLGVYYHKNNKSWMESEFRVYSSANNCTFEYVSQPFLMDLEGKQGNFKNLREFVFKNIDGYFKIYSKHTPINLVRDLPQGFSALEPLVDLPIGINITRFQTLLALHRSYLTPGDSSSGWTAGAAAYYVGYLQPRTFLLKYNENGTITDAVDCALDPLSETKCTLKSFTVEKGIYQTSNFRVQPTESIVRFPNITNLCPFGEVFNATRFASVYAWNRKRISNCVADYSVLYNSASFSTFKCYGVSPTKLNDLCFTNVYADSFVIRGDEVRQIAPGQTGKIADYNYKLPDDFTGCVIAWNSNNLDSKVGGNYNYLYRLFRKSNLKPFERDISTEIYQAGSTPCNGVEGFNCYFPLQSYGFQPTNGVGYQPYRVVVLSFELLHAPATVCGPKKSTNLVKNKCVNFNFNGLTGTGVLTESNKKFLPFQQFGRDIADTTDAVRDPQTLEILDITPCSFGGVSVITPGTNTSNQVAVLYQDLNCTEVPVAIHADQLTPTWRVYSTGSNVFQTRAGCLIGAEHVNNSYECDIPIGAGICASYQTQTNSPRRARSVASQSIIAYTMSLGAENSVAYSNNSIAIPTNFTISVTTEILPVSMTKTSVDCTMYICGDSTECSNLLLQYGSFCTQLNRALTGIAVEQDKNTQEVFAQVKQIYKTPPIKDFGGFNFSQILPDPSKPSKRSFIEDLLFNKVTLADAGFIKQYGDCLGDIAARDLICAQKFNGLTVLPPLLTDEMIAQYTSALLAGTITSGWTFGAGAALQIPFAMQMAYRFNGIGVTQNVLYENQKLIANQFNSAIGKIQDSLSSTASALGKLQDVVNQNAQALNTLVKQLSSNFGAISSVLNDILSRLDKVEAEVQIDRLITGRLQSLQTYVTQQLIRAAEIRASANLAATKMSECVLGQSKRVDFCGKGYHLMSFPQSAPHGVVFLHVTYVPAQEKNFTTAPAICHDGKAHFPREGVFVSNGTHWFVTQRNFYEPQIITTDNTFVSGNCDVVIGIVNNTVYDPLQPELDSGGSGYIPEAPRDGQAYVRKDGEWVLLSTFL

SEQ ID NO: 9669 - protein, 1177 aa, Artificial Sequence
  SARS-CoV-2/Hong Kong/case42_VM20002493/2020__EPI_ISL_414527 spike protein (1-1147) Foldon construct
MFVFLVLLPLVSSQCVNLTTRTQLPPAYTNSFTRGVYYPDKVFRSSVLHSTQDLFLPFFSNVTWFHAIHVSGTNGTKRFDNPVLPFNDGVYFASTEKSNIIRGWIFGTTLDSKTQSLLIVNNATNVVIKVCEFQFCNDPFLGVYYHKNNKSWMESEFRVYSSANNCTFEYVSQPFLMDLEGKQGNFKNLREFVFKNIDGYFKIYSKHTPINLVRDLPQGFSALEPLVDLPIGINITRFQTLLALHRSYLTPGDSSSGWTAGAAAYYVGYLQPRTFLLKYNENGTITDAVDCALDPLSETKCTLKSFTVEKGIYQTSNFRVQPTESIVRFPNITNLCPFGEVFNATRFASVYAWNRKRISNCVADYSVLYNSASFSTFKCYGVSPTKLNDLCFTNVYADSFVIRGDEVRQIAPGQTGKIADYNYKLPDDFTGCVIAWNSNNLDSKVGGNYNYLYRLFRKSNLKPFERDISTEIYQAGSTPCNGVEGFNCYFPLQSYGFQPTNGVGYQPYRVVVLSFELLHAPATVCGPKKSTNLVKNKCVNFNFNGLTGTGVLTESNKKFLPFQQFGRDIADTTDAVRDPQTLEILDITPCSFGGVSVITPGTNTSNQVAVLYQDVNCTEVPVAIHADQLTPTWRVYSTGSNVFQTRAGCLIGAEHVNNSYECDIPIGAGICASYQTQTNSPRRARSVASQSIIAYTMSLGAENSVAYSNNSIAIPTNFAISVTTEILPVSMTKTSVDCTMYICGDSTECSNLLLQYGSFCTQLNRALTGIAVEQDKNTQEVFAQVKQIYKTPPIKDFGGFNFSQILPDPSKPSKRSFIEDLLFNKVTLADAGFIKQYGDCLGDIAARDLICAQKFNGLTVLPPLLTDEMIAQYTSALLAGTITSGWTFGAGAALQIPFAMQMAYRFNGIGVTQNVLYENQKLIANQFNSAIGKIQDSLSSTASALGKLQDVVNQNAQALNTLVKQLSSNFGAISSVLNDILSRLDKVEAEVQIDRLITGRLQSLQTYVTQQLIRAAEIRASANLAATKMSECVLGQSKRVDFCGKGYHLMSFPQSAPHGVVFLHVTYVPAQEKNFTTAPAICHDGKAHFPREGVFVSNGTHWFVTQRNFYEPQIITTDNTFVSGNCDVVIGIVNNTVYDPLQPELDSGGSGYIPEAPRDGQAYVRKDGEWVLLSTFL

SEQ ID NO: 9670 - protein, 1177 aa, Artificial Sequence
  SARS-CoV-2/USA/CruiseA-23/2020__EPI_ISL_414482 spike protein (1-1147) Foldon construct
MFVFLVLLPLVSSQCVNLTTRTQLPPAYTNSFTRGVYYPDKVFRSSVLHSTQDLFLPFFSNVTWFHAIHVSGTNGTKRFDNPVLPFNDGVYFASTEKSNIIRGWIFGTTLDSKTQSLLIVNNATNVVIKVCEFQFCNDPFLGVYYHKNNKSWMESEFRVYSSANNCTFEYVSQPFLMDLEVKQGNFKNLREFVFKNIDGYFKIYSKHTPINLVRDLPQGFSALEPLVDLPIGINITRFQTLLALHRSYLTPGDSSSGWTAGAAAYYVGYLQPRTFLLKYNENGTITDAVDCALDPLSETKCTLKSFTVEKGIYQTSNFRVQPTESIVRFPNITNLCPFGEVFNATRFASVYAWNRKRISNCVADYSVLYNSASFSTFKCYGVSPTKLNDLCFTNVYADSFVIRGDEVRQIAPGQTGKIADYNYKLPDDFTGCVIAWNSNNLDSKVGGNYNYLYRLFRKSNLKPFERDISTEIYQAGSTPCNGVEGFNCYFPLQSYGFQPTNGVGYQPYRVVVLSFELLHAPATVCGPKKSTNLVKNKCVNFNFNGLTGTGVLTESNKKFLPFQQFGRDIADTTDAVRDPQTLEILDITPCSFGGVSVITPGTNTSNQVAVLYQDVNCTEVPVAIHADQLTPTWRVYSTGSNVFQTRAGCLIGAEHVNNSYECDIPIGAGICASYQTQTNSPRRARSVASQSIIAYTMSLGAENSVAYSNNSIAIPTNFTISVTTEILPVSMTKTSVDCTMYICGDSTECSNLLLQYGSFCTQLNRALTGIAVEQDKNTQEVFAQVKQIYKTPPIKDFGGFNFSQILPDPSKPSKRSFIEDLLFNKVTLADAGFIKQYGDCLGDIAARDLICAQKFNGLTVLPPLLTDEMIAQYTSALLAGTITSGWTFGAGAALQIPFAMQMAYRFNGIGVTQNVLYENQKLIANQFNSAIGKIQDSLSSTASALGKLQDVVNQNAQALNTLVKQLSSNFGAISSVLNDILSRLDKVEAEVQIDRLITGRLQSLQTYVTQQLIRAAEIRASANLAATKMSECVLGQSKRVDFCGKGYHLMSFPQSAPHGVVFLHVTYVPAQEKNFTTAPAICHDGKAHFPREGVFVSNGTHWFVTQRNFYEPQIITTDNTFVSGNCDVVIGIVNNTVYDPLQPELDSGGSGYIPEAPRDGQAYVRKDGEWVLLSTFL

SEQ ID NO: 9671 - protein, 1177 aa, Artificial Sequence
  SARS-CoV-2/Hong Kong/case85_VM20002868/2020__EPI_ISL_414519 spike protein (1-1147) Foldon construct
MFVFLVLVPLVSSQCVNLTTRTQLPPAYTNSFTRGVYYPDKVFRSSVLHSTQDLFLPFFSNVTWFHAIHVSGTNGTKRFDNPVLPFNDGVYFASTEKSNIIRGWIFGTTLDSKTQSLLIVNNATNVVIKVCEFQFCNDPFLGVYYHKNNKSWMESEFRVYSSANNCTFEYVSQPFLMDLEGKQGNFKNLREFVFKNIDGYFKIYSKHTPINLVRDLPQGFSALEPLVDLPIGINITRFQTLLALHRSYLTPGDSSSGWTAGAAAYYVGYLQPRTFLLKYNENGTITDAVDCALDPLSETKCTLKSFTVEKGIYQTSNFRVQPTESIVRFPNITNLCPFGEVFNATRFASVYAWNRKRISNCVADYSVLYNSASFSTFKCYGVSPTKLNDLCFTNVYADSFVIRGDEVRQIAPGQTGKIADYNYKLPDDFTGCVIAWNSNNLDSKVGGNYNYLYRLFRKSNLKPFERDISTEIYQAGSTPCNGVEGFNCYFPLQSYGFQPTNGVGYQPYRVVVLSFELLHAPATVCGPKKSTNLVKNKCVNFNFNGLTGTGVLTESNKKFLPFQQFGRDIADTTDAVRDPQTLEILDITPCSFGGVSVITPGTNTSNQVAVLYQDVNCTEVPVAIHADQLTPTWRVYSTGSNVFQTRAGCLIGAEHVNNSYECDIPIGAGICASYQTQTNSPRRARSVASQSIIAYTMSLGAENSVAYSNNSIAIPTNFTISVTTEILPVSMTKTSVDCTMYICGDSTECSNLLLQYGSFCTQLNRALTGIAVEQDKNTQEVFAQVKQIYKTPPIKDFGGFNFSQILPDPSKPSKRSFIEDLLFNKVTLADAGFIKQYGDCLGDIAARDLICAQKFNGLTVLPPLLTDEMIAQYTSALLAGTITSGWTFGAGAALQIPFAMQMAYRFNGIGVTQNVLYENQKLIANQFNSAIGKIQDSLSSTASALGKLQDVVNQNAQALNTLVKQLSSNFGAISSVLNDILSRLDKVEAEVQIDRLITGRLQSLQTYVTQQLIRAAEIRASANLAATKMSECVLGQSKRVDFCGKGYHLMSFPQSAPHGVVFLHVTYVPAQEKNFTTAPAICHDGKAHFPREGVFVSNGTHWFVTQRNFYEPQIITTDNTFVSGNCDVVIGIVNNTVYDPLQPELDSGGSGYIPEAPRDGQAYVRKDGEWVLLSTFL

SEQ ID NO: 9672 - protein, 1177 aa, Artificial Sequence; identical to SEQ ID NO: 9662
  SARS-CoV-2/England/200990660/2020__EPI_ISL_414523 spike protein (1-1147) Foldon construct

SEQ ID NO: 9673 - protein, 1177 aa, Artificial Sequence
  SARS-CoV-2/Australia/NSW09/2020__EPI_ISL_413595 spike protein (1-1147) Foldon construct
MFVFLVLLPLVSSQCVNLTTRTQLPPAYTNSFTRGVYYPDKVFRSSVLHSTQDLFLPFFSNVTWFHAIHVSGTNGTKRFDNPVLPFNDGVYFASTEKSNIIRGWIFGTTLDSKTQSLLIVNNATNVVIKVCEFQFCNDPFLGVYYHKNNKSWMESEFRVYSSANNCTFEYVSQPFLMDLEGKQGNFKNLREFVFKNIDGYFKIYSKHTPINLVRDLPQGFSALEPLVDLPIGINITRFQTLLALHRSYLTPGDSSSGWTAGAAAYYVGYLQPRTFLLKYNENGTITDAVDCALDPLSETKCTLKSFTVEKGIYQTSNFRVQPTESIVRFPNITNLCPFGEVFNATRFASVYAWNRKRISNCVADYSVLYNSASFSTFKCYGVSPTKLNDLCFTNVYADSFVIRGDEVRQIAPGQTGKIADYNYKLPDDFTGCVIAWNSNNLDSKVGGNYNYLYRLFRKSNLKPFERDISTEIYQAGSTPCNGVEGFNCYFPLQSYGFQPTNGVGYQPYRVVVLSFELLHAPATVCGPKKSTNLVKNKCVNFNFNGLTGTGVLTESNKKFLPFQQFGRDIADTTDAVRDPQTLEILDITPCSFGGVSVITPGTNTSNQVAVLYQDVNCTEVPVAIHADQLTPTWRVYSTGSNVFQTRAGCLIGAEHVNNSYECDIPIGAGICASYQTQTNSPRRARSVASQSIIAYTMSLGAENSVAYSNNSIAIPTNFTISVTTEILPVSMTKTSVDCTMYICGDSTECSNLLLQYGSFCTQLNRALTGIAVEQDKNTQEVFAQVKQIYKTPPIKDFGGFNFSQILPDPSKPSKRSFIEDLLFNKVTLADAGFIKQYGDCLGDIAARDLICAQKFNGLTVLPPLLTDEMIAQYTSALLAGTITSGWTFGAGAALQIPFAMQMAYRFNGIGVTQNVLYENQKLIANQFNSAIGKIQDSLSFTASALGKLQDVVNQNAQALNTLVKQLSSNFGAISSVLNDILSRLDKVEAEVQIDRLITGRLQSLQTYVTQQLIRAAEIRASANLAATKMSECVLGQSKRVDFCGKGYHLMSFPQSAPHGVVFLHVTYVPAQEKNFTTAPAICHDGKAHFPREGVFVSNGTHWFVTQRNFYEPQIITTDNTFVSGNCDVVIGIVNNTVYDPLQPELDSGGSGYIPEAPRDGQAYVRKDGEWVLLSTFL

SEQ ID NO: 9674 - protein, 1177 aa, Artificial Sequence; identical to SEQ ID NO: 9654
  SARS-CoV-2/Australia/NSW10/2020__EPI_ISL_413596 spike protein (1-1147) Foldon construct

SEQ ID NO: 9675 - protein, 1177 aa, Artificial Sequence
  SARS-CoV-2/Switzerland/1000477797/2020__EPI_ISL_413023 spike protein (1-1147) Foldon construct
MFVFLVLLPLVSSQCVNLTTRTQLPPAYTNSFTRGVYYPDKVFRSSVLHSTQDLFLPFFSNVTWFHAIHVSGTNGTKRFDNPVLPFNDGVYFASTEKSNIIRGWIFGTTLDSKTQSLLIVNNATNVVIKVCEFQFCNDPFLGVYYHKNNKSWMESEFRVYSSANNCTFEYVSQPFLMDLEGKQGNFKNLREFVFKNIDGYFNIYSKHTPINLVRDLPQGFSALEPLVDLPIGINITRFQTLLALHRSYLTPGDSSSGWTAGAAAYYVGYLQPRTFLLKYNENGTITDAVDCALDPLSETKCTLKSFTVEKGIYQTSNFRVQPTESIVRFPNITNLCPFGEVFNATRFASVYAWNRKRISNCVADYSVLYNSASFSTFKCYGVSPTKLNDLCFTNVYADSFVIRGDEVRQIAPGQTGKIADYNYKLPDDFTGCVIAWNSNNLDSKVGGNYNYLYRLFRKSNLKPFERDISTEIYQAGSTPCNGVEGFNCYFPLQSYGFQPTNGVGYQPYRVVVLSFELLHAPATVCGPKKSTNLVKNKCVNFNFNGLTGTGVLTESNKKFLPFQQFGRDIADTTDAVRDPQTLEILDITPCSFGGVSVITPGTNTSNQVAVLYQGVNCTEVPVAIHADQLTPTWRVYSTGSNVFQTRAGCLIGAEHVNNSYECDIPIGAGICASYQTQTNSPRRARSVASQSIIAYTMSLGAENSVAYSNNSIAIPTNFTISVTTEILPVSMTKTSVDCTMYICGDSTECSNLLLQYGSFCTQLNRALTGIAVEQDKNTQEVFAQVKQIYKTPPIKDFGGFNFSQILPDPSKPSKRSFIEDLLFNKVTLADAGFIKQYGDCLGDIAARDLICAQKFNGLTVLPPLLTDEMIAQYTSALLAGTITSGWTFGAGAALQIPFAMQMAYRFNGIGVTQNVLYENQKLIANQFNSAIGKIQDSLSSTASALGKLQDVVNQNAQALNTLVKQLSSNFGAISSVLNDILSRLDKVEAEVQIDRLITGRLQSLQTYVTQQLIRAAEIRASANLAATKMSECVLGQSKRVDFCGKGYHLMSFPQSAPHGVVFLHVTYVPAQEKNFTTAPAICHDGKAHFPREGVFVSNGTHWFVTQRNFYEPQIITTDNTFVSGNCDVVIGIVNNTVYDPLQPELDSGGSGYIPEAPRDGQAYVRKDGEWVLLSTFL

SEQ ID NO: 9676 - protein, 1177 aa, Artificial Sequence
  SARS-CoV-2/Belgium/BA-02291/2020__EPI_ISL_415159 spike protein (1-1147) Foldon construct
MFVFLVLLPLVSSQCVNLTTRTQLPPAYTNSFTRGVYYPDKVFRSSVLHSTQDLFLPFFSNVTWFHAIHVSGTNGTKRFDNPVLPFNDGVYFASTEKSNIIRGWIFGTTLDSKTQSLLIVNNATNVVIKVCEFQFCNDPFLGVYYHKNNKSWMESEFRVYSSANNCTFEYVSQPFLMDLEGKQGNFKNLREFVFKNIDGYFKIYSKHTPINLVRDLPQGFSALEPLVDLPIGINITRFQTLLALHRSYLTPGDSSSGWTAGAAAYYVGYLQPRTFLLKYNENGTITDAVDCALDPLSETKCTLKSFTVEKGIYQTSNFRVQPTESIVRFPNITNLCPFGEVFNATRFASVYAWNRKRISNCVADYSVLYNSASFSTFKCYGVSPTKLNDLCFTNVYADSFVIRGDEVRQIAPGQTGKIADYNYKLPDDFTGCVIAWNSNNLDSKVGGNYNYLYRLFRRSNLKPFERDISTEIYQAGSTPCNGVEGFNCYFPLQSYGFQPTNGVGYQPYRVVVLSFELLPAPATVCGPKKSTNLVKNKCVNFNFNGLTGTGVLTESNKKFLPFQQFGRDIADTTDAVRDPQTLEILDITPCSFGGVSVITPGTNTSNQVAVLYQGVNCTEVPVAIHADQLTPTWRVYSTGSNVFQTRAGCLIGAEHVNNSYECDIPIGAGICASYQTQTNSPRRARSVASQSIIAYTMSLGAENSVAYSNNSIAIPTNFTISVTTEILPVSMTKTSVDCTMYICGDSTECSNLLLQYGSFCTQLNRALTGIAVEQDKNTQEVFAQVKQIYKTPPIKDFGGFNFSQILPDPSKPSKRSFIEDLLFNKVTLADAGFIKQYGDCLGDIAARDLICAQKFNGLTVLPPLLTDEMIAQYTSALLAGTITSGWTFGAGAALQIPFAMQMAYRFNGIGVTQNVLYENQKLIANQFNSAIGKIQDSLSSAAPALGKLQDVVNQNAQALNTLVKQLSSNFGAISSVLNDILSRLDKVEAEVQIDRLITGRLQSLQTYVTQQLIRAAEIRASANLAATKMSECVLGQSKRVDFCGKGYHLMSFPQSAPHGVVFLHVTYVPAQEKNFTTAPAICHDGKAHFPREGVFVSNGTHWFVTQRNFYEPQIITTDNTFVSGNCDVVIGIVNNTVYDPLQPELDSGGSGYIPEAPRDGQAYVRKDGEWVLLSTFL

SEQ ID NO: 9677 - protein, 1177 aa, Artificial Sequence
  SARS-CoV-2/USA/WA8-UW5/2020__EPI_ISL_413486 spike protein (1-1147) Foldon construct
MFVFLVLLPLVSSQCVNLTTRTQLPPAYTNSFTRGVYYPDKVFRSSVLHSTQDLFLPFFSNVTWFHAIHVSGTNGTKRFDNPVLPFNDGVYFASTEKSNIIRGWIFGTTLDSKTQSLLIVNNATNVVIKVCEFQFCNDPFLGVYYHKNNKSWMESEFRVYSSANNCTFEYVSQPFLMDLEGKQGNFKNLREFVFKNIDGYFKIYSKHTPINLVRDLPQGFSALEPLVDLPIGINITRFQTLLALHRSYLTPGDSSSGWTAGAAAYYVGYLQPRTFLLKYNENGTITDAVDCALDPLSETKCTLKSFTVEKGIYQTSNFRVQPTESIVRFPNITNLCPFGEVFNATRFASVYAWNRKRISNCVADYSVLYNSASFSTFKCYGVSPTKLNDLCFTNVYADSFVIRGDEVRQIAPGQTGKIADYNYKLPDDFTGCVIAWNSNNLDSKVGGNYNYLYRLFRKSNLKPFERDISTEIYQAGSTPCNGVEGFNCYFPLQSYGFQPTNGVGYQPYRVVVLSFELLHAPATVCGPKKSTNLVKNKCVNFNFNGLTGTGVLTESNKKFLPFQQFGRDIADTTDAVRDPQTLEILDITPCSFGGVSVITPGTNTSNQVAVLYQDVNCTEVPVAIHADQLTPTWRVYSTGSNVFQTRAGCLIGAEYVNNSYECDIPIGAGICASYQTQTNSPRRARSVASQSIIAYTMSLGAENSVAYSNNSIAIPTNFTISVTTEILPVSMTKTSVDCTMYICGDSTECSNLLLQYGSFCTQLNRALTGIAVEQDKNTQEVFAQVKQIYKTPPIKDFGGFNFSQILPDPSKPSKRSFIEDLLFNKVTLADAGFIKQYGDCLGDIAARDLICAQKFNGLTVLPPLLTDEMIAQYTSALLAGTITSGWTFGAGAALQIPFAMQMAYRFNGIGVTQNVLYENQKLIANQFNSAIGKIQDSLSSTASALGKLQDVVNQNAQALNTLVKQLSSNFGAISSVLNDILSRLDKVEAEVQIDRLITGRLQSLQTYVTQQLIRAAEIRASANLAATKMSECVLGQSKRVDFCGKGYHLMSFPQSAPHGVVFLHVTYVPAQEKNFTTAPAICHDGKAHFPREGVFVSNGTHWFVTQRNFYEPQIITTDNTFVSGNCDVVIGIVNNTVYDPLQPELDSGGSGYIPEAPRDGQAYVRKDGEWVLLSTFL

SEQ ID NO: 9678 - protein, 1177 aa, Artificial Sequence
  SARS-CoV-2/England/20102000506/2020__EPI_ISL_415147 spike protein (1-1147) Foldon construct
MFVFLVLLPLVSSQCVNLTTRTQLPPAYTNSFTRGVYYPDKVFRSSVLHSTQDLFLPFFSNVTWFHAIHVSGTNGTKRFDNPVLPFNDGVYFASTEKSNIIRGWIFGTTLDSKTQSLLIVNNATNVVIKVCEFQFCNDPFLGVYYHKNNKSWMESEFRVYSSANNCTFEYVSQPFLMDLEGKQGNFKNLREFVFKNIDGYFKIYSKHTPINLVRDLPQGFSALEPLVDLPIGINITRFQTLLALHRSYLTPGDSSSGWTAGAAAYYVGYLQPRTFLLKYNENGTITDAVDCALDPLSETKCTLKSFTVEKGIYQTSNFRVQPTESIVRFPNITNLCPFGEVFNATRFASVYAWNRKRISNCVADYSVLYNSASFSTFKCYGVSPTKLNDLCFTNVYADSFVIRGDEVRQIAPGQTGKIADYNYKLPDDFTGCVIAWNSNNLDSKVGGNYNYLYRLFRKSNLKPFERDISTEIYQAGSTPCNGVEGFNCYFPLQSYGFQPTNGVGYQPYRVVVLSFELLHAPATVCGPKKSTNLVKNKCVNFNFNGLTGTGVLTESNKKFLPFQQFGRDIADTTDAVRDPQTLEILDITPCSFGGVSVITPGTNTSNQVAVLYQGVNCTEVPVAIHADQLTPTWRVYSTGSNVFQTRAGCLIGAEHVNNSYECDIPIGAGICASYQTQTNSPRRARSVASQSIIAYTMSLGAENSVAYSNNSIAIPTNFTISVTTEILPVSMTKTSVDCTMYICGDSTECSNLLLQYGSFCTQLNRALTGIAVEQDKNTQEVFAQVKQIYKTPPIKDFGGFNFSQILPDPSKPSKRSFIEDLLFNKVTLADAGFIKQYGYCLGDIAARDLICAQKFNGLTVLPPLLTDEMIAQYTSALLAGTITSGWTFGAGAALQIPFAMQMAYRFNGIGVTQNVLYENQKLIANQFNSAIGKIQDSLSSTASALGKLQDVVNQNAQALNTLVKQLSSNFGAISSVLNDILSRLDKVEAEVQIDRLITGRLQSLQTYVTQQLIRAAEIRASANLAATKMSECVLGQSKRVDFCGKGYHLMSFPQSAPHGVVFLHVTYVPAQEKNFTTAPAICHDGKAHFPREGVFVSNGTHWFVTQRNFYEPQIITTDNTFVSGNCDVVIGIVNNTVYDPLQPELDSGGSGYIPEAPRDGQAYVRKDGEWVLLSTFL

SEQ ID NO: 9679 - protein, 1177 aa, Artificial Sequence
  SARS-CoV-2/Belgium/VAG-03013/2020__EPI_ISL_415155 spike protein (1-1147) Foldon construct
MFVFLVLLPLVSSQCVNLTTRTQLPPAYTNSFTRGVYYPDKVFRSSVLHSTQDLFLPFFSNVTWFHAIHVSGTNGTKRFDNPVLPFNDGVYFASTEKSNIIRGWIFGTTLDSKTQSLLIVNNATNVVIKVCEFQFCNDPFLGVYYHKNNKSWMESEFRVYSSANNCTFEYVSQPFLMDLEGKQGNFKNLREFVFKNIDGYFKIYSKHTPINLVRDLPQGFSALEPLVDLPIGINITRFQTLLALHRSYLTPGDSSSGWTAGAAAYYVGYLQPRTFLLKYNENGTITDAVDCALDPLSETKCTLKSFTVEKGIYQTSNFRVQPTESIVRFPNITNLCPFGEVFNATRFASVYAWNRKRISNCVADYSVLYNSASFSTFKCYGVSPTKLNDLCFTNVYADSFVIRGDEVRQIAPGQTGKIADYNYKLPDDFTGCVIAWNSNNLDSKVGGNYNYLYRLFRKSNLKPFERDISTEIYQAGSTPCNGVEGFNCYFPLQSYGFQPTNGVGYQPYRVVVLSFELLHAPATVCGPKKSTNLVKNKCVNFNFNGLTGTGVLTESNKKFLPFQQFGRDIADTTDAVRDPQTLEILDITPCSFGGVSVITPGTNTSNQVAVLYQGVNCTEVPVAIHADQLTPTWRVYSTGSNVFQTRAGCLIGAEHVNNSYECDIPIGAGICASYQTQTNSPRRARSVASQSIIAYTMSLGAENSVAYSNNSIAIPTNFTISVTTEILPVSMTKTSVDCTMYICGDSTECSNLLLQYGSFCTQLNRALTGIAVEQDKNTQEVFAQVKQIYKTPPIKDFGGFNFSQILPDPSKPSKRSFIEDLLFNKVTLADAGFIKQYGDCLGDIAARDLICAQKFNGLTVLPPLLTDEMIAQYTSALLAGTITSGWTFGAGAALQIPFAMQMAYRFNGIGVTQNVLYENQKLIANQFNSAIGKIQDSLSSTATALGKLQDVVNQNAQALNTLVKQLSSNFGAISSVLNDILSRLDKVEAEVQIDRLITGRLQSLQTYVTQQLIRAAEIRASANLAATKMSECVLGQSKRVDFCGKGYHLMSFPQSAPHGVVFLHVTYVPAQEKNFTTAPAICHDGKAHFPREGVFVSNGTHWFVTQRNFYEPQIITTDNTFVSGNCDVVIGIVNNTVYDPLQPELDSGGSGYIPEAPRDGQAYVRKDGEWVLLSTFL

SEQ ID NO: 9680 - protein, 1177 aa, Artificial Sequence
  SARS-CoV-2/Belgium/BC-03016/2020__EPI_ISL_415157 spike protein (1-1147) Foldon construct
MFVFLVLLPLVSSQCVNLTTRTQLPPAYTNSFTRGVYYPDKVFRSSVLHSTQDLFLPFFSNVTWFHAIHVSGTNGTKRFDNPVLPFNDGVYFASTEKSNIIRGWIFGTTLDSKTQSLLIVNNATNVVIKVCEFQFCNDPFLGVYYHKNNKSWMESEFRVYSSANNCTFEYVSQPFLMDLEGKQGNFKNLREFVFKNIDGYFKIYSKHTPINLVRDLPQGFSALEPLVDLPIGINITRFQTLLALHRSYLTPGDSSSGWTAGAAAYYVGYLQPRTFLLKYNENGTITDAVDCALDPLSETKCTLKSFTVEKGIYQTSNFRVQPTESIVRFPNITNLCPFGEVFNATRFASVYAWNRKRISNCVADYSVLYNSASFSTFKCYGVSPTKLNDLCFTNVYADSFVIRGDEVRQIAPGQTGKIADYNYKLPDDFTGCVIAWNSNNLDSKVGGNYNYLYRLFRKSNLKPFERDISTEIYQAGSTPCNGVEGFNCYFPLQSYGFQPTNGVGYQPYRVVVLSFELLHAPATVCGPKKSTNLVKNKCVNFNFNGLTGTGVLTESNKKFLPFQQFGRDIADTTDAVRDPQTLEILDITPCSFGGVSVITPGTNTSNQVAVLYQGVNCTEVPVAIHADQLTPTWRVYSTGSNVFQTRAGCLIGAEHVNNSYECDIPIGAGICASYQTQTNSPRRARSVASQSIIAYTMSLGAENSVAYSNNSIAIPTNFTISVTTEILPVSMTKTSVDCTMYICGDSTECSNLLLQYGSFCTQLNRALTGIAVEQDKNTQEVFAQVKQIYKTPPIKDFGGFNFSQILPDPSKPSKRSFIEDLLFNKVTLADAGFIKQYGDCLGDIAARDLICAQKFNGLTVLPPLLTDEMIAQYTSALLAGTITSGWTFGAGAALQIPFAMQMAYRFNGIGVTQNVLYENQKLIANQFNSAIGKIQDSLSSTAPALGKLQDVVNQNAQALNTLVKQLSSNFGAISSVLNDILSRLDKVEAEVQIDRLITGRLQSLQTYVTQQLIRAAEIRASANLAATKMSECVLGQSKRVDFCGKGYHLMSFPQSAPHGVVFLHVTYVPAQEKNFTTAPAICHDGKAHFPREGVFVSNGTHWFVTQRNFYEPQIITTDNTFVSGNCDVVIGIVNNTVYDPLQPELDSGGSGYIPEAPRDGQAYVRKDGEWVLLSTFL

SEQ ID NO: 9681 - protein, 1177 aa, Artificial Sequence
  SARS-CoV-2/Germany/BavPat3/2020__EPI_ISL_414521 spike protein (1-1147) Foldon construct
MFVFLVLLPLVSSQCVNLTTRTQLPPAYTNSFTRGVYYPDKVFRSSVLHSTQDLFLPFFSNVTWFHAIHVSGTNGTKRFDNPVLPFNDGVYFASTEKSNIIRGWIFGTTLDSKTQSLLIVNNATNVVIKVCEFQFCNDPFLGVYYHKNNKSWMESEFRVYSSANNCTFEYVSQPFLMDLEGKQGNFKNLREFVFKNIDGYFKIYSKHTPINLVRDLPQGFSALEPLVDLPIGINITRFQTLLALHRSYLTPGDSSSGWTAGAAAYYVGYLQPRTFLLKYNENGTITDAVDCALDPLSETKCTLKSFTVEKGIYQTSNFRVQPTESIVRFPNITNLCPFGEVFNATRFASVYAWNRKRISNCVADYSVLYNSASFSTFKCYGVSPTKLNDLCFTNVYADSFVIRGDEVRQIAPGQTGKIADYNYKLPDDFTGCVIAWNSNNLDSKVGGNYNYLYRLFRKSNLKPFERDISTEIYQAGSTPCNGVEGFNCYFPLQSYGFQPTNGVGYQPYRVVVLSFELLHAPATVCGPKKSTNLVKNKCVNFNFNGLTGTGVLTESNKKFLPFQQFGRDIADTTDAVRDPQTLEILDITPCSFGGVSVITPGTNTSNQVAVLYQDVNCTEVPVAIHADQLTPTWRVYSTGSNVFQTRAGCLIGAEHVNNSYECDIPIGAGICASYQTQTNSPRRARSVASQSIIAYTMSLGAENSVAYSNNSIAIPTNFTISVTTEILPVSMTKTSVDCTMYICGDSTECSNLLLQYGSFCTQLNRALTGIAVEQDKNTQQVFAQVKQIYKTPPIKDFGGFNFSQILPDPSKPSKRSFIEDLLFNKVTLADAGFIKQYGDCLGDIAARDLICAQKFNGLTVLPPLLTDEMIAQYTSALLAGTITSGWTFGAGAALQIPFAMQMAYRFNGIGVTQNVLYENQKLIANQFNSAIGKIQDSLSSTASALGKLQDVVNQNAQALNTLVKQLSSNFGAISSVLNDILSRLDKVEAEVQIDRLITGRLQSLQTYVTQQLIRAAEIRASANLAATKMSECVLGQSKRVDFCGKGYHLMSFPQSAPHGVVFLHVTYVPAQEKNFTTAPAICHDGKAHFPREGVFVSNGTHWFVTQRNFYEPQIITTDNTFVSGNCDVVIGIVNNTVYDPLQPELDSGGSGYIPEAPRDGQAYVRKDGEWVLLSTFL

SEQ ID NO: 9682 - protein, 1177 aa, Artificial Sequence
  SARS-CoV-2/France/HF1805/2020__EPI_ISL_414628 spike protein (1-1147) Foldon construct
MFVFLVLLPLVSSQCVNLTTRTQLPPAYTNSFTRGVYYPDKVFRSSVLHSTQDLFLPFFSNVTWFHAIHVSGTNGTKRFDNPVLPFNDGVYFASTEKSNIIRGWIFGTTLDSKTQSLLIVNNATNVVIKVCEFQFCNDPFLGVYYHKNNKSWMESEFRVYSSANNCTFEYVSQPFLMDLEGKQGNFKNLREFVFKNIDGYFKIYSKHTPINLVRDLPQGFSALEPLVDLPIGINITRFQTLLALHRSYLTPGDSSSGWTAGAAAYYVGYLQPRTFLLKYNENGTITDAVDCALDPLSETKCTLKSFTVEKGIYQTSNFRVQPTESIVRFPNITNLCPFGEVFNATRFASVYAWNRKRISNCVADYSVLYNSASFSTFKCYGVSPTKLNDLCFTNVYADSFVIRGDEVRQIAPGQTGKIADYNYKLPDDFTGCVIAWNSNNLDSKVGGNYNYLYRLFRKSNLKPFERDISTEIYQAGSTPCNGVEGFNCYFPLQSYGFQPTNGVGYQPYRVVVLSFELLHAPATVCGPKKSTNLVKNKCVNFNFNGLTGTGVLTESNKKFLPFQQFGRDIADTTDAVRDPQTLEILDITPCSFGGVSVITPGTNTSNQVAVLYQGVNCTEVPVAIHADQLTPTWRVYSTGSNVFQTRAGCLIGAEHVNNSYECDIPIGAGICASYQTQTNSPRRARSVASQSIIAYTMSLGAENSVAYSNNSIAIPTNFTISVTTEILPVSMTKTSVDCTMYICGDSTECSNLLLQYGSFCTQLNRALTGIAVEQDKNTQEVFAQVKQIYKTPPIKDFGGFNFSQILPDPSKPSKRSFIEDLLFNKVTLADAGFIKQYGDCLGDIAARDLICAQKFNGLTVLPPLLTDEMIAQYTSALLAGTITSGWTFGAGAALQIPFAMQMAYRFNGIGVTQNVLYENQKLIANQFNSAIGKIQDSLSSTASALGKLQDVVNQNAQALNTLVKQLSSNFGAISSVLNDILSRLDKVEAEVQIDRLITGRLQSLQTYVTQQLIRAAEIRASANLAATKMSECVLGQSKRVDFCGKGYHLMSFPQSAPHGVVFLHVTYVPAQEKNFTTAPAICHDGKAHFPREGVFVSNGTHWFVTQRNFYEPQIITTDNTFVSGNCDVVIGVVNNTVYDPLQPELDSGGSGYIPEAPRDGQAYVRKDGEWVLLSTFL

SEQ ID NO: 9683 - protein, 1177 aa, Artificial Sequence
  SARS-CoV-2/Netherlands/ZuidHolland_9/2020__EPI_ISL_414445 spike protein (1-1147) Foldon construct
MFVFLVLLPLVSSQCVNLTTRTQLPPAYTNSFTRGVYYPDKVFRSSVLHSTQDLFLPFFSNVTWFHAIHVSGTNGTKRFDNPVLPFNDGVYFASTEKSNIIRGWIFGTTLDSKTQSLLIVNNATNVVIKVCEFQFCNDPFLGVYYHKNNKSWMESEFRVYSSANNCTFEYVSQPFLMDLEGKQGNFKNLREFVFKNIDGYFKIYSKHTPINLVRDLPQGFSALEPLVDLPIGINITRFQTLLALHRSYLTPGDSSSGWTAGAAAYYVGYLQPRTFLLKYNENGTITDAVDCALDPLSETKCTLKSFTVEKGIYQTSNFRVQPTESIVRFPNITNLCPFGEVFNATRFASVYAWNRKRISNCVADYSVLYNSASFSTFKCYGVSPTKLNDLCFTNVYADSFVIRGDEVRQIAPGQTGKIADYNYKLPDDFTGCVIAWNSNNLDSKVGGNYNYLYRLFRKSNLKPFERDISTEIYQAGSTPCNGVEGFNCYFPLQSYGFQPTNGVGYQPYRVVVLSFELLHAPATVCGPKKSTNLVKNKCVNFNFNGLTGTGVLTESNKKFLPFQQFGRDIADTTDAVRDPQTLEILDITPCSFGGVSVITPGTNTSNQVAVLYQGVNCTEVPVAIHADQLTPTWRVYSTGSNVFQTRAGCLIGAEHVNNSYECDIPIGAGICASYQTQTNSPRRARSVASQSIIAYTMSLGAENSVAYSNNSIAIPTNFTISVTTEILPVSMTKTSVDCTMYICGDSTECSNLLLQYGSFCTQLNRALTGIAVEQDKNTQEVFAQVKQIYKTPPIKDFGGFNFSQILPDPSKPSKRSFIEDLLFNKVTLADAGFIKQYGDCLGDIAARDLICVQKFNGLTVLPPLLTDEMIAQYTSALLAGTITSGWTFGAGAALQIPFAMQMAYRFNGIGVTQNVLYENQKLIANQFNSAIGKIQDSLSSTASALGKLQDVVNQNAQALNTLVKQLSSNFGAISSVLNDILSRLDKVEAEVQIDRLITGRLQSLQTYVTQQLIRAAEIRASANLAATKMSECVLGQSKRVDFCGKGYHLMSFPQSAPHGVVFLHVTYVPAQEKNFTTAPAICHDGKAHFPREGVFVSNGTHWFVTQRNFYEPQIITTDNTFVSGNCDVVIGIVNNTVYDPLQPELDSGGSGYIPEAPRDGQAYVRKDGEWVLLSTFL

SEQ ID NO: 9684 - protein, 1177 aa, Artificial Sequence
  SARS-CoV-2/Finland/FIN03032020A/2020__EPI_ISL_413602 spike protein (1-1147) Foldon construct
MFVFLVLLPLVSSQCVNLTTRTQLPPAYTNSFTRGVYYPDKVFRSSVLHSTQDLFLPFFSNVTWFHAIHVSGTNGTKRFDNPVLPFNDGVYFASTEKSNIIRGWIFGTTLDSKTQSLLIVNNATNVVIKVCEFQFCNDPFLGVYYHKNNKSWMESEFRVYSSANNCTFEYVSQPFLMDLEGKQGNFKNLREFVFKNIDGYFKIYSKHTPINLVRDLPQGFSALEPLVDLPIGINITRFQTLLALHRSYLTPGDSSSGWTAGAAAYYVGYLQPRTFLLKYNENGTITDAVDCALDPLSETKCTLKSFTVEKGIYQTSNFRVQPTESIVRFPNITNLCPFGEVFNATRFASVYAWNRKRISNCVADYSVLYNSASFSTFKCYGVSPTKLNDLCFTNVYADSFVIRGDEVRQIAPGQTGKIADYNYKLPDDFTGCVISWNSNNLDSKVGGNYNYLYRLFRKSNLKPFERDISTEIYQAGSTPCNGVEGFNCYFPLQSYGFQPTNGVGYQPYRVVVLSFELLHAPATVCGPKKSTNLVKNKCVNFNFNGLTGTGVLTESNKKFLPFQQFGRDIADTTDAVRDPQTLEILDITPCSFGGVSVITPGTNTSNQVAVLYQGVNCTEVPVAIHADQLTPTWRVYSTGSNVFQTRAGCLIGAEHVNNSYECDIPIGAGICASYQTQTNSPRRARSVASQSIIAYTMSLGAENSVAYSNNSIAIPTNFTISVTTEILPVSMTKTSVDCTMYICGDSTECSNLLLQYGSFCTQLNRALTGIAVEQDKNTQEVFAQVKQIYKTPPIKDFGGFNFSQILPDPSKPSKRSFIEDLLFNKVTLADAGFIKQYGDCLGDIAARDLICAQKFNGLTVLPPLLTDEMIAQYTSALLAGTITSGWTFGAGAALQIPFAMQMAYRFNGIGVTQNVLYENQKLIANQFNSAIGKIQDSLSSTASALGKLQDVVNQNAQALNTLVKQLSSNFGAISSVLNDILSRLDKVEAEVQIDRLITGRLQSLQTYVTQQLIRAAEIRASANLAATKMSECVLGQSKRVDFCGKGYHLMSFPQSAPHGVVFLHVTYVPAQEKNFTTAPAICHDGKAHFPREGVFVSNGTHWFVTQRNFYEPQIITTDNTFVSGNCDVVIGIVNNTVYDPLQPELDSGGSGYIPEAPRDGQAYVRKDGEWVLLSTFL

SEQ ID NO: 9685 - protein, 1177 aa, Artificial Sequence
  SARS-CoV-2/France/GE1977/2020__EPI_ISL_414632 spike protein (1-1147) Foldon construct
MFVFLVLLPLVSSQCVNLTTRTQLPPAYTNSFTRGVYYPDKVFRSSVLHSTQDLFLPFFSNVTWFHAIHVSGTNGTKRFDNPVLPFNDGVYFASTEKSNIIRGWIFGTTLDSKTQSLLIVNNATNVVIKVCEFQFCNDPFLGVYYHKNNKSWMESEFRVYSSANNCTFEYVSQPFLMDLEGKQGNFKNLREFVFKNIDGYFKIYSKHTPINLVRDLPQGFSALEPLVDLPIGINITRFQTLLALHRSYLTPGDSSSGWTAGAAAYYVGYLQPRTFLLKYNENGTITDAVDCALDPLSETKCTLKSFTVEKGIYQTSNFRVQPTESIVRFPNITNLCPFGEVFNATRFASVYAWNRKRISNCVADYSVLYNSASFSTFKCYGVSPTKLNDLCFTNVYADSFVIRGDEVRQIAPGQTGKIADYNYKLPDDFTGCVIAWNSNNLDSKVGGNYNYLYRLFRKSNLKPFERDISTEIYQAGSTPCNGVEGFNCYFPLQSYGFQPTNGVGYQPYRVVVLSFELLHAPATVCGPKKSTNLVKNKCVNFNFNGLTGTGVLTESNKKFLPFQQFGRDIADTTDAVRDPQTLEILDITPCSFGGVSVITPGTNTSNQVAVLYQGVNCTEVPVAIHADQLTPTWRVYSTGSNVFQTRAGCLIGAEHVNNSYECDIPIGAGICASYQTQTNSPRRARSVASQSIIAYTMSLGAENSVAYSNNSIAIPTNFTISVTTEILPVSMTKTSVDCTMYICGDSTECSNLLLQYGSFCTQLNRALTGIAVEQDKNTQEVFAQVKQIYKTPPIKDFGGFNFSQILPDPSKPSKRSFIEDLLFNKVTLADAGFIKQYGDCLGDIAARDLICAQKFNGLTVLPPLLTDEMIAQYTSALLAGTITSGWTFGAGAALQIPFAMQMAYRFNGIGVTQNVLYENQKLIANQFNSAIGKIQDSLFSTASALGKLQDVVNQNAQALNTLVKQLSSNFGAISSVLNDILSRLDKVEAEVQIDRLITGRLQSLQTYVTQQLIRAAEIRASANLAATKMSECVLGQSKRVDFCGKGYHLMSFPQSAPHGVVFLHVTYVPAQEKNFTTAPAICHDGKAHFPREGVFVSNGTHWFVTQRNFYEPQIITTDNTFVSGNCDVVIGIVNNTVYDPLQPELDSGGSGYIPEAPRDGQAYVRKDGEWVLLSTFL

SEQ ID NO: 9686 - protein, 1177 aa, Artificial Sequence
  SARS-CoV-2/Finland/FIN-313/2020__EPI_ISL_414641 spike protein (1-1147) Foldon construct
MFVFLVLLPLVSSQCVNLTTRTQLPPAYTNSFTRGVYYPDKVFRSSVLHSTQDLFLPFFSNVTWFHAIHVSGTNGTKRFDNPVLPFNDGVYFASTEKSNIIRGWIFGTTLDSKTQSLLIVNNATNVVIKVCEFQFCNDPFLGVYYHKNNKSWMESEFRVYSSANNCTFEYVSQPFLMDLEGKQGNFKNLREFVFKNIDGYFKIYSKHTPINLVRDLPQGFSALEPLVDLPIGINITRFKTLLALHRSYLTPGDSSSGWTAGAAAYYVGYLQPRTFLLKYNENGTITDAVDCALDPLSETKCTLKSFTVEKGIYQTSNFRVQPTESIVRFPNITNLCPFGEVFNATRFASVYAWNRKRISNCVADYSVLYNSASFSTFKCYGVSPTKLNDLCFTNVYADSFVIRGDEVRQIAPGQTGKIADYNYKLPDDFTGCVIAWNSNNLDSKVGGNYNYLYRLFRKSNLKPFERDISTEIYQAGSTPCNGVEGFNCYFPLQSYGFQPTNGVGYQPYRVVVLSFELLHAPATVCGPKKSTNLVKNKCVNFNFNGLTGTGVLTESNKKFLPFQQFGRDIADTTDAVRDPQTLEILDITPCSFGGVSVITPGTNTSNQVAVLYQGVNCTEVPVAIHADQLTPTWRVYSTGSNVFQTRAGCLIGAEHVNNSYECDIPIGAGICASYQTQTNSPRRARSVASQSIIAYTMSLGAENSVAYSNNSIAIPTNFTISVTTEILPVSMTKTSVDCTMYICGDSTECSNLLLQYGSFCTQLNRALTGIAVEQDKNTQEVFAQVKQIYKTPPIKDFGGFNFSQILPDPSKPSKRSFIEDLLFNKVTLADAGFIKQYGDCLGDIAARDLICAQKFNGLTVLPPLLTDEMIAQYTSALLAGTITSGWTFGAGAALQIPFAMQMAYRFNGIGVTQNVLYENQKLIANQFNSAIGKIQDSLSSTASALGKLQDVVNQNAQALNTLVKQLSSNFGAISSVLNDILSRLDKVEAEVQIDRLITGRLQSLQTYVTQQLIRAAEIRASANLAATKMSECVLGQSKRVDFCGKGYHLMSFPQSAPHGVVFLHVTYVPAQEKNFTTAPAICHDGKAHFPREGVFVSNGTHWFVTQRNFYEPQIITTDNTFVSGNCDVVIGIVNNTVYDPLQPELDSGGSGYIPEAPRDGQAYVRKDGEWVLLSTFL

SEQ ID NO: 9687 - protein, 1177 aa, Artificial Sequence
  SARS-CoV-2/Netherlands/ZuidHolland_2/2020__EPI_ISL_414556 spike protein (1-1147) Foldon construct
MFVFLVLLPLVSSQCVNLTTRTQLPPAYTNSFTRGVYYPDKVFRSSVLHSTQDLFLPFFSNVTWFHAIHVSGTNGTKRFDNPVLPFNDGVYFASTEKSNIIRGWIFGTTLDSKTQSLLIVNNATNVVIKVCEFQFCNDPFLGVYYHKNNKSWMESEFRVYSSANNCTFEYVSQPFLMDLEGKQGNFKNLREFVFKNIDGYFKIYSKHTPINLVRDLPQGFSALEPLVDLPIGINITRFQTLLALHRSYLTPGDSSSGWTAGAAAYYVGYLQPRTFLLKYNENGTITDAVDCALDPLSETKCTLKSFTVEKGIYQTSNFRVQPTESIVRFPNITNLCPFGEVFNATRFASVYAWNRKRISNCVADYSVLYNSASFSTFKCYGVSPTKLNDLCFTNVYADSFVIRGDEVRQIAPGQTGKIADYNYKLPDDFTGCVIAWNSNNLDSKVGGNYNYLYRLFRKSNLKPFERDISTEIYQAGSTPCNGVEGFNCYFPLQSYGFQPTNGVGYQPYRVVVLSFELLHAPATVCGPKKSTNLVKNKCVNFNFNGLTGTGVLTESNKKFLPFQQFGRDIADTTDAVRDPQTLEILDITPCSFGGVSVITPGTNTSNQVAVLYQGVNCTEVPVAIHADQLTPTWRVYSTGSNVFQTRAGCLIGAEHVNNSYECDIPIGAGICASYQTQTNSPRRARSVASQSIIAYTMSLGAENSVAYSNNSIAIPTNFTISVTTEILPVSMTKTSVDCTMYICGDSTECSNLLLQYGSFCTQLNRALTGIALEQDKNTQEVFAQVKQIYKTPPIKDFGGFNFSQILPDPSKPSKRSFIEDLLFNKVTLADAGFIKQYGDCLGDIAARDLICAQKFNGLTVLPPLLTDEMIAQYTSALLAGTITSGWTFGAGAALQIPFAMQMAYRFNGIGVTQNVLYENQKLIANQFNSAIGKIQDSLSSTASALGKLQDVVNQNAQALNTLVKQLSSNFGAISSVLNDILSRLDKVEAEVQIDRLITGRLQSLQTYVTQQLIRAAEIRASANLAATKMSECVLGQSKRVDFCGKGYHLMSFPQSAPHGVVFLHVTYVPAQEKNFTTAPAICHDGKAHFPREGVFVSNGTHWFVTQRNFYEPQIITTDNTFVSGNCDVVIGIVNNTVYDPLQPELDSGGSGYIPEAPRDGQAYVRKDGEWVLLSTFL

SEQ ID NO: 9688 - protein, 1177 aa, Artificial Sequence
  SARS-CoV-2/USA/WA-UW31/2020__EPI_ISL_414618 spike protein (1-1147) Foldon construct
MFVFLVLLPLVSSQCVNLTTRTQLPPAYTNSFTRGVYYPDKVFRSSVLHSTQDLFLPFFSNVTWFHAIHVSGTNGTKRFDNPVLPFNDGVYFASTEKSNIIRGWIFGTTLDSKTQSLLIVNNATNVVIKVCEFQFCNDPFLGVYYHKNNKSWMESEFRVYSSANNCTFEYVSQPFLMDLEGKQGNFKNLREFVFKNIDGYFKIYSKHTPINLVRDLPQGFSALEPLVDLPIGINITRFQTLLALHRSYLTPGDSSSGWTAGAAAYYVGYLQPRTFLLKYNENGTITDAVDCALDPLSETKCTLKSFTVEKGIYQTSNFRVQPTESIVRFPNITNLCPFGEVFNATRFASVYAWNRKRISNCVADYSVLYNSASFSTFKCYGVSPTKLNDLCFTNVYADSFVIRGDEVRQIAPGQTGKIADYNYKLPDDFTGCVIAWNSNNLDSKVGGNYNYLYRLFRKSNLKPFERDISTEIYQAGSTPCNGAEGFNCYFPLQSYGFQPTNGVGYQPYRVVVLSFELLHAPATVCGPKKSTNLVKNKCVNFNFNGLTGTGVLTESNKKFLPFQQFGRDIADTTDAVRDPQTLEILDITPCSFGGVSVITPGTNTSNQVAVLYQDVNCTEVPVAIHADQLTPTWRVYSTGSNVFQTRAGCLIGAEHVNNSYECDIPIGAGICASYQTQTNSPRRARSVASQSIIAYTMSLGAENSVAYSNNSIAIPTNFTISVTTEILPVSMTKTSVDCTMYICGDSTECSNLLLQYGSFCTQLNRALTGIAVEQDKNTQEVFAQVKQIYKTPPIKDFGGFNFSQILPDPSKPSKRSFIEDLLFNKVTLADAGFIKQYGDCLGDIAARDLICAQKFNGLTVLPPLLTDEMIAQYTSALLAGTITSGWTFGAGAALQIPFAMQMAYRFNGIGVTQNVLYENQKLIANQFNSAIGKIQDSLSSTASALGKLQDVVNQNAQALNTLVKQLSSNFGAISSVLNDILSRLDKVEAEVQIDRLITGRLQSLQTYVTQQLIRAAEIRASANLAATKMSECVLGQSKRVDFCGKGYHLMSFPQSAPHGVVFLHVTYVPAQEKNFTTAPAICHDGKAHFPREGVFVSNGTHWFVTQRNFYEPQIITTDNTFVSGNCDVVIGIVNNTVYDPLQPELDSGGSGYIPEAPRDGQAYVRKDGEWVLLSTFL

SEQ ID NO: 9689 - protein, 1177 aa, Artificial Sequence
  SARS-CoV-2/South Korea/SNU01/2020__EPI_ISL_411929 spike protein (1-1147) Foldon construct
MFVFLVLLPLVSSQCVNLTTRTQLPPAYTNSFTRGVYYPDKVFRSSVLHSTQDLFLPFFSNVTWFHAIHVSGTNGTKRFDNPVLPFNDGVYFASTEKSNIIRGWIFGTTLDSKTQSLLIVNNATNVVIKVCEFQFCNDPFLGVYYHKNNKSWMESEFRVYSSANNCTFEYVSQPFLMDLEGKQGNFKNLREFVFKNIDGYFKIYSKHTPINLVRDLPQGFWALEPLVDLPIGINITRFQTLLALHRSYLTPGDSSSGWTAGAAAYYVGYLQPRTFLLKYNENGTITDAVDCALDPLSETKCTLKSFTVEKGIYQTSNFRVQPTESIVRFPNITNLCPFGEVFNATRFASVYAWNRKRISNCVADYSVLYNSASFSTFKCYGVSPTKLNDLCFTNVYADSFVIRGDEVRQIAPGQTGKIADYNYKLPDDFTGCVIAWNSNNLDSKVGGNYNYLYRLFRKSNLKPFERDISTEIYQAGSTPCNGVEGFNCYFPLQSYGFQPTNGVGYQPYRVVVLSFELLHAPATVCGPKKSTNLVKNKCVNFNFNGLTGTGVLTESNKKFLPFQQFGRDIADTTDAVRDPQTLEILDITPCSFGGVSVITPGTNTSNQVAVLYQDVNCTEVPVAIHADQLTPTWRVYSTGSNVFQTRAGCLIGAEHVNNSYECDIPIGAGICASYQTQTNSPRRARSVASQSIIAYTMSLGAENSVAYSNNSIAIPTNFTISVTTEILPVSMTKTSVDCTMYICGDSTECSNLLLQYGSFCTQLNRALTGIAVEQDKNTQEVFAQVKQIYKTPPIKDFGGFNFSQILPDPSKPSKRSFIEDLLFNKVTLADAGFIKQYGDCLGDIAARDLICAQKFNGLTVLPPLLTDEMIAQYTSALLAGTITSGWTFGAGAALQIPFAMQMAYRFNGIGVTQNVLYENQKLIANQFNSAIGKIQDSLSSTASALGKLQDVVNQNAQALNTLVKQLSSNFGAISSVLNDILSRLDKVEAEVQIDRLITGRLQSLQTYVTQQLIRAAEIRASANLAATKMSECVLGQSKRVDFCGKGYHLMSFPQSAPHGVVFLHVTYVPAQEKNFTTAPAICHDGKAHFPREGVFVSNGTHWFVTQRNFYEPQIITTDNTFVSGNCDVVIGIVNNTVYDPLQPELDSGGSGYIPEAPRDGQAYVRKDGEWVLLSTFL

SEQ ID NO: 9690 - protein, 1177 aa, Artificial Sequence
  SARS-CoV-2/China/WF0004/2020__EPI_ISL_413694 spike protein (1-1147) Foldon construct
MFVFLVLLPLVSSQCVNLTTRTQLPPAYTNSFTRGVYYPDKVFRSSVLHSTQDLFLPFFSNVTWFHAIHVSGTNGTKRFDNPVLPFNDGVYFASTEKSNIIRGWIFGTTLDSKTQSLLIVNNATNVVIKVCEFQFCNDPFLGVYYHKNNKSWTESEFRVYSSANNCTFEYVSQPFLMDLEGKQGNFKNLREFVFKNIDGYFKIYSKHTPINLVRDLPQGFSALEPLVDLPIGINITRFQTLLALHRSYLTPGDSSSGWTAGAAAYYVGYLQPRTFLLKYNENGTITDAVDCALDPLSETKCTLKSFTVEKGIYQTSNFRVQPTESIVRFPNITNLCPFGEVFNATRFASVYAWNRKRISNCVADYSVLYNSASFSTFKCYGVSPTKLNDLCFTNVYADSFVIRGDEVRQIAPGQTGKIADYNYKLPDDFTGCVIAWNSNNLDSKVGGNYNYLYRLFRKSNLKPFERDISTEIYQAGSTPCNGVEGFNCYFPLQSYGFQPTNGVGYQPYRVVVLSFELLHAPATVCGPKKSTNLVKNKCVNFNFNGLTGTGVLTESNKKFLPFQQFGRDIADTTDAVRDPQTLEILDITPCSFGGVSVITPGTNTSNQVAVLYQDVNCTEVPVAIHADQLTPTWRVYSTGSNVFQTRAGCLIGAEHVNNSYECDIPIGAGICASYQTQTNSPRRARSVASQSIIAYTMSLGAENSVAYSNNSIAIPTNFTISVTTEILPVSMTKTSVDCTMYICGDSTECSNLLLQYGSFCTQLNRALTGIAVEQDKNTQEVFAQVKQIYKTPPIKDFGGFNFSQILPDPSKPSKRSFIEDLLFNKVTLADAGFIKQYGDCLGDIAARDLICAQKFNGLTVLPPLLTDEMIAQYTSALLAGTITSGWTFGAGAALQIPFAMQMAYRFNGIGVTQNVLYENQKLIANQFNSAIGKIQDSLSSTASALGKLQDVVNQNAQALNTLVKQLSSNFGAISSVLNDILSRLDKVEAEVQIDRLITGRLQSLQTYVTQQLIRAAEIRASANLAATKMSECVLGQSKRFDFCGKGYHLMSFPQSAPHGVVFLHVTYVPAQEKNFTTAPAICHDGKAHFPREGVFVSNGTHWFVTQRNFYEPQIITTDNTFVSGNCDVVIGIVNNTVYDPLQPELDSGGSGYIPEAPRDGQAYVRKDGEWVLLSTFL

SEQ ID NO: 9691 - protein, 1177 aa, Artificial Sequence
  SARS-CoV-2/China/WF0028/2020__EPI_ISL_413791 spike protein (1-1147) Foldon construct
MFVFLVLLPLVSSQCVNLTTRTQLPPAYTNSFTRGVYYPDKVFRSSVLHSTQDLFLPFFSNVTWFHAIHVSGTNGTKRFDNPVLPFNDGVYFASTEKSNIIRGWIFGTTLDSKTQSLLIVNNATNVVIKVCEFQFCNDPFLGVYYHKNNKSWMESEFRVYSSANNCTFEYVSQPFLMDLEGKQGNFKNLREFVFKNIDGYFKIYSKHTPINLVRDLPQGFSALEPLVDLPIGINITRFQTLLALHRSYLTPGDSSSGWTAGAAAYYVGYLQPRTFLLKYNENGTITDAVDCALDPLSETKCTLKSFTVEKGIYQTSNFRVQPTESIVRFPNITNLCPFGEVFNATRFASVYAWNRKRISNCVADYSVLYNSASFSTFKCYGVSPTKLNDLCFTNVYADSFVIRGDEVRQIAPGQTGKIADYNYKLPDDFTGCVIAWNSNNLDSKVGGNYNYLYRLFRKSNLKPFERDISTEIYQAGSTPCNGVEGFNCYFPLQSYGFQPTNGVGYQPYRVVVLSFELLHAPATVCGPKKSTNLVKNKCVNFNFNGLTGTGVLTESNKKFLPFQQFGRDIADTTDAVRDPQTLEILDITPCSFGGVSVITPGTNTSNQVAVLYQDVNCTEVPVAIHADQLTPTWRVYSTGSNVFQTRAGCLIGAEHVNNSYECDIPIGAGICASYQTQTNSPRRARSVASQSIIAYTMSLGAENSVAYSNNSIAIPTNFTISVTTEILPVSMTKTSVDCTMYICGDSTECSNLLLQYGSFCTQLNRALTGIAVEQDKNTQEVFAQVKQIYKTPPIKDFGGFNFSQILPDPSKPSKRSFIEDLLFNKVTLADAGFIKQYGDCLGDIAARDLICAQKFNGLTVLPPLLTDEMIAQYTSALLAGTITSGWTFGAGAALQIPFAMQMAYRFNGIGVTQNVLYENQKLIANQFNSAIGKIQDSLSSTASALGKLQDVVNQNAQALNTLVKQLSSNFGAISSVLNDILSRLDKVEAEVQIDRLITGRLQSLQTYVTQQLIRAAEIRASANLAATKMSECVLGQSKRVDFCGKGYHLMSFPQSAPHGVVFLHVTYVPAQEKNFTTAPAICHDGKAHFPREGVFVSNGTHWFVTQRNFYEPQIITTDNTFVSGNCDVVIGIVNNTVYDPLQPELESGGSGYIPEAPRDGQAYVRKDGEWVLLSTFL

SEQ ID NO: 9692 - protein, 1177 aa, Artificial Sequence
  SARS-CoV-2/2019-nCoV/USA-CruiseA-18/2020__MT159716.1 spike protein (1-1147) Foldon construct
MFVFLVLLPLVSSQCVNLTTRTQLPPAYTNSFTRGVYYPDKVFRSSVLHSTQDLFLPFFSNVTWFHAIHVSGTNGTKRFDNPVLPFNDGVYFASTEKSNIIRGWIFGTTLDSKTQSLLIVNNATNVVIKVCEFQFCNDPFLGVYYHKNNKSWMESELRVYSSANNCTFEYVSQPFLMDLEGKQGNFKNLREFVFKNIDGYFKIYSKHTPINLVRDLPQGFSALEPLVDLPIGINITRFQTLLALHRSYLTPGDSSSGWTAGAAAYYVGYLQPRTFLLKYNENGTITDAVDCALDPLSETKCTLKSFTVEKGIYQTSNFRVQPTESIVRFPNITNLCPFGEVFNATRFASVYAWNRKRISNCVADYSVLYNSASFSTFKCYGVSPTKLNDLCFTNVYADSFVIRGDEVRQIAPGQTGKIADYNYKLPDDFTGCVIAWNSNNLDSKVGGNYNYLYRLFRKSNLKPFERDISTEIYQAGSTPCNGVEGFNCYFPLQSYGFQPTNGVGYQPYRVVVLSFELLHAPATVCGPKKSTNLVKNKCVNFNFNGLTGTGVLTESNKKFLPFQQFGRDIADTTDAVRDPQTLEILDITPCSFGGVSVITPGTNTSNQVAVLYQDVNCTEVPVAIHADQLTPTWRVYSTGSNVFQTRAGCLIGAEHVNNSYECDIPIGAGICASYQTQTNSPRRARSVASQSIIAYTMSLGAENSVAYSNNSIAIPTNFTISVTTEILPVSMTKTSVDCTMYICGDSTECSNLLLQYGSFCTQLNRALTGIAVEQDKNTQEVFAQVKQIYKTPPIKDFGGFNFSQILPDPSKPSKRSFIEDLLFNKVTLADAGFIKQYGDCLGDIAARDLICAQKFNGLTVLPPLLTDEMIAQYTSALLAGTITSGWTFGAGAALQIPFAMQMAYRFNGIGVTQNVLYENQKLIANQFNSAIGKIQDSLSSTASALGKLQDVVNQNAQALNTLVKQLSSNFGAISSVLNDILSRLDKVEAEVQIDRLITGRLQSLQTYVTQQLIRAAEIRASANLAATKMSECVLGQSKRVDFCGKGYHLMSFPQSAPHGVVFLHVTYVPAQEKNFTTAPAICHDGKAHFPREGVFVSNGTHWFVTQRNFYEPQIITTDNTFVSGNCDVVIGIVNNTVYDPLQPELDSGGSGYIPEAPRDGQAYVRKDGEWVLLSTFL

SEQ ID NO: 9693 - protein, 1177 aa, Artificial Sequence
  SARS-CoV-2/SARS-CoV-2/Yunnan-01/human/2020/CHN__MT049951.1 spike protein (1-1147) Foldon construct
MFVFLVLLPLVSSQCVNLTTRTQLPPANTNSFTRGVYYPDKVFRSSVLHSTQDLFLPFFSNVTWFHAIHVSGTNGTKRFDNPVLPFNDGVYFASTEKSNIIRGWIFGTTLDSKTQSLLIVNNATNVVIKVCEFQFCNDPFLGVYYHKNNKSWMESEFRVYSSANNCTFEYVSQPFLMDLEGKQGNFKNLREFVFKNIDGYFKIYSKHTPINLVRDLPQGFSALEPLVDLPIGINITRFQTLLALHRSYLTPGDSSSGWTAGAAAYYVGYLQPRTFLLKYNENGTITDAVDCALDPLSETKCTLKSFTVEKGIYQTSNFRVQPTESIVRFPNITNLCPFGEVFNATRFASVYAWNRKRISNCVADYSVLYNSASFSTFKCYGVSPTKLNDLCFTNVYADSFVIRGDEVRQIAPGQTGKIADYNYKLPDDFTGCVIAWNSNNLDSKVGGNYNYLYRLFRKSNLKPFERDISTEIYQAGSTPCNGVEGFNCYFPLQSYGFQPTNGVGYQPYRVVVLSFELLHAPATVCGPKKSTNLVKNKCVNFNFNGLTGTGVLTESNKKFLPFQQFGRDIADTTDAVRDPQTLEILDITPCSFGGVSVITPGTNTSNQVAVLYQDVNCTEVPVAIHADQLTPTWRVYSTGSNVFQTRAGCLIGAEHVNNSYECDIPIGAGICASYQTQTNSPRRARSVASQSIIAYTMSLGAENSVAYSNNSIAIPTNFTISVTTEILPVSMTKTSVDCTMYICGDSTECSNLLLQYGSFCTQLNRALTGIAVEQDKNTQEVFAQVKQIYKTPPIKDFGGFNFSQILPDPSKPSKRSFIEDLLFNKVTLADAGFIKQYGDCLGDIAARDLICAQKFNGLTVLPPLLTDEMIAQYTSALLAGTITSGWTFGAGAALQIPFAMQMAYRFNGIGVTQNVLYENQKLIANQFNSAIGKIQDSLSSTASALGKLQDVVNQNAQALNTLVKQLSSNFGAISSVLNDILSRLDKVEAEVQIDRLITGRLQSLQTYVTQQLIRAAEIRASANLAATKMSECVLGQSKRVDFCGKGYHLMSFPQSAPHGVVFLHVTYVPAQEKNFTTAPAICHDGKAHFPREGVFVSNGTHWFVTQRNFYEPQIITTDNTFVSGNCDVVIGIVNNTVYDPLQPELDSGGSGYIPEAPRDGQAYVRKDGEWVLLSTFL

SEQ ID NO: 9694 - protein, 1177 aa, Artificial Sequence
  SARS-CoV-2/USA/WA-UW292/2020__EPI_ISL_418077 spike protein (1-1147) Foldon construct
MFVFLVLLPLVSSQCVNLTTRTQLPPAYTNSFTRGVYYPDKVFRSSVLHSTQDLFLPFFSNVTWFHAIHVSGTNGTKRFDNPVLPFNDGVYFASTEKSNIIRGWIFGTTLDSKTQSLLIVNNATNVVIKVCEFQFCNDPFLGVYYHKNNKSWMESEFRVYSSANNCTFEYVSQPFLMDLEGKQGNFKNLREFVFKNIDGYFKIYSKHTPINLVRDLPQGFSALEPLVDLPIGINITRFQTLLALHRSYLTPGDSSSGWTAGAAAYYVGYLQPRTFLLKYNENGTITDAVDCALDPLSETKCTLKSFTVEKGIYQTSNFRVQPTESIVRFPNITNLCPFGEVFNATRFASVYAWNRKRISNCVADYSVLYNSASFSTFKCYGVSPTKLNDLCFTNVYADSFVIRGDEVRQIAPGQTGKIADYNYKLPDDFTGCVIAWNSNNLDSKVGGNYNYLYRLFRKSNLKPFERDISTEIYQASSTPCNGVEGFNCYFPLQSYGFQPTNGVGYQPYRVVVLSFELLHAPATVCGPKKSTNLVKNKCVNFNFNGLTGTGVLTESNKKFLPFQQFGRDIADTTDAVRDPQTLEILDITPCSFGGVSVITPGTNTSNQVAVLYQDVNCTEVPVAIHADQLTPTWRVYSTGSNVFQTRAGCLIGAEHVNNSYECDIPIGAGICASYQTQTNSPRRARSVASQSIIAYTMSLGAENSVAYSNNSIAIPTNFTISVTTEILPVSMTKTSVDCTMYICGDSTECSNLLLQYGSFCTQLNRALTGIAVEQDKNTQEVFAQVKQIYKTPPIKDFGGFNFSQILPDPSKPSKRSFIEDLLFNKVTLADAGFIKQYGDCLGDIAARDLICAQKFNGLTVLPPLLTDEMIAQYTSALLAGTITSGWTFGAGAALQIPFAMQMAYRFNGIGVTQNVLYENQKLIANQFNSAIGKIQDSLSSTASALGKLQDVVNQNAQALNTLVKQLSSNFGAISSVLNDILSRLDKVEAEVQIDRLITGRLQSLQTYVTQQLIRAAEIRASANLAATKMSECVLGQSKRVDFCGKGYHLMSFPQSAPHGVVFLHVTYVPAQEKNFTTAPAICHDGKAHFPREGVFVSNGTHWFVTQRNFYEPQIITTDNTFVSGNCDVVIGIVNNTVYDPLQPELDSGGSGYIPEAPRDGQAYVRKDGEWVLLSTFL

SEQ ID NO: 9695 - protein, 1177 aa, Artificial Sequence
  SARS-CoV-2/Iceland/192/2020__EPI_ISL_417819 spike protein (1-1147) Foldon construct
MFVFFVLLPLVSSQCVNLTTRTQLPPAYTNSFTRGVYYPDKVFRSSVLHSTQDLFLPFFSNVTWFHAIHVSGTNGTKRFDNPVLPFNDGVYFASTEKSNIIRGWIFGTTLDSKTQSLLIVNNATNVVIKVCEFQFCNDPFLGVYYHKNNKSWMESEFRVYSSANNCTFEYVSQPFLMDLEGKQGNFKNLREFVFKNIDGYFKIYSKHTPINLVRDLPQGFSALEPLVDLPIGINITRFQTLLALHRSYLTPGDSSSGWTAGAAAYYVGYLQPRTFLLKYNENGTITDAVDCALDPLSETKCTLKSFTVEKGIYQTSNFRVQPTESIVRFPNITNLCPFGEVFNATRFASVYAWNRKRISNCVADYSVLYNSASFSTFKCYGVSPTKLNDLCFTNVYADSFVIRGDEVRQIAPGQTGKIADYNYKLPDDFTGCVIAWNSNNLDSKVGGNYNYLYRLFRKSNLKPFERDISTEIYQAGSTPCNGVEGFNCYFPLQSYGFQPTNGVGYQPYRVVVLSFELLHAPATVCGPKKSTNLVKNKCVNFNFNGLTGTGVLTESNKKFLPFQQFGRDIADTTDAVRDPQTLEILDITPCSFGGVSVITPGTNTSNQVAVLYQGVNCTEVPVAIHADQLTPTWRVYSTGSNVFQTRAGCLIGAEHVNNSYECDIPIGAGICASYQTQTNSPRRARSVASQSIIAYTMSLGAENSVAYSNNSIAIPTNFTISVTTEILPVSMTKTSVDCTMYICGDSTECSNLLLQYGSFCTQLNRALTGIAVEQDKNTQEVFAQVKQIYKTPPIKDFGGFNFSQILPDPSKPSKRSFIEDLLFNKVTLADAGFIKQYGDCLGDIAARDLICAQKFNGLTVLPPLLTDEMIAQYTSALLAGTITSGWTFGAGAALQIPFAMQMAYRFNGIGVTQNVLYENQKLIANQFNSAIGKIQDSLSSTASALGKLQDVVNQNAQALNTLVKQLSSNFGAISSVLNDILSRLDKVEAEVQIDRLITGRLQSLQTYVTQQLIRAAEIRASANLAATKMSECVLGQSKRVDFCGKGYHLMSFPQSAPHGVVFLHVTYVPAQEKNFTTAPAICHDGKAHFPREGVFVSNGTHWFVTQRNFYEPQIITTDNTFVSGNCDVVIGIVNNTVYDPLQPELDSGGSGYIPEAPRDGQAYVRKDGEWVLLSTFL

SEQ ID NO: 9696 - protein, 1177 aa, Artificial Sequence
  SARS-CoV-2/Belgium/ULG-6939/2020__EPI_ISL_417020 spike protein (1-1147) Foldon construct
MFVFLVLLPLVSSQCVNLTTRTQLPPAYTNSFTRGVYYPDKVFRSSVLHSTQDLFLPFFSNVTWFHAIHVSGTNGTKRFDNPVLPFNDGVYFASTEKSNIIRGWIFGTTLDSKTQSLLIVNNATNVVIKVCEFQFCNDPFLGVYYHKNNKSWMESEFRVYSSANNCTFEYVSQPFLMDLEGKQGNFKNLREFVFKNIDGYFKIYSKHTPINLVRDLPQGFSALEPLVDLPIGINITRFQTLLALHRSYLTPGDSSSGWTAGAAAYYVGYLQPRTFLLKYNENGTITDAVDCALDPLSETKCTLKSFTVEKGIYQTSNFRVQPTESIVRFPNITNLCPFGEVFNATRFASVYAWNRKRISNCVADYSVLYNSASFSTFKCYGVSPTKLNDLCFTNVYADSFVIRGDEVRQIAPGQTGKIADYNYKLPDDFTGCVIAWNSNNLDSKVGGNYNYLYRLFRKSNLKPFERDISTEIYQAGSTPCNGVEGFNCYFPLQSYGFQPTNGVGYQPYRVVVLSFELLHAPATVCGPKKSTNLVKNKCVNFNFNGLTGTGVLTESNKKFLPFQQFGRDIADTTDAVRDPQTLEILDITPCSFGGVSVITPGTNTSNQVAVLYQGVNCTEVPVAIHADQLTPTWRVYSTGSNVFQTRAGCLIGAEHVNNSYECDIPIGAGICASYQTQTNSPRRARSVASQSIIAYTMSLGAENSVVYSNNSIAIPTNFTISVTTEILPVSMTKTSVDCTMYICGDSTECSNLLLQYGSFCTQLNRALTGIAVEQDKNTQEVFAQVKQIYKTPPIKDFGGFNFSQILPDPSKPSKRSFIEDLLFNKVTLADAGFIKQYGDCLGDIAARDLICAQKFNGLTVLPPLLTDEMIAQYTSALLAGTITSGWTFGAGAALQIPFAMQMAYRFNGIGVTQNVLYENQKLIANQFNSAIGKIQDSLSSTASALGKLQDVVNQNAQALNTLVKQLSSNFGAISSVLNDILSRLDKVEAEVQIDRLITGRLQSLQTYVTQQLIRAAEIRASANLAATKMSECVLGQSKRVDFCGKGYHLMSFPQSAPHGVVFLHVTYVPAQEKNFTTAPAICHDGKAHFPREGVFVSNGTHWFVTQRNFYEPQIITTDNTFVSGNCDVVIGIVNNTVYDPLQPELDSGGSGYIPEAPRDGQAYVRKDGEWVLLSTFL

SEQ ID NO: 9697 - protein, 1177 aa, Artificial Sequence
  SARS-CoV-2/France/HF2496/2020__EPI_ISL_418231 spike protein (1-1147) Foldon construct
MFVFLVLLPLVSSQCVNLTTRTQLPPAYTNSFTRGVYYPDKVFRSSVLHSTQDLFLPFFSNVTWFHAIHVSGTNGTKRFDNPVLPFNDGVYFASTEKSNIIRGWIFGTTLDSKTQSLLIVNNATNVVIKVCEFQFCNDPFLGVYYHKNNKSWMESEFRVYSSANNCTFEYVSQPFLMDLEGKQGNFKNLREFVFKNIDGYFKIYSKHTPINLVRDLPQGFSALEPLVDLPIGINITRFQTLLALHRSYLTPGDSSSGWTAGAAAYYVGYLQPRTFLLKYNENGTITDAVDCALDPLSETKCTLKSFTVEKGIYQTSNFRVQPTESIVRFPNITNLCPFGEVFNATRFASVYAWNRKRISNCVADYSVLYNSASFSTFKCYGVSPTKLNDLCFTNVYADSFVIRGDEVRQIAPGQTGKIADYNYKLPDDFTGCVIAWNSNNLDSKVGGNYNYLYRLFRKSNLKPFERDISTEIYQAGSTPCNGVEGFNCYFPLQSYGFQPTNGVGYQPYRVVVLSFELLHAPATVCGPKKSTNLVKNKCVNFNFNGLTGTGVLTESNKKFLPFQQFGRDIADTTDAVRDPQTLEILDITPCSFGGVSVITPGTNTSNQVAVLYQGVNCTEVPVAIHADQLTPTWRVYSTGSNVFQTRAGCLIGAEHVNNSYECDIPIGAGICASYQTQTNSPRRARSVASQSIIAYTMSLGAENSVAYSNNSIAIPTNFTISVTTEILPVSMTKTSVDCTMYICGDSTECSNLLLQYGSFCTQLNRALTGIAVEQDKNTQEVFAQVKQIYKTPPIKDFGGFNFSQILPDPSKPSKRSFIEDLLFNKVTLADAGFIKQYGDCLGDIVARDLICAQKFNGLTVLPPLLTDEMIAQYTSALLAGTITSGWTFGAGAALQIPFAMQMAYRFNGIGVTQNVLYENQKLIANQFNSAIGKIQDSLSSTASALGKLQDVVNQNAQALNTLVKQLSSNFGAISSVLNDILSRLDKVEAEVQIDRLITGRLQSLQTYVTQQLIRAAEIRASANLAATKMSECVLGQSKRVDFCGKGYHLMSFPQSAPHGVVFLHVTYVPAQEKNFTTAPAICHDGKAHFPREGVFVSNGTHWFVTQRNFYEPQIITTDNTFVSGNCDVVIGIVNNTVYDPLQPELDSGGSGYIPEAPRDGQAYVRKDGEWVLLSTFL

SEQ ID NO: 9698 - protein, 1177 aa, Artificial Sequence
  SARS-CoV-2/USA/WA-UW291/2020__EPI_ISL_418076 spike protein (1-1147) Foldon construct
MFVFLVLLPLVSSQCVNLTTRTQLPPAYTNSFTRGVYYPDKVFRSSVLHSTQDLFLPFFSNVTWFHAIHVSGTNGTKRFDNPVLPFNDGVYFASTEKSNIIRGWIFGTTLDSKTQSLLIVNNATNVVIKVCEFQFCNDPFLGVYYHKNNKSWMESEFRVYSSANNCTFEYVSQPFLMDLEGKQGNFKNLREFVFKNIDGYFKIYSKHTPINLVRDLPQGFSALEPLVDLPIGINITRFQTLLALHRSYLTPGDSSSGWTAGAAAYYVGYLQPRTFLLKYNENGTITDAVDCALDPLSETKCTLKSFTVEKGIYQTSNFRVQPTESIVRFPNITNLCPFGEVFNATRFASVYAWNRKRISNCVADYSVLYNSASFSTFKCYGVSPTKLNDLCFTNVYADSFVIRGDEVRQIAPGQTGKIADYNYKLPDDFTGCVIAWNSNNLDSKVGGNYNYLYRLFRKSNLKPFERDISTEIYQAGSTPCNGVEGFNCYFPLQSYGFQPTNGVGYQPYRVVVLSFELLHAPATVCGPKKSTNLVKNKCVNFNFNGLTGTGVLTESNKKFLPFQQFGRDIADTTDAVRDPQTLEILDITPCSFGGVSVITPGTNTSNQVAVLYQGVNCTEVPVAIHADQLTPTWRVYSTGSNVFQTRAGCLIGAEHVNNSYECDIPIGAGICASYQTQTNSPRRARSVASQSIIAYTMSLGAENSVAYSNNSIAIPTNFTISVTTEILPVSMTKTSVDCTMYICGDSTECSNLLLQYGSFCTQLNRALTGIAVEQDKNTQEVFAQVKQIYKTPPIKDFGGFNFSQILPDPSKPSKRSFIEDLLFNKVTLADAGFIKQYGDCLGDIAARDLICAQKFNGLTVLPPLLTDEMIAQYTSALLAGTITSGWTFGAGAALQIPFAMQMAYRFNGIGVTQNVLYENQKLIANQFNSAIGKIQYSLSSTASALGKLQDVVNQNAQALNTLVKQLSSNFGAISSVLNDILSRLDKVEAEVQIDRLITGRLQSLQTYVTQQLIRAAEIRASANLAATKMSECVLGQSKRVDFCGKGYHLMSFPQSAPHGVVFLHVTYVPAQEKNFTTAPAICHDGKAHFPREGVFVSNGTHWFVTQRNFYEPQIITTDNTFVSGNCDVVIGIVNNTVYDPLQPELDSGGSGYIPEAPRDGQAYVRKDGEWVLLSTFL

SEQ ID NO: 9699 - protein, 1177 aa, Artificial Sequence; identical to SEQ ID NO: 9662
  SARS-CoV-2/Portugal/PT0034/2020__EPI_ISL_418019 spike protein (1-1147) Foldon construct

SEQ ID NO: 9700 - protein, 1177 aa, Artificial Sequence; identical to SEQ ID NO: 9654
  SARS-CoV-2/Iceland/202/2020__EPI_ISL_417750 spike protein (1-1147) Foldon construct

SEQ ID NO: 9701 - protein, 1177 aa, Artificial Sequence
  SARS-CoV-2/USA/WA-UW261/2020__EPI_ISL_418046 spike protein (1-1147) Foldon construct
MFVFLVLLPLVSSQCVNLTTRTQLPPAYTNSFTRGVYYPDKVFRSSVLHSTQDLFLPFFSNVTWFHAIHVSGTNGTKRFDNPVLPFNDGVYFASTEKSNIIRGWIFGTTLDSKTQSLLIVNNATNVVIKVCEFQFCNDPFLGVYYHKNNKSWMESEFRVYSSANNCTFEYVSQPFLMDLEGKQGNFKNLREFVFKNIDGYFKIYSKHTPINLVRDLPQGFSALEPLVDLPIGINITRFQTLLALHRSYLTPGDSSSGWTAGAAAYYVGYLQPRTFLLKYNENGTITDAVDCALDPLSETKCTLKSFTVEKGIYQTSNFRVQPTESIVRFPNITNLCPFGEVFNATRFTSVYAWNRKRISNCVADYSVLYNSASFSTFKCYGVSPTKLNDLCFTNVYADSFVIRGDEVRQIAPGQTGKIADYNYKLPDDFTGCVIAWNSNNLDSKVGGNYNYLYRLFRKSNLKPFERDISTEIYQAGSTPCNGVEGFNCYFPLQSYGFQPTNGVGYQPYRVVVLSFELLHAPATVCGPKKSTNLVKNKCVNFNFNGLTGTGVLTESNKKFLPFQQFGRDIADTTDAVRDPQTLEILDITPCSFGGVSVITPGTNTSNQVAVLYQDVNCTEVPVAIHADQLTPTWRVYSTGSNVFQTRAGCLIGAEHVNNSYECDIPIGAGICASYQTQTNSPRRARSVASQSIIAYTMSLGAENSVAYSNNSIAIPTNFTISVTTEILPVSMTKTSVDCTMYICGDSTECSNLLLQYGSFCTQLNRALTGIAVEQDKNTQEVFAQVKQIYKTPPIKDFGGFNFSQILPDPSKPSKRSFIEDLLFNKVTLADAGFIKQYGDCLGDIAARDLICAQKFNGLTVLPPLLTDEMIAQYTSALLAGTITSGWTFGAGAALQIPFAMQMAYRFNGIGVTQNVLYENQKLIANQFNSAIGKIQDSLSSTASALGKLQDVVNQNAQALNTLVKQLSSNFGAISSVLNDILSRLDKVEAEVQIDRLITGRLQSLQTYVTQQLIRAAEIRASANLAATKMSECVLGQSKRVDFCGKGYHLMSFPQSAPHGVVFLHVTYVPAQEKNFTTAPAICHDGKAHFPREGVFVSNGTHWFVTQRNFYEPQIITTDNTFVSGNCDVVIGIVNNTVYDPLQPELDSGGSGYIPEAPRDGQAYVRKDGEWVLLSTFL

SEQ ID NO: 9702 - protein, 1177 aa, Artificial Sequence
  SARS-CoV-2/Portugal/PT0035/2020__EPI_ISL_418020 spike protein (1-1147) Foldon construct
MFVFLVLLPLVSSQCVNLTTRTQLPPAYTNSFTRGVYYPDKVFRSSVLHSTQDLFLPFFSNVTWFHAIHVSGTNGTKRFDNPVLPFNDGVYFASTEKSNIIRGWIFGTTLDSKTQSLLIVNNATNVVIKVCEFQFCNDPFLGVYYHKNNKSWMESEFRVYSSANNCTFEYVSQPFLMDLEGKQGNFKNLREFVFKNIDGYFKIYSKHTPINLVRDLPQGFSALEPLVDLPIGINITRFQTLLALHRSYLTPGDSSSGWTAGAAAYYVGYLQPRTFLLKYNENGTITDAVDCALDPLSETKCTLKSFTVEKGIYQTSNFRVQPTESIVRFPNITNLCPFGEVFNATRFASVYAWNRKRISNCVADYSVLYNSASFSTFKCYGVSPTKLNDLCFTNVYADSFVIRGDEVRQIAPGQTGKIADYNYKLPDDFTGCVIAWNSNNLDSKVGGNYNYLYRLFRKSNLKPFERDISTEIYQAGSTPCNGVEGFNCYFPLQSYGFQPTNGVGYQPYRVVVLSFELLHAPATVCGPKKSTNLVKNKCVNFNFNGLTGTGVLTESNKKFLPFQQFGRDIADTTDAVRDPQTLEILDITPCSFGGVSVITPGTNTSNQVAVLYQDVNCTEVPVAIHADQLTPTWRVYSTGSNVFQTRAGCLIGAEHVNNSYECDIPIGAGICASYQTQTNSPRRARSVASQSIIAYTMSLGAENSVAYSNNSIAIPTNFTISVTTEILPVSMTKTSVDCTMYICGDSTECSNLLLQYGSFCTQLNRALTGIAVEQDKNTQEVFAQVKQIYKTPPIKDFGGFNFSQILPDPSKPSKRSFIEDLLFNKVTLADAGFIKQYGDCLGDISARDLICAQKFNGLTVLPPLLTDEMIAQYTSALLAGTITSGWTFGAGAALQIPFAMQMAYRFNGIGVTQNVLYENQKLIANQFNSAIGKIQDSLSSTASALGKLQDVVNQNAQALNTLVKQLSSNFGAISSVLNDILSRLDKVEAEVQIDRLITGRLQSLQTYVTQQLIRAAEIRASANLAATKMSECVLGQSKRVDFCGKGYHLMSFPQSAPHGVVFLHVTYVPAQEKNFTTAPAICHDGKAHFPREGVFVSNGTHWFVTQRNFYEPQIITTDNTFVSGNCDVVIGIVNNTVYDPLQPELDSGGSGYIPEAPRDGQAYVRKDGEWVLLSTFL

SEQ ID NO: 9703 - protein, 1177 aa, Artificial Sequence
  SARS-CoV-2/USA/NY-NYUMC7/2020__EPI_ISL_418192 spike protein (1-1147) Foldon construct
MFVFLVLLPLVSSQCVNLTTRTQLPPAYTNSFTRGVYYPDKVFRSSVLHSTQDLFLPFFSNVTWFHAIHVSGTNGTKRFDNPVLPFNDGVYFASTEKSNIIRGWIFGTTLDSKTQSLLIVNNATNVVIKVCEFQFCNDPFLGVYHHKNNKSWMESEFRVYSSANNCTFEYVSQPFLMDLEGKQGNFKNLREFVFKNIDGYFKIYSKHTPINLVRDLPQGFSALEPLVDLPIGINITRFQTLLALHRSYLTPGDSSSGWTAGAAAYYVGYLQPRTFLLKYNENGTITDAVDCALDPLSETKCTLKSFTVEKGIYQTSNFRVQPTESIVRFPNITNLCPFGEVFNATRFASVYAWNRKRISNCVADYSVLYNSASFSTFKCYGVSPTKLNDLCFTNVYADSFVIRGDEVRQIAPGQTGKIADYNYKLPDDFTGCVIAWNSNNLDSKVGGNYNYLYRLFRKSNLKPFERDISTEIYQAGSTPCNGVEGFNCYFPLQSYGFQPTNGVGYQPYRVVVLSFELLHAPATVCGPKKSTNLVKNKCVNFNFNGLTGTGVLTESNKKFLPFQQFGRDIADTTDAVRDPQTLEILDITPCSFGGVSVITPGTNTSNQVAVLYQGVNCTEVPVAIHADQLTPTWRVYSTGSNVFQTRAGCLIGAEHVNNSYECDIPIGAGICASYQTQTNSPRRARSVASQSIIAYTMSLGAENSVAYSNNSIAIPTNFTISVTTEILPVSMTKTSVDCTMYICGDSTECSNLLLQYGSFCTQLNRALTGIAVEQDKNTQEVFAQVKQIYKTPPIKDFGGFNFSQILPDPSKPSKRSFIEDLLFNKVTLADAGFIKQYGDCLGDIAARDLICAQKFNGLTVLPPLLTDEMIAQYTSALLAGTITSGWTFGAGAALQIPFAMQMAYRFNGIGVTQNVLYENQKLIANQFNSAIGKIQDSLSSTASALGKLQDVVNQNAQALNTLVKQLSSNFGAISSVLNDILSRLDKVEAEVQIDRLITGRLQSLQTYVTQQLIRAAEIRASANLAATKMSECVLGQSKRVDFCGKGYHLMSFPQSAPHGVVFLHVTYVPAQEKNFTTAPAICHDGKAHFPREGVFVSNGTHWFVTQRNFYEPQIITTDNTFVSGNCDVVIGIVNNTVYDPLQPELDSGGSGYIPEAPRDGQAYVRKDGEWVLLSTFL

SEQ ID NO: 9704 - protein, 1177 aa, Artificial Sequence
  SARS-CoV-2/Iceland/189/2020__EPI_ISL_417709 spike protein (1-1147) Foldon construct
MFVFLVLLPLVSSQCVNLTTRTQLPPAYTNSFTRGVYYPDKVFRSSVLHSTQDLFLPFFSNVTWFHAIHVSGTNGTKRFDNPVLPFNDGVYFASTEKSNIIRGWIFGTTLDSKTQSLLIVNNATNVVIKVCEFQFCNDPFLGVYYHKNNKSWMESEFRVYSSANNCTFEYVSQPFLMDLEGKQGNFKNLREFVFKNIDGYFKIYSKHTPINLVRDLPQGFSALEPLVDLPIGINITRFQTLLALHRSYLTPGDSSSGWTAGAAAYYVGYLQPRTFLLKYNENGTITDAVDCALDPLSETKCTLKSFTVEKGIYQTSNFRVQPTESIVRFPNITNLCPFGEVFNATRFASVYAWNRKRISNCVADYSVLYNSASFSTFKCYGVSPTKLNDLCFTNVYADSFVIRGDEVRQIAPGQTGKIADYNYKLPDDFTGCVIAWNSNNLDSKVGGNYNYLYRLFRKSNLKPFERDISTEIYQAGSTPCNGVEGFNCYFPLQSYGFQPTNGVGYQPYRVVVLSFELLHAPATVCGPKKSTNLVKNKCVNFNFNGLTGTGVLTESNKKFLPFQQFGRDIADTTDAVRDPQTLEILDITPCSFGGVSVITPGTNTSNQVAVLYQGVNCTEVPVAIHADQLTPTWRVYSTGSNVFQTRAGCLIGAEHVNNSYECDIPIGAGICASYQTQTNSPRRARSVASQSIIAYTMSLGAENSVAYSNNSIAIPTNFTISVTTEILPVSMTKTSVDCTMYICGDSTECSNLLLQYGSFCTQLNRALTGIAVEQDKNTQEVFAQVKQIYKTPPIKDFGGFNFSQILPDPSKPSKRSFIEDLLFNKVTLADAGFTKQYGDCLGDIAARDLICAQKFNGLTVLPPLLTDEMIAQYTSALLAGTITSGWTFGAGAALQIPFAMQMAYRFNGIGVTQNVLYENQKLIANQFNSAIGKIQDSLSSTASALGKLQDVVNQNAQALNTLVKQLSSNFGAISSVLNDILSRLDKVEAEVQIDRLITGRLQSLQTYVTQQLIRAAEIRASANLAATKMSECVLGQSKRVDFCGKGYHLMSFPQSAPHGVVFLHVTYVPAQEKNFTTAPAICHDGKAHFPREGVFVSNGTHWFVTQRNFYEPQIITTDNTFVSGNCDVVIGIVNNTVYDPLQPELDSGGSGYIPEAPRDGQAYVRKDGEWVLLSTFL

SEQ ID NO: 9705 - protein, 1177 aa, Artificial Sequence
  SARS-CoV-2/Australia/NSW56/2020__EPI_ISL_417408 spike protein (1-1147) Foldon construct
MFVFLVLLPLVSSQCVNLTTRTQLPPAYTNSFTRGVYYPDKVFRSSVLHSTQDLFLPFFSNVTWFHAIHVSGTNGTKRFDNPVLPFNDGVYFASTEKSNIIRGWIFGTTLDSKTQSLLIVNNATNVVIKVCEFQFCNDPFLGVYYHKNNKSWMESEFRVYSSANNCTFEYVSQPFLMDLEGKQGNFKNLREFVFKNIDGYFKIYSKHTPINLVRDLPQGFSALEPLVDLPIGINITRFQTLLALHRSYLTPGDSSSGWTAGAAAYYVGYLQPRTFLLKYNENGTITDAVDCALDPLSETKCTLKSFTVEKGIYQTSNFRVQPTESIVRFPNITNLCPFGEVFNATRFASVYAWNRKRISNCVADYSVLYNSASFSTFKCYGVSPTKLNDLCFTNVYADSFVIRGDEVRQIAPGQTGKIADYNYKLPDDFTGCVIAWNSNNLDSKVGGNYNYLYRLFRKSNLKPFERDISTEIYQAGSTPCNGVEGFNCYFPLQSYGFQPTNGVGYQPYRVVVLSFELLHAPATVCGPKKSTNLVKNKCVNFNFNGLTGTGVLTESNKKFLPFQQFGRDIADTTDAVRDPQTLEILDITPCSFGGVSVITPGTNTSNQVAVLYQDVNCTEVPVAIHADQLTPTWRVYSTGSNVFQTRAGCLIGAEHVNNSYECDIPIGAGICASYQTQTNSPRRARSVASQSIIAYTMSLGAENSVAYSNNSIAIPTNFTISVTTEILPVSMTKTSVDCTMYICGDSTECSNLLLQYGSFCTQLNRALTGIAVEQDKNTQEVFAQVKQIYKTPPIKDFGGFNFSQILPDSSKPSKRSFIEDLLFNKVTLADAGFIKQYGDCLGDIAARDLICAQKFNGLTVLPPLLTDEMIAQYTSALLAGTITSGWTFGAGAALQIPFAMQMAYRFNGIGVTQNVLYENQKLIANQFNSAIGKIQDSLSSTASALGKLQDVVNQNAQALNTLVKQLSSNFGAISSVLNDILSRLDKVEAEVQIDRLITGRLQSLQTYVTQQLIRAAEIRASANLAATKMSECVLGQSKRVDFCGKGYHLMSFPQSAPHGVVFLHVTYVPAQEKNFTTAPAICHDGKAHFPREGVFVSNGTHWFVTQRNFYEPQIITTDNTFVSGNCDVVIGIVNNTVYDPLQPELDSGGSGYIPEAPRDGQAYVRKDGEWVLLSTFL

SEQ ID NO: 9706 - protein, 1177 aa, Artificial Sequence
  SARS-CoV-2/Iceland/280/2020__EPI_ISL_417608 spike protein (1-1147) Foldon construct
MFVFLVLLPLVSSQCVNLTTRTQLPPAYTNSFTRGVYYPDKVFRSSVLHSTQDLFLPFFSNVTWFHAIHVSGTNGTKRFDNPVLPFNDGVYFASTEKSNIIRGWIFGTTLDSKTQSLLIVNNATNVVIKVCEFQFCNDPFLGVYYHKNNKSWMESEFRVYSSANNCTFEYVSQPFLMDLEGKQGNFKNLREFVFKNIDGYFKIYSKHTPINLVRDLPQGFSALEPLVDLPIGINITRFQTLLALHRSYLTPGDSSSGWTAGAAAYYVGYLQPRTFLLKYNENGTITDAVDCALDPLSETKCTLKSFTVEKGIYQTSNFRVQPTESIVRFPNITNLCPFGEVFNATRFASVYAWNRKRISNCVADYSVLYNSASFSTFKCYGVSPTKLNDLCFTNVYADSFVIRGDEVRQIAPGQTGKIADYNYKLPDDFTGCVIAWNSNNLDSKVGGNYNYLYRLFRKSNLKPFERDISTEIYQAGSTPCNGVEGFNCYFPLQSYGFQPTNGVGYQPYRVVVLSFELLHAPATVCGPKKSTNLVKNKCVNFNFNGLTGTGVLTESNKKFLPFQQFGRDIADTTDAVRDPQTLEILDITPCSFGGVSVITPGTNTSNQVAVLYQGVNCTEVPVAIHADQLTPTWRVYSTGSNVFQTRAGCLIGAEHVNNSYECDIPIGAGICASYHTQTNSPRRARSVASQSIIAYTMSLGAENSVAYSNNSIAIPTNFTISVTTEILPVSMTKTSVDCTMYICGDSTECSNLLLQYGSFCTQLNRALTGIAVEQDKNTQEVFAQVKQIYKTPPIKDFGGFNFSQILPDPSKPSKRSFIEDLLFNKVTLADAGFIKQYGDCLGDIAARDLICAQKFNGLTVLPPLLTDEMIAQYTSALLAGTITSGWTFGAGAALQIPFAMQMAYRFNGIGVTQNVLYENQKLIANQFNSAIGKIQDSLSSTASALGKLQDVVNQNAQALNTLVKQLSSNFGAISSVLNDILSRLDKVEAEVQIDRLITGRLQSLQTYVTQQLIRAAEIRASANLAATKMSECVLGQSKRVDFCGKGYHLMSFPQSAPHGVVFLHVTYVPAQEKNFTTAPAICHDGKAHFPREGVFVSNGTHWFVTQRNFYEPQIITTDNTFVSGNCDVVIGIVNNTVYDPLQPELDSGGSGYIPEAPRDGQAYVRKDGEWVLLSTFL

SEQ ID NO: 9707 - protein, 1177 aa, Artificial Sequence; identical to SEQ ID NO: 9662
  SARS-CoV-2/Iceland/247/2020__EPI_ISL_417575 spike protein (1-1147) Foldon construct

SEQ ID NO: 9708 - protein, 1177 aa, Artificial Sequence
  SARS-CoV-2/Iceland/238/2020__EPI_ISL_417566 spike protein (1-1147) Foldon construct
MFVFLVLLPLVSSQCVNLTTRTQLPPAYTNSFTRGVYYPDKVFRSSVLHSTQDLFLPFFSNVTWFHAIHVSGTNGTKRFDNPVLPFNDGVYFASTEKSNIIRGWIFGTTLDSKTQSLLIVNNATNVVIKVCEFQFCNDPFLGVYYHKNNKSWMESEFRVYSSANNCTFEYVSQPFLMDLEGKQGNFKNLREFVFKNIDGYFKIYSKHTPINLVRDLPQGFSALEPLVDLPIGINITRFQTLLALHRSYLTPGDSSSGWTAGAAAYYVGYLQPRTFLLKYNENGTITDAVDCALDPLSETKCTLKSFTVEKGIYQTSNFRVQPTESIVRFPNITNLCPFGEVFNATRFASVYAWNRKRISNCVADYSVLYNSASFSTFKCYGVSPTKLNDLCFTNVYADSFVIRGDEVRQIAPGQTGKIADYNYKLPDDFTGCVIAWNSNNLDSKVGGNYNYLYRLFRKSNLKPFERDISTEIYQAGSTPCNGVEGFNCYFPLQSYGFQPTNGVGYQPYRVVVLSFELLHAPATVCGPKKSTNLVKNKCVNFNFNGLTGTGVLTESNKKFLPFQQFGRDIADTTDAVRDPQTLEILDITPCSFGGVSVITPGTNTSNQVAVLYQGVNCTEVPVAIHADQLTPTWRVYSTGSNVFQTRAGCLIGAEHVNNSYECDIPIGAGICASYQTQTNSPRRARSVASQSIIAYTMSLGAENSVAYSNNSIAIPTNFTISVTTEILPVSMTKTSVDCTMYICGDSTECSNLLLQYGSFCTQLNRALTGIAVEQDKNTQEVFAQVKQIYKTPPIKDFGGFNFSQILPDPSKPSKRSFIEDLLFNKVTLADVGFIKQYGDCLGDIAARDLICAQKFNGLTVLPPLLTDEMIAQYTSALLAGTITSGWTFGAGAALQIPFAMQMAYRFNGIGVTQNVLYENQKLIANQFNSAIGKIQDSLSSTASALGKLQDVVNQNAQALNTLVKQLSSNFGAISSVLNDILSRLDKVEAEVQIDRLITGRLQSLQTYVTQQLIRAAEIRASANLAATKMSECVLGQSKRVDFCGKGYHLMSFPQSAPHGVVFLHVTYVPAQEKNFTTAPAICHDGKAHFPREGVFVSNGTHWFVTQRNFYEPQIITTDNTFVSGNCDVVIGIVNNTVYDPLQPELDSGGSGYIPEAPRDGQAYVRKDGEWVLLSTFL

SEQ ID NO: 9709 - protein, 1177 aa, Artificial Sequence
  SARS-CoV-2/Greece/16/2020__EPI_ISL_418265 spike protein (1-1147) Foldon construct
MFVFLVLLPLVSSQCVNLTTRTQLPPAYTNSFTRGVYYPDKVFRSSVLHSTQDLFLPFFSNVTWFHAIHVSGTNGTKRFDNPVLPFNDGVYFASTEKSNIIRGWIFGTTLDSKTQSLLIVNNATNVVIKVCEFQFCNDPFLGVYYHKNNKSWMESEFRVYSSANNCTFEYVSQPFLMDLEGKQGNFKNLREFVFKNVDGYFKIYSKHTPINLVRDLPQGFSALEPLVDLPIGINITRFQTLLALHRSYLTPGDSSSGWTAGAAAYYVGYLQPRTFLLKYNENGTITDAVDCALDPLSETKCTLKSFTVEKGIYQTSNFRVQPTESIVRFPNITNLCPFGEVFNATRFASVYAWNRKRISNCVADYSVLYNSASFSTFKCYGVSPTKLNDLCFTNVYADSFVIRGDEVRQIAPGQTGKIADYNYKLPDDFTGCVIAWNSNNLDSKVGGNYNYLYRLFRKSNLKPFERDISTEIYQAGSTPCNGVEGFNCYFPLQSYGFQPTNGVGYQPYRVVVLSFELLHAPATVCGPKKSTNLVKNKCVNFNFNGLTGTGVLTESNKKFLPFQQFGRDIADTTDAVRDPQTLEILDITPCSFGGVSVITPGTNTSNQVAVLYQDVNCTEVPVAIHADQLTPTWRVYSTGSNVFQTRAGCLIGAEHVNNSYECDIPIGAGICASYQTQTNSPRRARSVASQSIIAYTMSLGAENSVAYSNNSIAIPTNFTISVTTEILPVSMTKTSVDCTMYICGDSTECSNLLLQYGSFCTQLNRALTGIAVEQDKNTQEVFAQVKQIYKTPPIKDFGGFNFSQILPDPSKPSKRSFIEDLLFNKVTLADAGFIKQYGDCLGDIAARDLICAQKFNGLTVLPPLLTDEMIAQYTSALLAGTITSGWTFGAGAALQIPFAMQMAYRFNGIGVTQNVLYENQKLIANQFNSAIGKIQDSLSSTASALGKLQDVVNQNAQALNTLVKQLSSNFGAISSVLNDILSRLDKVEAEVQIDRLITGRLQSLQTYVTQQLIRAAEIRASANLAATKMSECVLGQSKRVDFCGKGYHLMSFPQSAPHGVVFLHVTYVPAQEKNFTTAPAICHDGKAHFPREGVFVSNGTHWFVTQRNFYEPQIITTDNTFVSGNCDVVIGIVNNTVYDPLQPELDSGGSGYIPEAPRDGQAYVRKDGEWVLLSTFL

SEQ ID NO: 9710 - protein, 1177 aa, Artificial Sequence
  SARS-CoV-2/Iceland/319/2020__EPI_ISL_417648 spike protein (1-1147) Foldon construct
MFVFLVLLPLVSSQCVNLTTRTQLPPAYTNSFTRGVYYPDKVFRSSVLHSTQDLFLPFFSNVTWFHAIHVSGTNGTKRFDNPVLPFNDGVYFASTEKSNIIRGWIFGTTLDSKTQSLLIVNNATNVVIKVCEFQFCNDPFLGVYYHKNNKSWMESEFRVYSSANNCTFEYVSQPFLIDLEGKQGNFKNLREFVFKNIDGYFKIYSKHTPINLVRDLPQGFSALEPLVDLPIGINITRFQTLLALHRSYLTPGDSSSGWTAGAAAYYVGYLQPRTFLLKYNENGTITDAVDCALDPLSETKCTLKSFTVEKGIYQTSNFRVQPTESIVRFPNITNLCPFGEVFNATRFASVYAWNRKRISNCVADYSVLYNSASFSTFKCYGVSPTKLNDLCFTNVYADSFVIRGDEVRQIAPGQTGKIADYNYKLPDDFTGCVIAWNSNNLDSKVGGNYNYLYRLFRKSNLKPFERDISTEIYQAGSTPCNGVEGFNCYFPLQSYGFQPTNGVGYQPYRVVVLSFELLHAPATVCGPKKSTNLVKNKCVNFNFNGLTGTGVLTESNKKFLPFQQFGRDIADTTDAVRDPQTLEILDITPCSFGGVSVITPGTNTSNQVAVLYQGVNCTEVPVAIHADQLTPTWRVYSTGSNVFQTRAGCLIGAEHVNNSYECDIPIGAGICASYQTQTNSPRRARSVASQSIIAYTMSLGAENSVAYSNNSIAIPTNFTISVTTEILPVSMTKTSVDCTMYICGDSTECSNLLLQYGSFCTQLNRALTGIAVEQDKNTQEVFAQVKQIYKTPPIKDFGGFNFSQILPDPSKPSKRSFIEDLLFNKVTLADAGFIKQYGDCLGDIAARDLICAQKFNGLTVLPPLLTDEMIAQYTSALLAGTITSGWTFGAGAALQIPFAMQMAYRFNGIGVTQNVLYENQKLIANQFNSAIGKIQDSLSSTASALGKLQDVVNQNAQALNTLVKQLSSNFGAISSVLNDILSRLDKVEAEVQIDRLITGRLQSLQTYVTQQLIRAAEIRASANLAATKMSECVLGQSKRVDFCGKGYHLMSFPQSAPHGVVFLHVTYVPAQEKNFTTAPAICHDGKAHFPREGVFVSNGTHWFVTQRNFYEPQIITTDNTFVSGNCDVVIGIVNNTVYDPLQPELDSGGSGYIPEAPRDGQAYVRKDGEWVLLSTFL

SEQ ID NO: 9711 - protein, 1177 aa, Artificial Sequence
  SARS-CoV-2/Congo/94/2020__EPI_ISL_417947 spike protein (1-1147) Foldon construct
MFVFLVLLPLVSSQCVNLTTRTQLPPAYTNSFTRGVYYPDKVFRSSVLHSTQDLFLPFFSNVTWFHAIHVSGTNGTKRFDNPVLPFNDGVYFASTEKSNIIRGWIFGTTLDSKTQSLLIVNNATNVVIKVCEFQFCNDPFLGVYYHKNNKSWMESEFRVYSSANNCTFEYVSQPFLMDLEGKQGNFKNLREFVFKNIDGYFKIYSKHTPINLVRDLPQGFSALEPLVDLPIGINITRFQTLLALHRSYLTPGDSSSGWTAGAAAYYVGYLQPRTFLLKYNENGTITDAVDCALDPLSETKCTLKSFTVEKGIYQTSNFRVQPTESIVRFPNITNLCPFGEVFNATRFASVYAWNRKRISNCVADYSVLYNSASFSTFKCYGVSPTKLNDLCFTNVYADSFVIRGDEVRQIAPGQTGKIADYNYKLPDDFTGCVIAWNSNNLDSKVGGNYNYLYRLFRKSNLKPFERDISTEIYQAGSTPCNGVEGFNCYFPLQSYGFQPTNGVGYQPYRVVVLSFELLHAPATVCGPKKSTNLVKNKCVNFNFNGLTGTGVLTESNKKFLPFQQFGRDIADTTDAVRDPQTLEILDITPCSFGGVSVITPGTNTSNQVAVLYQGVNCTEVPVAIHADQLTPTWRVYSTGSNVFQTRAGCLIGAEHVNNSYECDIPIGAGICASYQTQTNSPRRARSVASQSIIAYTMSLGAENSVAYSNNSIAIPTNFTISVTTEILPVSMTKTSVDCTMYICGDSTECSNLLLQYGSFCTQLNRALTGIAVEQDKNTQEVFAQVKQIYKTPPIKDFGGFNFSQILPDPSKPSKRSFIEDILFNKVTLADAGFIKQYGDCLGDIAARDLICAQKFNGLTVLPPLLTDEMIAQYTSALLAGTITSGWTFGAGAALQIPFAMQMAYRFNGIGVTQNVLYENQKLIANQFNSAIGKIQDSLSSTASALGKLQDVVNQNAQALNTLVKQLSSNFGAISSVLNDILSRLDKVEAEVQIDRLITGRLQSLQTYVTQQLIRAAEIRASANLAATKMSECVLGQSKRVDFCGKGYHLMSFPQSAPHGVVFLHVTYVPAQEKNFTTAPAICHDGKAHFPREGVFVSNGTHWFVTQRNFYEPQIITTDNTFVSGNCDVVIGIVNNTVYDPLQPELDSGGSGYIPEAPRDGQAYVRKDGEWVLLSTFL

SEQ ID NO: 9712 - protein, 1177 aa, Artificial Sequence
  SARS-CoV-2/Congo/158/2020__EPI_ISL_417950 spike protein (1-1147) Foldon construct
MFVFLVLLPLVSSQCVNLTTRTQLPPAYTNSFTRGVYYPDKVFRSSVLHSTQDLFLPFFSNVTWFHAIHVSGTNGTKRFDNPVLPFNDGVYFASTEKSNIIRGWIFGTTLDSKTQSLLIVNNATNVVIKVCEFQFCNDPFLGVYYHKNNKSWMESEFRVYSSANNCTFEYVSQPFLMDLEGKQGNFKNLREFVFKNIDGYFKIYSKHTPINLVRDLPQGFSALEPLVDLPIGINITRFQTLLALHRSYLTPGDSSSGWTAGAAAYYVGYLQPRTFLLKYNENGTITDAVDCALDPLSETKCTLKSFTVEKGIYQTSNFRVQPTESIVRFPNITNLCPFGEVFNATRFASVYAWNRKRISNCVADYSVLYNSASFSTFKCYGVSPTKLNDLCFTNVYADSFVIRGDEVRQIAPGQTGKIADYNYKLPDDFTGCVIAWNSNNLDSKVGGNYNYLYRLFRKSNLKPFERDISTEIYQAGSTPCNGVEGFNCYFPLQSYGFQPTNGVGYQPYRVVVLSFELLHAPATVCGPKKSTNLVKNKCVNFNFNGLTGTGVLTESNKKFLPFQQFGRDIADTTDAVRDPQTLEILDITPCSFGGVSVITPGTNTSNQVAVLYQDVNCTEVPVAIHADQLTPTWRVYSTGSNVFQTRAGCLIGAEHVNNSYECDIPIGAGICASYQTQTNSPRRARSVASQSIIAYTMSLGAENSVAYSNNSIAIPTNFTISVTTEILPVSMTKTSVDCTMYICGDSTECSNLLLQYGSFCTQLNRALTGIAVEQDKNTQEVFAQVKQIYKTPPIKDFGGFNFSQILPDPSKPSKRSFIEDLLFNKVTLADAGFIKQYGDCLGDIAARDLICAQKFNGLTVLPPLLTDEMIAQYTSALLAGTITSGWTFGAGAALQIPFAMQMAYRFNGIGVTQNVLYENQKLIANQFNSAIGKIQDSLSSTASALGKLQDVVNQNAQALNTLVKQLSSNFGAISSVLNDILSRLDKVEAEVQIDRLITGRLQSLQTYVTQQLIRAAEIRASANLAATKMSECVLGQSKRVDFCGKGYHLMSFPQSAPHGVVFLHVTYVPAQEKNFTTAPAICHDGKAHFPREGVFVSNGTHWFVTQRNFYEPQIITTDNTFLSGNCDVVIGIVNNTVYDPLQPELDSGGSGYIPEAPRDGQAYVRKDGEWVLLSTFL

SEQ ID NO: 9713 - protein, 1177 aa, Artificial Sequence
  SARS-CoV-2/USA/UT-00034/2020__EPI_ISL_417977 spike protein (1-1147) Foldon construct
MFVFLVLLPLVSSQCVNLTTRTQLPPAYTNSFTRGVYYPDKVFRSSVLHSTQDLFLPFFSNVTWFHAIHVSGTNGTKRFDNPVLPFNDGVYFASTEKSNIIRGWIFGTTLDSKTQSLLIVNNATNVVIKVCEFQFCNDPFLGVYYYKNNKSWMESEFRVYSSANNCTFEYVSQPFLMDLEGKQGNFKNLREFVFKNIDGYFKIYSKHTPINLVRDLPQGFSALEPLVDLPIGINITRFQTLLALHRSYLTPGDSSSGWTAGAAAYYVGYLQPRTFLLKYNENGTITDAVDCALDPLSETKCTLKSFTVEKGIYQTSNFRVQPTESIVRFPNITNLCPFGEVFNATRFASVYAWNRKRISNCVADYSVLYNSASFSTFKCYGVSPTKLNDLCFTNVYADSFVIRGDEVRQIAPGQTGKIADYNYKLPDDFTGCVIAWNSNNLDSKVGGNYNYLYRLFRKSNLKPFERDISTEIYQAGSTPCNGVEGFNCYFPLQSYGFQPTNGVGYQPYRVVVLSFELLHAPATVCGPKKSTNLVKNKCVNFNFNGLTGTGVLTESNKKFLPFQQFGRDIADTTDAVRDPQTLEILDITPCSFGGVSVITPGTNTSNQVAVLYQGVNCTEVPVAIHADQLTPTWRVYSTGSNVFQTRAGCLIGAEHVNNSYECDIPIGAGICASYQTQTNSPRRARSVASQSIIAYTMSLGAENSVAYSNNSIAIPTNFTISVTTEILPVSMTKTSVDCTMYICGDSTECSNLLLQYGSFCTQLNRALTGIAVEQDKNTQEVFAQVKQIYKTPPIKDFGGFNFSQILPDPSKPSKRSFIEDLLFNKVTLADAGFIKQYGDCLGDIAARDLICAQKFNGLTVLPPLLTDEMIAQYTSALLAGTITSGWTFGAGAALQIPFAMQMAYRFNGIGVTQNVLYENQKLIANQFNSAIGKIQDSLSSTASALGKLQDVVNQNAQALNTLVKQLSSNFGAISSVLNDILSRLDKVEAEVQIDRLITGRLQSLQTYVTQQLIRAAEIRASANLAATKMSECVLGQSKRVDFCGKGYHLMSFPQSAPHGVVFLHVTYVPAQEKNFTTAPAICHDGKAHFPREGVFVSNGTHWFVTQRNFYEPQIITTDNTFVSGNCDVVIGIVNNTVYDPLQPELDSGGSGYIPEAPRDGQAYVRKDGEWVLLSTFL

SEQ ID NO: 9714 - protein, 1177 aa, Artificial Sequence
  SARS-CoV-2/USA/UT-00033/2020__EPI_ISL_417976 spike protein (1-1147) Foldon construct
MFVFLVLLPLVSSQCVNLTTRTQLPPAYTNSFTRGVYYPDKVFRSSVLHSTQDLFLPFFSNVTWFHAIHVSGTNGTKRFDNPVLPFNDGVYFASTEKSNIIRGWIFGTTLDSKTQSLLIVNNATNVVIKVCEFQFCNDPFLGVYYHKNNKSWMESEFRVYSSANNCTFEYVSQPFLMDLEGKQGNFKNLREFVFKNIDGYFKIYSKHTPINLVRDLPQGFSALEPLVDLPIGINITRFQTLLALHRSYLTPGDSSSGLTAGAAAYYVGYLQPRTFLLKYNENGTITDAVDCALDPLSETKCTLKSFTVEKGIYQTSNFRVQPTESIVRFPNITNLCPFGEVFNATRFASVYAWNRKRISNCVADYSVLYNSASFSTFKCYGVSPTKLNDLCFTNVYADSFVIRGDEVRQIAPGQTGKIADYNYKLPDDFTGCVIAWNSNNLDSKVGGNYNYLYRLFRKSNLKPFERDISTEIYQAGSTPCNGVEGFNCYFPLQSYGFQPTNGVGYQPYRVVVLSFELLHAPATVCGPKKSTNLVKNKCVNFNFNGLTGTGVLTESNKKFLPFQQFGRDIADTTDAVRDPQTLEILDITPCSFGGVSVITPGTNTSNQVAVLYQGVNCTEVPVAIHADQLTPTWRVYSTGSNVFQTRAGCLIGAEHVNNSYECDIPIGAGICASYQTQTNSPRRARSVASQSIIAYTMSLGAENSVAYSNNSIAIPTNFTISVTTEILPVSMTKTSVDCTMYICGDSTECSNLLLQYGSFCTQLNRALTGIAVEQDKNTQEVFAQVKQIYKTPPIKDFGGFNFSQILPDPSKPSKRSFIEDLLFNKVTLADAGFIKQYGDCLGDIAARDLICAQKFNGLTVLPPLLTDEMIAQYTSALLAGTITSGWTFGAGAALQIPFAMQMAYRFNGIGVTQNVLYENQKLIANQFNSAIGKIQDSLSSTASALGKLQDVVNQNAQALNTLVKQLSSNFGAISSVLNDILSRLDKVEAEVQIDRLITGRLQSLQTYVTQQLIRAAEIRASANLAATKMSECVLGQSKRVDFCGKGYHLMSFPQSAPHGVVFLHVTYVPAQEKNFTTAPAICHDGKAHFPREGVFVSNGTHWFVTQRNFYEPQIITTDNTFVSGNCDVVIGIVNNTVYDPLQPELDSGGSGYIPEAPRDGQAYVRKDGEWVLLSTFL

SEQ ID NO: 9715 - protein, 1177 aa, Artificial Sequence
  SARS-CoV-2/USA/WI-13/2020__EPI_ISL_417516 spike protein (1-1147) Foldon construct
MFVFLVLLPLVSSQCVNLTTRTQLPPAYTNSFTRGVYYPDKVFRSSVLHSTQDLFLPFFSNVTWFHAIHVSGTNGTKRFDNPVLPFNDGVYFASTEKSNIIRGWIFGTTLDSKTQSLLIVNNATNVVIKVCEFQFCNDPFLGVYYHKNNKSWMESEFRVYSSANNCTFEYVSQPFLMDLEGKQGNFKNLREFVFKNIDGYFKIYSKHTPINLVRDLPQGFSALEPLVDLPIGINITRFQTLLALHRSYLTPGDSSSGWTAGAAAYYVGYLQPRTFLLKYNENGTITDAVDCALDPLSETKCTLKSFTVEKGIYQTSNFRVLPTESIVRFPNITNLCPFGEVFNATRFASVYAWNRKRISNCVADYSVLYNSASFSTFKCYGVSPTKLNDLCFTNVYADSFVIRGDEVRQIAPGQTGKIADYNYKLPDDFTGCVIAWNSNNLDSKVGGNYNYLYRLFRKSNLKPFERDISTEIYQAGSTPCNGVEGFNCYFPLQSYGFQPTNGVGYQPYRVVVLSFELLHAPATVCGPKKSTNLVKNKCVNFNFNGLTGTGVLTESNKKFLPFQQFGRDIADTTDAVRDPQTLEILDITPCSFGGVSVITPGTNTSNQVAVLYQGVNCTEVPVAIHADQLTPTWRVYSTGSNVFQTRAGCLIGAEHVNNSYECDIPIGAGICASYQTQTNSPRRARSVASQSIIAYTMSLGAENSVAYSNNSIAIPTNFTISVTTEILPVSMTKTSVDCTMYICGDSTECSNLLLQYGSFCTQLNRALTGIAVEQDKNTQEVFAQVKQIYKTPPIKDFGGFNFSQILPDPSKPSKRSFIEDLLFNKVTLADAGFIKQYGDCLGDIAARDLICAQKFNGLTVLPPLLTDEMIAQYTSALLAGTITSGWTFGAGAALQIPFAMQMAYRFNGIGVTQNVLYENQKLIANQFNSAIGKIQDSLSSTASALGKLQDVVNQNAQALNTLVKQLSSNFGAISSVLNDILSRLDKVEAEVQIDRLITGRLQSLQTYVTQQLIRAAEIRASANLAATKMSECVLGQSKRVDFCGKGYHLMSFPQSAPHGVVFLHVTYVPAQEKNFTTAPAICHDGKAHFPREGVFVSNGTHWFVTQRNFYEPQIITTDNTFVSGNCDVVIGIVNNTVYDPLQPELDSGGSGYIPEAPRDGQAYVRKDGEWVLLSTFL

SEQ ID NO: 9716 - protein, 1176 aa, Artificial Sequence
  SARS-CoV-2/India/1-27/2020__EPI_ISL_413522 spike protein (1-1146) Foldon construct
MFVFLVLLPLVSSQCVNLTTRTQLPPAYTNSFTRGVYYPDKVFRSSVLHSTQDLFLPFFSNVTWFHAIHVSGTNGTKRFDNPVLPFNDGVYFASTEKSNIIRGWIFGTTLDSKTQSLLIVNNATNVVIKVCEFQFCNDPFLGVYHKNNKSWMESEFRVYSSANNCTFEYVSQPFLMDLEGKQGNFKNLREFVFKNIDGYFKIYSKHTPINLVRDLPQGFSALEPLVDLPIGINITRFQTLLALHRSYLTPGDSSSGWTAGAAAYYVGYLQPRTFLLKYNENGTITDAVDCALDPLSETKCTLKSFTVEKGIYQTSNFRVQPTESIVRFPNITNLCPFGEVFNATRFASVYAWNRKRISNCVADYSVLYNSASFSTFKCYGVSPTKLNDLCFTNVYADSFVIRGDEVIQIAPGQTGKIADYNYKLPDDFTGCVIAWNSNNLDSKVGGNYNYLYRLFRKSNLKPFERDISTEIYQAGSTPCNGVEGFNCYFPLQSYGFQPTNGVGYQPYRVVVLSFELLHAPATVCGPKKSTNLVKNKCVNFNFNGLTGTGVLTESNKKFLPFQQFGRDIADTTDAVRDPQTLEILDITPCSFGGVSVITPGTNTSNQVAVLYQDVNCTEVPVAIHADQLTPTWRVYSTGSNVFQTRAGCLIGAEHVNNSYECDIPIGAGICASYQTQTNSPRRARSVASQSIIAYTMSLGAENSVAYSNNSIAIPTNFTISVTTEILPVSMTKTSVDCTMYICGDSTECSNLLLQYGSFCTQLNRALTGIAVEQDKNTQEVFAQVKQIYKTPPIKDFGGFNFSQILPDPSKPSKRSFIEDLLFNKVTLADAGFIKQYGDCLGDIAARDLICAQKFNGLTVLPPLLTDEMIAQYTSALLAGTITSGWTFGAGAALQIPFAMQMAYRFNGIGVTQNVLYENQKLIANQFNSAIGKIQDSLSSTASALGKLQDVVNQNAQALNTLVKQLSSNFGAISSVLNDILSRLDKVEAEVQIDRLITGRLQSLQTYVTQQLIRAAEIRASANLAATKMSECVLGQSKRVDFCGKGYHLMSFPQSAPHGVVFLHVTYVPAQEKNFTTAPAICHDGKAHFPREGVFVSNGTHWFVTQRNFYEPQIITTDNTFVSGNCDVVIGIVNNTVYDPLQPELDSGGSGYIPEAPRDGQAYVRKDGEWVLLSTFL

SEQ ID NO: 9717 - protein, 1171 aa, Artificial Sequence
  SARS-CoV-2/pangolin/Guangxi/P4L/2017__EPI_ISL_410538 spike protein (1-1141) Foldon construct
MFVFLFVLPLVSSQCVNLTTRTGIPPGYTNSSTRGVYYPDKVFRSSILHLTQDLFLPFFSNVTWFNTINYQGGFKKFDNPVLPFNDGVYFASTEKSNIIRGWIFGTTLDARTQSLLIVNNATNVVIKVCEFQFCTDPFLGVYYHNNNKTWVENEFRVYSSANNCTFEYISQPFLMDLEGKQGNFKNLREFVFKNVDGYFKIYSKHTPIDLVRDLPRGFAALEPLVDLPIGINITRFQTLLALHRSYLTPGNLESGWTTGAAAYYVGYLQQRTFLLSYNQNGTITDAVDCSLDPLSETKCTLKSLTVEKGIYQTSNFRVQPTISIVRFPNITNLCPFGEVFNASKFASVYAWNRKRISNCVADYSVLYNSTSFSTFKCYGVSPTKLNDLCFTNVYADSFVVKGDEVRQIAPGQTGVIADYNYKLPDDFTGCVIAWNSVKQDALTGGNYGYLYRLFRKSKLKPFERDISTEIYQAGSTPCNGQVGLNCYYPLERYGFHPTTGVNYQPFRVVVLSFELLNGPATVCGPKLSTTLVKDKCVNFNFNGLTGTGVLTTSKKQFLPFQQFGRDISDTTDAVRDPQTLEILDITPCSFGGVSVITPGTNTSNQVAVLYQDVNCTEVPMAIHAEQLTPAWRVYSAGANVFQTRAGCLVGAEHVNNSYECDIPVGAGICASYHSMSSLRSVNQRSIIAYTMSLGAENSVAYSNNSIAIPTNFTISVTTEILPVSMTKTSVDCTMYICGDSIECSNLLLQYGSFCTQLNRALTGIAVEQDKNTQEVFAQVKQIYKTPPIKDFGGFNFSQILPDPSKPSKRSFIEDLLFNKVTLADAGFIKQYGDCLGDIAARDLICAQKFNGLTVLPPLLTDEMIAQYTSALLAGTITSGWTFGAGAALQIPFAMQMAYRFNGIGVTQNVLYENQKLIANQFNSAIGKIQDSLSSTASALGKLQDVVNQNAQALNTLVKQLSSNFGAISSVLNDILSRLDKVEAEVQIDRLITGRLQSLQTYVTQQLIRAAEIRASANLAATKMSECVLGQSKRVDFCGKGYHLMSFPQSAPHGVVFLHVTYVPAQEKNFTTAPAICHEGKAHFPREGVFVSNGTHWFITQRNFYEPQIITTDNTFVSGSCDVVIGIVNNTVYDPLQPELDSGGSGYIPEAPRDGQAYVRKDGEWVLLSTFL

SEQ ID NO: 9718 - protein, 1171 aa, Artificial Sequence
  SARS-CoV-2/pangolin/Guangxi/P5L/2017__EPI_ISL_410540 spike protein (1-1141) Foldon construct
MFVFLFVLPLVSSQCVNLTTRTGIPPGYTNSSTRGVYYPDKVFRSSILHLTQDLFLPFFSNVTWFNTINYQGGFKKFDNPVLPFNDGVYFASTEKSNIIRGWIFGTTLDARTQSLLIVNNATNVVIKVCEFQFCTDPFLGVYYHNNNKTWVENEFRVYSSANNCTFEYISQPFLMDLEGKQGNFKNLREFVFKNVDGYFKIYSKHTPIDLVRDLPRGFAALEPLVDLPIGINITRFQTLLALHRSYLTPGKLESGWTTGAAAYYVGYLQQRTFLLSYNQNGTITDAVDCSLDPLSETKCTLKSLTVEKGIYQTSNFRVQPTISIVRFPNITNLCPFGEVFNASKFASVYAWNRKRISNCVADYSVLYNSTSFSTFKCYGVSPTKLNDLCFTNVYADSFVVKGDEVRQIAPGQTGVIADYNYKLPDDFTGCVIAWNSVKQDALTGGNYGYLYRLFRKSKLKPFERDISTEIYQAGSTPCNGQVGLNCYYPLERYGFHPTTGVNYQPFRVVVLSFELLNGPATVCGPKLSTTLVKDKCVNFNFNGLTGTGVLTTSKKQFLPFQQFGRDISDTTDAVRDPQTLEILDITPCSFGGVSVITPGTNTSNQVAVLYQDVNCTEVPMAIHAEQLTPAWRVYSAGANVFQTRAGCLVGAEHVNNSYECDIPVGAGICASYHSMSSFRSVNQRSIIAYTMSLGAENSVAYSNNSIAIPTNFTISVTTEILPVSMTKTSVDCTMYICGDSIECSNLLLQYGSFCTQLNRALTGIAVEQDKNTQEVFAQVKQIYKTPPIKDFGGFNFSQILPDPSKPSKRSFIEDLLFNKVTLADAGFIKQYGDCLGDIAARDLICAQKFNGLTVLPPLLTDEMIAQYTSALLAGTITSGWTFGAGAALQIPFAMQMAYRFNGIGVTQNVLYENQKLIANQFNSAIGKIQDSLSSTASALGKLQDVVNQNAQALNTLVKQLSSNFGAISSVLNDILSRLDKVEAEVQIDRLITGRLQSLQTYVTQQLIRAAEIRASANLAATKMSECVLGQSKRVDFCGKGYHLMSFPQSAPHGVVFLHVTYVPAQEKNFTTAPAICHEGKAHFPREGVFVSNGTHWFITQRNFYEPQIITTDNTFVSGSCDVVIGIVNNTVYDPLQPELDSGGSGYIPEAPRDGQAYVRKDGEWVLLSTFL

SEQ ID NO: 9719 - protein, 1171 aa, Artificial Sequence
  SARS-CoV-2/pangolin/Guangxi/P5E/2017__EPI_ISL_410541 spike protein (1-1141) Foldon construct
MFVFLFVLPLVSSQCVNLTTRTGIPPGYTNSSTRGVYYPDKVFRSSILHLTQDLFLPFFSNVTWFNTITYQGGSKKFDNPVLPFNDGVYFASTEKSNIIRGWIFGTTLDARTQSLLIVNNATNVVIKVCEFQFCTDPFLGVYYHNNNKTWVENEFRVYSSANNCTFEYISQPFLMDLEGKQGNFKNLREFVFKNVDGYFKIYSKHTPIDLVRDLPRGFAALEPLVDLPIGINITRFQTLLALHRSYLTPGKLESGWTTGAAAYYVGYLQQRTFLLSYNQNGTITDAVDCSLDPLSETKCTLKSLTVEKGIYQTSNFRVQPTISIVRFPNITNLCPFGEVFNASKFASVYAWNRKRISNCVADYSVLYNSTSFSTFKCYGVSPTKLNDLCFTNVYADSFVVKGDEVRQIAPGQTGVIADYNYKLPDDFTGCVIAWNSVKQDALTGDNYGYLYRLFRKSKLKPFERDISTEIYQAGSTPCNGQVGLNCYYPLERYGFHPTTGVNYQPFRVVVLSFELLNGPATVCGPKLSTTLVKDKCVNFNFNGLTGTGVLTTSKKQFLPFQQFGRDISDTTDAVRDPQTLEILDITPCSFGGVSVITPGTNTSNQVAVLYQDVNCTEVPMAIHAEQLTPAWRVYSAGANVFQTRAGCLVGAEHVNNSYECDIPVGAGICASYHSMSSFRSVNQRSIIAYTMSLGAENSVAYSNNSIAIPTNFTISVTTEILPVSMTKTSVDCTMYICGDSIECSNLLLQYGSFCTQLNRALTGIAVEQDKNTQEVFAQVKQIYKTPPIKDFGGFNFSQILPDPSKPSKRSFIEDLLFNKVTLADAGFIKQYGDCLGDIAARDLICAQKFNGLTVLPPLLTDEMIAQYTSALLAGTITSGWTFGAGAALQIPFAMQMAYRFNGIGVTQNVLYENQKLIANQFNSAIGKIQDSLSSTASALGKLQDVVNQNAQALNTLVKQLSSNFGAISSVLNDILSRLDKVEAEVQIDRLITGRLQSLQTYVTQQLIRAAEIRASANLAATKMSECVLGQSKRVDFCGKGYHLMSFPQSAPHGVVFLHVTYVPAQEKNFTTAPAICHEGKAHFPREGVFVSNGTHWFITQRNFYEPQIITTDNTFVSGSCDVVIGIVNNTVYDPLQPELDSGGSGYIPEAPRDGQAYVRKDGEWVLLSTFL

SEQ ID NO: 9720 - protein, 1169 aa, Artificial Sequence
  SARS-CoV-2/pangolin/Guangxi/P1E/2017__EPI_ISL_410539 spike protein (1-1139) Foldon construct
MFVFLFVLPLVSSQCVNLTTRTGIQPGYTNSSTRGVYYPDKVFRSSILHLTQDLFLPFFSNVTWFNTINYQGGFKKFDNPVLPFNDGVYFASTEKSNIIRGWIFGTTLDARTQSLLIVNNATNVVIKVCEFQFCTDPFLGVYYHNNNKTWVENEFRVYSSANNCTFEYISQPFLMDLEGKQGNFKNLREFVFKNVDGYFKIYSKHTPIDLVRDLPRGFAALEPLVDLPIGINITRFQTLLALHRSYLTPGKLESGWTTGAAAYYVGYLQQRTFLLSYNQNGTITDAVDCSLDPLSETKCTLKSLTVEKGIYQTSNFRVQPTISIVRFPNITNLCPFGEVFNASKFASVYAWNRKRISNCVADYSVLYNSTSFSTFKCYGVSPTKLNDLCFTNVYADSFVVKGDEVRQIAPGQTGVIADYNYKLPDDFTGCVIAWNSVKQDALTGGNYLYRLFRKSKLKPFERDISTEIYQAGSTPCNGQVGLNCYYPLERYGFHPTTGVNYQPFRVVVLSFELLNGPATVCGPKLSTTLVKDKCVNFNFNGLTGTGVLTTSKKQFLPFQQFGRDISDTTDAVRDPQTLEILDITPCSFGGVSVITPGTNTSNQVAVLYQDVNCTEVPMAIHAEQLTPAWRVYSAGANVFQTRAGCLVGAEHVNNSYECDIPVGAGICASYHSMSSLRSVNQRSIIAYTMSLGAENSVAYSNNSIAIPTNFTISVTTEILPVSMTKTSVDCTMYICGDSIECSNLLLQYGSFCTQLNRALTGIAVEQDKNTQEVFAQVKQIYKTPPIKDFGGFNFSQILPDPSKPSKRSFIEDLLFNKVTLADAGFIKQYGDCLGDIAARDLICAQKFNGLTVLPPLLTDEMIAQYTSALLAGTITSGWTFGAGAALQIPFAMQMAYRFNGIGVTQNVLYENQKLIANQFNSAIGKIQDSLSSTASALGKLQDVVNQNAQALNTLVKQLSSNFGAISSVLNDILSRLDKVEAEVQIDRLITGRLQSLQTYVTQQLIRAAEIRASANLAATKMSECVLGQSKRVDFCGKGYHLMSFPQSAPHGVVFLHVTYVPAQEKNFTTAPAICHEGKAHFPREGVFVSNGTHWFITQRNFYEPQIITTDNTFVSGSCDVVIGIVNNTVYDPLQPELDSGGSGYIPEAPRDGQAYVRKDGEWVLLSTFL

SEQ ID NO: 9721 - protein, 1177 aa, Artificial Sequence
  SARS-CoV-2/Wuhan/WIV05/2019__EPI_ISL_402128 spike protein (1-1147)(K986P_V987P) Foldon construct
MFVFLVLLPLVSSQCVNLTTRTQLPPAYTNSFTRGVYYPDKVFRSSVLHSTQDLFLPFFSNVTWFHAIHVSGTNGTKRFDNPVLPFNDGVYFASTEKSNIIRGWIFGTTLDSKTQSLLIVNNATNVVIKVCEFQFCNDPFLGVYYHKNNKSWMESEFRVYSSANNCTFEYVSQPFLMDLEGKQGNFKNLREFVFKNIDGYFKIYSKHTPINLVRDLPQGFSALEPLVDLPIGINITRFQTLLALHRSYLTPGDSSSGWTAGAAAYYVGYLQPRTFLLKYNENGTITDAVDCALDPLSETKCTLKSFTVEKGIYQTSNFRVQPTESIVRFPNITNLCPFGEVFNATRFASVYAWNRKRISNCVADYSVLYNSASFSTFKCYGVSPTKLNDLCFTNVYADSFVIRGDEVRQIAPGQTGKIADYNYKLPDDFTGCVIAWNSNNLDSKVGGNYNYLYRLFRKSNLKPFERDISTEIYQAGSTPCNGVEGFNCYFPLQSYGFQPTNGVGYQPYRVVVLSFELLHAPATVCGPKKSTNLVKNKCVNFNFNGLTGTGVLTESNKKFLPFQQFGRDIADTTDAVRDPQTLEILDITPCSFGGVSVITPGTNTSNQVAVLYQDVNCTEVPVAIHADQLTPTWRVYSTGSNVFQTRAGCLIGAEHVNNSYECDIPIGAGICASYQTQTNSPRRARSVASQSIIAYTMSLGAENSVAYSNNSIAIPTNFTISVTTEILPVSMTKTSVDCTMYICGDSTECSNLLLQYGSFCTQLNRALTGIAVEQDKNTQEVFAQVKQIYKTPPIKDFGGFNFSQILPDPSKPSKRSFIEDLLFNKVTLADAGFIKQYGDCLGDIAARDLICAQKFNGLTVLPPLLTDEMIAQYTSALLAGTITSGWTFGAGAALQIPFAMQMAYRFNGIGVTQNVLYENQKLIANQFNSAIGKIQDSLSSTASALGKLQDVVNQNAQALNTLVKQLSSNFGAISSVLNDILSRLDPPEAEVQIDRLITGRLQSLQTYVTQQLIRAAEIRASANLAATKMSECVLGQSKRVDFCGKGYHLMSFPQSAPHGVVFLHVTYVPAQEKNFTTAPAICHDGKAHFPREGVFVSNGTHWFVTQRNFYEPQIITTDNTFVSGNCDVVIGIVNNTVYDPLQPELDSGGSGYIPEAPRDGQAYVRKDGEWVLLSTFL

SEQ ID NO: 9722 - protein, 1173 aa, Artificial Sequence
  SARS-CoV-2/bat/Yunnan/RaTG13/2013__EPI_ISL_402131 spike protein (1-1143)(K982P_V983P) Foldon construct
MFVFLVLLPLVSSQCVNLTTRTQLPPAYTNSSTRGVYYPDKVFRSSVLHLTQDLFLPFFSNVTWFHAIHVSGTNGIKRFDNPVLPFNDGVYFASTEKSNIIRGWIFGTTLDSKTQSLLIVNNATNVVIKVCEFQFCNDPFLGVYYHKNNKSWMESEFRVYSSANNCTFEYVSQPFLMDLEGKQGNFKNLREFVFKNIDGYFKIYSKHTPINLVRDLPPGFSALEPLVDLPIGINITRFQTLLALHRSYLTPGDSSSGWTAGAAAYYVGYLQPRTFLLKYNENGTITDAVDCALDPLSETKCTLKSFTVEKGIYQTSNFRVQPTDSIVRFPNITNLCPFGEVFNATTFASVYAWNRKRISNCVADYSVLYNSTSFSTFKCYGVSPTKLNDLCFTNVYADSFVITGDEVRQIAPGQTGKIADYNYKLPDDFTGCVIAWNSKHIDAKEGGNFNYLYRLFRKANLKPFERDISTEIYQAGSKPCNGQTGLNCYYPLYRYGFYPTDGVGHQPYRVVVLSFELLNAPATVCGPKKSTNLVKNKCVNFNFNGLTGTGVLTESNKKFLPFQQFGRDIADTTDAVRDPQTLEILDITPCSFGGVSVITPGTNASNQVAVLYQDVNCTEVPVAIHADQLTPTWRVYSTGSNVFQTRAGCLIGAEHVNNSYECDIPIGAGICASYQTQTNSRSVASQSIIAYTMSLGAENSVAYSNNSIAIPTNFTISVTTEILPVSMTKTSVDCTMYICGDSTECSNLLLQYGSFCTQLNRALTGIAVEQDKNTQEVFAQVKQIYKTPPIKDFGGFNFSQILPDPSKPSKRSFIEDLLFNKVTLADAGFIKQYGDCLGDIAARDLICAQKFNGLTVLPPLLTDEMIAQYTSALLAGTITSGWTFGAGAALQIPFAMQMAYRFNGIGVTQNVLYENQKLIANQFNSAIGKIQDSLSSTASALGKLQDVVNQNAQALNTLVKQLSSNFGAISSVLNDILSRLDPPEAEVQIDRLITGRLQSLQTYVTQQLIRAAEIRASANLAATKMSECVLGQSKRVDFCGKGYHLMSFPQSAPHGVVFLHVTYVPAQEKNFTTAPAICHDGKAHFPREGVFVSNGTHWFVTQRNFYEPQIITTDNTFVSGSCDVVIGIVNNTVYDPLQPELDSGGSGYIPEAPRDGQAYVRKDGEWVLLSTFL

SEQ ID NO: 9723 - protein, 1177 aa, Artificial Sequence
  SARS-CoV-2/Wuhan/HBCDC-HB-01/2019__EPI_ISL_402132 spike protein (1-1147)(K986P_V987P) Foldon construct
MFVFLVLLPLVSSQCVNLTTRTQLPPAYTNSITRGVYYPDKVFRSSVLHSTQDLFLPFFSNVTWFHAIHVSGTNGTKRFDNPVLPFNDGVYFASTEKSNIIRGWIFGTTLDSKTQSLLIVNNATNVVIKVCEFQFCNDPFLGVYYHKNNKSWMESEFRVYSSANNCTFEYVSQPFLMDLEGKQGNFKNLREFVFKNIDGYFKIYSKHTPINLVRDLPQGFSALEPLVDLPIGINITRFQTLLALHRSYLTPGDSSSGWTAGAAAYYVGYLQPRTFLLKYNENGTITDAVDCALDPLSETKCTLKSFTVEKGIYQTSNFRVQPTESIVRFPNITNLCPFGEVFNATRFASVYAWNRKRISNCVADYSVLYNSASFSTFKCYGVSPTKLNDLCFTNVYADSFVIRGDEVRQIAPGQTGKIADYNYKLPDDFTGCVIAWNSNNLDSKVGGNYNYLYRLFRKSNLKPFERDISTEIYQAGSTPCNGVEGFNCYFPLQSYGFQPTNGVGYQPYRVVVLSFELLHAPATVCGPKKSTNLVKNKCVNFNFNGLTGTGVLTESNKKFLPFQQFGRDIADTTDAVRDPQTLEILDITPCSFGGVSVITPGTNTSNQVAVLYQDVNCTEVPVAIHADQLTPTWRVYSTGSNVFQTRAGCLIGAEHVNNSYECDIPIGAGICASYQTQTNSPRRARSVASQSIIAYTMSLGAENSVAYSNNSIAIPTNFTISVTTEILPVSMTKTSVDCTMYICGDSTECSNLLLQYGSFCTQLNRALTGIAVEQDKNTQEVFAQVKQIYKTPPIKDFGGFNFSQILPDPSKPSKRSFIEDLLFNKVTLADAGFIKQYGDCLGDIAARDLICAQKFNGLTVLPPLLTDEMIAQYTSALLAGTITSGWTFGAGAALQIPFAMQMAYRFNGIGVTQNVLYENQKLIANQFNSAIGKIQDSLSSTASALGKLQDVVNQNAQALNTLVKQLSSNFGAISSVLNDILSRLDPPEAEVQIDRLITGRLQSLQTYVTQQLIRAAEIRASANLAATKMSECVLGQSKRVDFCGKGYHLMSFPQSAPHGVVFLHVTYVPAQEKNFTTAPAICHDGKAHFPREGVFVSNGTHWFVTQRNFYEPQIITTDNTFVSGNCDVVIGIVNNTVYDPLQPELDSGGSGYIPEAPRDGQAYVRKDGEWVLLSTFL

SEQ ID NO: 9724 - protein, 1177 aa, Artificial Sequence
  SARS-CoV-2/Guangdong/20SF028/2020__EPI_ISL_403936 spike protein (1-1147)(K986P_V987P) Foldon construct
MFVFLVLLPLVSSQCVNLTTRTQLPPAYTNSFTRGVYYPDKVFRSSVLYSTQDLFLPFFSNVTWFHAIHVSGTNGTKRFDNPVLPFNDGVYFASTEKSNIIRGWIFGTTLDSKTQSLLIVNNATNVVIKVCEFQFCNDPFLGVYYHKNNKSWMESEFRVYSSANNCTFEYVSQPFLMDLEGKQGNFKNLREFVFKNIDGYFKIYSKHTPINLVRDLPQGFSALEPLVDLPIGINITRFQTLLALHRSYLTPGDSSSGWTAGAAAYYVGYLQPRTFLLKYNENGTITDAVDCALDPLSETKCTLKSFTVEKGIYQTSNFRVQPTESIVRFPNITNLCPFGEVFNATRFASVYAWNRKRISNCVADYSVLYNSASFSTFKCYGVSPTKLNDLCFTNVYADSFVIRGDEVRQIAPGQTGKIADYNYKLPDDFTGCVIAWNSNNLDSKVGGNYNYLYRLFRKSNLKPFERDISTEIYQAGSTPCNGVEGFNCYFPLQSYGFQPTNGVGYQPYRVVVLSFELLHAPATVCGPKKSTNLVKNKCVNFNFNGLTGTGVLTESNKKFLPFQQFGRDIADTTDAVRDPQTLEILDITPCSFGGVSVITPGTNTSNQVAVLYQDVNCTEVPVAIHADQLTPTWRVYSTGSNVFQTRAGCLIGAEHVNNSYECDIPIGAGICASYQTQTNSPRRARSVASQSIIAYTMSLGAENSVAYSNNSIAIPTNFTISVTTEILPVSMTKTSVDCTMYICGDSTECSNLLLQYGSFCTQLNRALTGIAVEQDKNTQEVFAQVKQIYKTPPIKDFGGFNFSQILPDPSKPSKRSFIEDLLFNKVTLADAGFIKQYGDCLGDIAARDLICAQKFNGLTVLPPLLTDEMIAQYTSALLAGTITSGWTFGAGAALQIPFAMQMAYRFNGIGVTQNVLYENQKLIANQFNSAIGKIQDSLSSTASALGKLQDVVNQNAQALNTLVKQLSSNFGAISSVLNDILSRLDPPEAEVQIDRLITGRLQSLQTYVTQQLIRAAEIRASANLAATKMSECVLGQSKRVDFCGKGYHLMSFPQSAPHGVVFLHVTYVPAQEKNFTTAPAICHDGKAHFPREGVFVSNGTHWFVTQRNFYEPQIITTDNTFVSGNCDVVIGIVNNTVYDPLQPELDSGGSGYIPEAPRDGQAYVRKDGEWVLLSTFL

SEQ ID NO: 9725 - protein, 1177 aa, Artificial Sequence
  SARS-CoV-2/Shenzhen/SZTH-001/2020__EPI_ISL_406592 spike protein (1-1147)(K986P_V987P) Foldon construct
MFVFLVLLPLVSSQCVNLTTRTQLPPAYTNSFTRGVYYPDKVFRSSVLHSTQDLFLPFFSNVTWFHAIHVSGTNGTKRFDNPVLPFNDGVYFASTEKSNIIRGWIFGTTLDSKTQSLLIVNNATNVVIKVCEFQFCNDPFLGVYYHKNNKSWMESEFRVYSSANNCTFEYVSQPFLMDLEGKQGNFKNLREFVFKNIDGYFKIYSKHTPINLVRDLPQGFSALEPLVDLPIGINITRFQTLLALHRSYLTPGDSSSGWTAGAAAYYVGYLQPRTFLLKYNENGTITDAVDCALDPLSETKCTLKSFTVEKGIYQTSNFRVQPTESIVRFPNITNLCPFGEVFNATRFASVYAWNRKRISNCVADYSVLYNSASFSTFKCYGVSPTKLNDLCFTNVYADSFVIRGDEVRQIAPGQTGKIADYNYKLPDDFTGCVIAWNSNNLDSKVGGNYNYLYRLFRKSNLKPFERDISTEIYQAGSTPCNGVEGFNCYFPLQSYGFQPTNGVGYQPYRVVVLSFELLHAPATVCGPKKSTNLVKNKCVNFNFNGLTGTGVLTESNKKFLPFQQFGRDIADTTDAVRDPQTLEILDITPCSFGGVSVITPGTNTSNQVAVLYQDVNCTEVPVAIHADQLTPTWRVYSTGSNVFQTRAGCLIGAEHVNNSYECDIPIGAGICASYQTQTNSPRRARSVASQSIIAYTMSLGAENSVAYSNNSIAIPTNFTISVTTEILPVSMTKTSVDCTMYICGDSTECSNLLLQYGSFCTQLNRALTGIAVEQDKNTQEVFAQVKQIYKTPPIKDFGGFNFSQILPDPSKPSKRSFIEDLLFNKVTLADAGFIKQYGDCLGDIAARDLICAQKFNGLTVLPPLLTDEMIAQYTSALLAGTITSGWTFGAGAALQIPFAMQMAYRFNGIGVTQNVLYENQKLIANQFNSAIGKIQDSLSSTASALGKLQDVVNQNAQALNTLVKQLSSNFGAISSVLNDILSRLDPPEAEVQIDRLITGRLQSLQTYVTQQLIRAAEIRASANLAATKMSECVLGQSKRVDFCGKGYHLMSFPQSAPHGVVFLHVTYVPAQEKNFTTAPAICHDGKAHFPREGVFVSNGTHWFVTQRNFYEPQIITTDNTFVSGNCDVLIGIVNNTVYDPLQPELDSGGSGYIPEAPRDGQAYVRKDGEWVLLSTFL

SEQ ID NO: 9726 - protein, 1177 aa, Artificial Sequence
  SARS-CoV-2/Shenzhen/SZTH-004/2020__EPI_ISL_406595 spike protein (1-1147)(K986P_V987P) Foldon construct
MFVFLVLLPLVSSQCVNLTTRTQLPPAYTNSFTRGVYYPDKVFRSSVLHSTQDLFLPFFSNVTWFHAIHVSGTNGTKRFDNPVLPFNDGVYFASTEKSNIIRGWIFGTTLDSKTQSLLIVNNATNVVIKVCEFQFCNDPFLGVYYHKNNKSWMESEFRVYSSANNCTFEYVSQPFLMDLEGKQGNFKNLREFVFKNIDGYFKIYSKHTPINLVRDLPQGFSALEPLVDLPIGINITRFQTLLALHRSYLTPGDSSSGWTAGAAAYYVGYLQPRTFLLKYNENGTITDAVDCALDPLSETKCTLKSFTVEKGIYQTSNFRVQPTESIVRFPNITNLCPFGEVFNATRFASVYAWDRKRISNCVAYYSVLYNSASFSTFKCYGVSPTKLNDLCFTNVYADSFVIRGDEVRQIAPGQTGKIADYNYKLPDDFTGCVIAWNSNNLDSKVGGNYNYLYRLFRKSNLKPFERDISTEIYQAGSTPCNGVEGFNCYFPLQSYGFQPTNGVGYQPYRVVVLSFELLHAPATVCGPKKSTNLVKNKCVNFNFNGLTGTGVLTESNKKFLPFQQFGRDIADTTDAVRDPQTLEILDITPCSFGGVSVITPGTNTSNQVAVLYQDVNCTEVPVAIHADQLTPTWRVYSTGSNVFQTRAGCLIGAEHVNNSYECDIPIGAGICASYQTQTNSPRRARSVASQSIIAYTMSLGAENSVAYSNNSIAIPTNFTISVTTEILPVSMTKTSVDCTMYICGDSTECSNLLLQYGSFCTQLNRALTGIAVEQDKNTQEVFAQVKQIYKTPPIKDFGGFNFSQILPDPSKPSKRSFIEDLLFNKVTLADAGFIKQYGDCLGDIAARDLICAQKFNGLTVLPPLLTDEMIAQYTSALLAGTITSGWTFGAGAALQIPFAMQMAYRFNGIGVTQNVLYENQKLIANQFNSAIGKIQDSLSSTASALGKLQDVVNQNAQALNTLVKQLSSNFGAISSVLNDILSRLDPPEAEVQIDRLITGRLQSLQTYVTQQLIRAAEIRASANLAATKMSECVLGQSKRVDFCGKGYHLMSFPQSAPHGVVFLHVTYVPAQEKNFTTAPAICHDGKAHFPREGVFVSNGTHWFVTQRNFYEPQIITTDNTFVSGNCDVVIGIVNNTVYDPLQPELDSGGSGYIPEAPRDGQAYVRKDGEWVLLSTFL

SEQ ID NO: 9727 - protein, 1177 aa, Artificial Sequence
  SARS-CoV-2/France/IDF0372/2020__EPI_ISL_406596 spike protein (1-1147)(K986P_V987P) Foldon construct
MFVFLVLLPLVSSQCVNLTTRTQLPPAYTNSFTRGVYYPDKVFRSSVLHSTQDLFLPFFSNVTWFHAIHVSGTNGTKRFDNPVLPFNDGVYFASTEKSNIIRGWIFGTTLDSKTQSLLIVNNATNVVIKVCEFQFCNDPFLGVYYHKNNKSWMESEFRVYSSANNCTFEYVSQPFLMDLEGKQGNFKNLREFVFKNIDGYFKIYSKHTPINLVRDLPQGFSALEPLVDLPIGINITRFQTLLALHRSYLTPGDSSSGWTAGAAAYYVGYLQPRTFLLKYNENGTITDAVDCALDPLSETKCTLKSFTVEKGIYQTSNFRVQPTESIVRFPNITNLCPFGEVFNATRFASVYAWNRKRISNCVADYSFLYNSASFSTFKCYGVSPTKLNDLCFTNVYADSFVIRGDEVRQIAPGQTGKIADYNYKLPDDFTGCVIAWNSNNLDSKVGGNYNYLYRLFRKSNLKPFERDISTEIYQAGSTPCNGVEGFNCYFPLQSYGFQPTNGVGYQPYRVVVLSFELLHAPATVCGPKKSTNLVKNKCVNFNFNGLTGTGVLTESNKKFLPFQQFGRDIADTTDAVRDPQTLEILDITPCSFGGVSVITPGTNTSNQVAVLYQDVNCTEVPVAIHADQLTPTWRVYSTGSNVFQTRAGCLIGAEHVNNSYECDIPIGAGICASYQTQTNSPRRARSVASQSIIAYTMSLGAENSVAYSNNSIAIPTNFTISVTTEILPVSMTKTSVDCTMYICGDSTECSNLLLQYGSFCTQLNRALTGIAVEQDKNTQEVFAQVKQIYKTPPIKDFGGFNFSQILPDPSKPSKRSFIEDLLFNKVTLADAGFIKQYGDCLGDIAARDLICAQKFNGLTVLPPLLTDEMIAQYTSALLAGTITSGWTFGAGAALQIPFAMQMAYRFNGIGVTQNVLYENQKLIANQFNSAIGKIQDSLSSTASALGKLQDVVNQNAQALNTLVKQLSSNFGAISSVLNDILSRLDPPEAEVQIDRLITGRLQSLQTYVTQQLIRAAEIRASANLAATKMSECVLGQSKRVDFCGKGYHLMSFPQSAPHGVVFLHVTYVPAQEKNFTTAPAICHDGKAHFPREGVFVSNGTHWFVTQRNFYEPQIITTDNTFVSGNCDVVIGIVNNTVYDPLQPELDSGGSGYIPEAPRDGQAYVRKDGEWVLLSTFL

SEQ ID NO: 9728 - protein, 1177 aa, Artificial Sequence
  SARS-CoV-2/Australia/VIC01/2020__EPI_ISL_406844 spike protein (1-1147)(K986P_V987P) Foldon construct
MFVFLVLLPLVSSQCVNLTTRTQLPPAYTNSFTRGVYYPDKVFRSSVLHSTQDLFLPFFSNVTWFHAIHVSGTNGTKRFDNPVLPFNDGVYFASTEKSNIIRGWIFGTTLDSKTQSLLIVNNATNVVIKVCEFQFCNDPFLGVYYHKNNKSWMESEFRVYSSANNCTFEYVSQPFLMDLEGKQGNFKNLREFVFKNIDGYFKIYSKHTPINLVRDLPQGFSALEPLVDLPIGINITRFQTLLALHRRYLTPGDSSSGWTAGAAAYYVGYLQPRTFLLKYNENGTITDAVDCALDPLSETKCTLKSFTVEKGIYQTSNFRVQPTESIVRFPNITNLCPFGEVFNATRFASVYAWNRKRISNCVADYSVLYNSASFSTFKCYGVSPTKLNDLCFTNVYADSFVIRGDEVRQIAPGQTGKIADYNYKLPDDFTGCVIAWNSNNLDSKVGGNYNYLYRLFRKSNLKPFERDISTEIYQAGSTPCNGVEGFNCYFPLQSYGFQPTNGVGYQPYRVVVLSFELLHAPATVCGPKKSTNLVKNKCVNFNFNGLTGTGVLTESNKKFLPFQQFGRDIADTTDAVRDPQTLEILDITPCSFGGVSVITPGTNTSNQVAVLYQDVNCTEVPVAIHADQLTPTWRVYSTGSNVFQTRAGCLIGAEHVNNSYECDIPIGAGICASYQTQTNSPRRARSVASQSIIAYTMSLGAENSVAYSNNSIAIPTNFTISVTTEILPVSMTKTSVDCTMYICGDSTECSNLLLQYGSFCTQLNRALTGIAVEQDKNTQEVFAQVKQIYKTPPIKDFGGFNFSQILPDPSKPSKRSFIEDLLFNKVTLADAGFIKQYGDCLGDIAARDLICAQKFNGLTVLPPLLTDEMIAQYTSALLAGTITSGWTFGAGAALQIPFAMQMAYRFNGIGVTQNVLYENQKLIANQFNSAIGKIQDSLSSTASALGKLQDVVNQNAQALNTLVKQLSSNFGAISSVLNDILSRLDPPEAEVQIDRLITGRLQSLQTYVTQQLIRAAEIRASANLAATKMSECVLGQSKRVDFCGKGYHLMSFPQSAPHGVVFLHVTYVPAQEKNFTTAPAICHDGKAHFPREGVFVSNGTHWFVTQRNFYEPQIITTDNTFVSGNCDVVIGIVNNTVYDPLQPELDSGGSGYIPEAPRDGQAYVRKDGEWVLLSTFL

SEQ ID NO: 9729 - protein, 1177 aa, Artificial Sequence
  SARS-CoV-2/Germany/BavPat1/2020__EPI_ISL_406862 spike protein (1-1147)(K986P_V987P) Foldon construct
MFVFLVLLPLVSSQCVNLTTRTQLPPAYTNSFTRGVYYPDKVFRSSVLHSTQDLFLPFFSNVTWFHAIHVSGTNGTKRFDNPVLPFNDGVYFASTEKSNIIRGWIFGTTLDSKTQSLLIVNNATNVVIKVCEFQFCNDPFLGVYYHKNNKSWMESEFRVYSSANNCTFEYVSQPFLMDLEGKQGNFKNLREFVFKNIDGYFKIYSKHTPINLVRDLPQGFSALEPLVDLPIGINITRFQTLLALHRSYLTPGDSSSGWTAGAAAYYVGYLQPRTFLLKYNENGTITDAVDCALDPLSETKCTLKSFTVEKGIYQTSNFRVQPTESIVRFPNITNLCPFGEVFNATRFASVYAWNRKRISNCVADYSVLYNSASFSTFKCYGVSPTKLNDLCFTNVYADSFVIRGDEVRQIAPGQTGKIADYNYKLPDDFTGCVIAWNSNNLDSKVGGNYNYLYRLFRKSNLKPFERDISTEIYQAGSTPCNGVEGFNCYFPLQSYGFQPTNGVGYQPYRVVVLSFELLHAPATVCGPKKSTNLVKNKCVNFNFNGLTGTGVLTESNKKFLPFQQFGRDIADTTDAVRDPQTLEILDITPCSFGGVSVITPGTNTSNQVAVLYQGVNCTEVPVAIHADQLTPTWRVYSTGSNVFQTRAGCLIGAEHVNNSYECDIPIGAGICASYQTQTNSPRRARSVASQSIIAYTMSLGAENSVAYSNNSIAIPTNFTISVTTEILPVSMTKTSVDCTMYICGDSTECSNLLLQYGSFCTQLNRALTGIAVEQDKNTQEVFAQVKQIYKTPPIKDFGGFNFSQILPDPSKPSKRSFIEDLLFNKVTLADAGFIKQYGDCLGDIAARDLICAQKFNGLTVLPPLLTDEMIAQYTSALLAGTITSGWTFGAGAALQIPFAMQMAYRFNGIGVTQNVLYENQKLIANQFNSAIGKIQDSLSSTASALGKLQDVVNQNAQALNTLVKQLSSNFGAISSVLNDILSRLDPPEAEVQIDRLITGRLQSLQTYVTQQLIRAAEIRASANLAATKMSECVLGQSKRVDFCGKGYHLMSFPQSAPHGVVFLHVTYVPAQEKNFTTAPAICHDGKAHFPREGVFVSNGTHWFVTQRNFYEPQIITTDNTFVSGNCDVVIGIVNNTVYDPLQPELDSGGSGYIPEAPRDGQAYVRKDGEWVLLSTFL

SEQ ID NO: 9730 - protein, 1177 aa, Artificial Sequence
  SARS-CoV-2/Wuhan/HBCDC-HB-02/2020__EPI_ISL_412978 spike protein (1-1147)(K986P_V987P) Foldon construct
MFVFLVLLPLVSSQCVNLTTRTQLPPAYTNSFTRGVYYPDKVFRSSVLHSTQDLFLPFFSNVTWFHAIHVSGTNGTKRFDNPVLPFNDGVYFASTEKSNIIRGWIFGTTLDSKTQSLLIVNNATNVVIKVCEFQFCNDPFLGVYYHKNNKSWMESEFRVYSSANNCTFEYVSQPFLMDLEGKQGNFKNLREFVFKNIDGYFKIYSKHTPINLVRDLPQGFSALEPLVDLPIGINITRFQTLLALHRSYLTPGDSSSGWTAGAAAYYVGYLQPRTFLLKYNENGTITDAVDCALDPLSETKCTLKSFTVEKGIYQTSNFRVQPTESIVRFPNITNLCPFGEVFNATRFASVYAWNRKRISNCVADYSVLYNSASFSTFKCYGVSPTKLNDLCFTNVYADSFVIRGDEVRQIAPGQTGKIADYNYKLPDDFTGCVIAWNSNNLDSKVGGNYNYLYRLFRKSNLKPFERDISTEIYQAGSTPCNGVEGFNCYFPLQSYGFQPTNGVGYQPYRVVVLSFELLHAPATVCGPKKSTNLVKNKCVNFNFNGLTGTGVLTESNKKFLPFQQFGRDIADTTDAVRDPQTLEILDITPCSFGGVSVITPGTNTSNQVAVLYQDVNCTEVPVAIHADQLTPTWRVYSTGSNVFQTRAGCLIGAEHVNNSYECDIPIGAGICASYQTQTNSPRRARSVASQSIIAYTMSLGAENSVAYSNNSIAIPTNFTISVTTEILPVSMTKTSVDCTMYICGDSTECSNFLLQYGSFCTQLNRALTGIAVEQDKNTQEVFAQVKQIYKTPPIKDFGGFNFSQILPDPSKPSKRSFIEDLLFNKVTLADAGFIKQYGDCLGDIAARDLICAQKFNGLTVLPPLLTDEMIAQYTSALLAGTITSGWTFGAGAALQIPFAMQMAYRFNGIGVTQNVLYENQKLIANQFNSAIGKIQDSLSSTASALGKLQDVVNQNAQALNTLVKQLSSNFGAISSVLNDILSRLDPPEAEVQIDRLITGRLQSLQTYVTQQLIRAAEIRASANLAATKMSECVLGQSKRVDFCGKGYHLMSFPQSAPHGVVFLHVTYVPAQEKNFTTAPAICHDGKAHFPREGVFVSNGTHWFVTQRNFYEPQIITTDNTFVSGNCDVVIGIVNNTVYDPLQPELDSGGSGYIPEAPRDGQAYVRKDGEWVLLSTFL

SEQ ID NO: 9731 - protein, 1177 aa, Artificial Sequence
  SARS-CoV-2/Australia/QLD02/2020__EPI_ISL_407896 spike protein (1-1147)(K986P_V987P) Foldon construct
MFVFLVLLPLVSSQCVNLTTRTQLPPAYTNSFTRGVYYPDKVFRSSVLHSTQDLFLPFFSNVTWFHAIHVSGTNGTKRFDNPVLPFNDGVYFASTEKSNIIRGWIFGTTLDSKTQSLLIVNNATNVVIKVCEFQFCNDPFLGVYYHKNNKSWMESEFRVYSSANNCTFEYVSQPFLMDLEGKQGNFKNLREFVFKNIDGYFKIYSKHTPINLVRDLPQGFSALEPLVDLPIGINITRFQTLLALHRSYLTPGDSSSGWTAGAAAYYVGYLQPRTFLLKYNENGTITDAVDCALDPLSETKCTLKSFTVEKGIYQTSNFRVQPTESIVRFPNITNLCPFGEVFNATRFASVYAWNRKRISNCVADYSVLYNSASFSTFKCYGVSPTKLNDLCFTNVYADSFVIRGDEVRQIAPGQTGKIADYNYKLPDDFTGCVIAWNSNNLDSKVGGNYNYLYRLFRKSNLKPFERDISTEIYQAGSTPCNGVEGFNCYFPLQSYGFQPTNGVGYQPYRVVVLSFELLHAPATVCGPKKSTNLVKNKCVNFNFNGLTGTGVLTESNKKFLPFQQFGRDIADTTDAVRDPQTLEILDITPCSFGGVSVITPGTNTSNQVAVLYQDVNCTEVPVAIHADQLTPTWRVYSTGSNVFQTRAGCLIGAEHVNNSYECDIPIGAGICASYQTQTNSPRRARSVASQSIIAYTMSLGAENSVAYSNNSIAIPTNFTISVTTEILPVSMTKTSVDCTMYICGDSTECSNLLLQYGSFCTQLNRALTGIAVEQDKNTQEVFAQVKQIYKTPPIKDFGGFNFSQILPDPSKPSKRSFIEDLLFNKVTLADAGFIKQYGDCLGDIAARDLICAQKFNGLTVLPPLLTDEMIAQYTSALLAGTITSGWTFGAGAALQIPFAMQMAYRFNGIGVTQNVLYENQKLIANQFNSAIGKIQDSLSSTASALGKLQDVVNQNAQALNTLVKQLSSNFGAISSVLNDILSRLDPPEAEVQIDRLITGRLQSLQTYVTQQLIRAAEIRASANLAATKMSECVLGQSKRVDFCGKGYHLMSFPQSAPHGVVFLHVTYVPAQEKNFTTAPAICHDGKAHFPREGVFVSNGTHWFVTQRNFYEPQIITTDNTFVSGNCDVVIGIVNNTVYDPLQLELDSGGSGYIPEAPRDGQAYVRKDGEWVLLSTFL

SEQ ID NO: 9732 - protein, 1177 aa, Artificial Sequence
  SARS-CoV-2/India/1-31/2020__EPI_ISL_413523 spike protein (1-1147)(K986P_V987P) Foldon construct
MFVFLVLLPLVSSQCVNLTTRTQLPPAYTNSFTRGVYYPDKVFRSSVLHSTQDLFLPFFSNVTWFHAIHVSGTNGTKRFDNPVLPFNDGVYFASTEKSNIIRGWIFGTTLDSKTQSLLIVNNATNVVIKVCEFQFCNDPFLGVYYHKNNKSWMESEFRVYSSANNCTFEYVSQPFLMDLEGKQGNFKNLREFVFKNIDGYFKIYSKHTPINLVRDLPQGFSALEPLVDLPIGINITRFQTLLALHRSYLTPGDSSSGWTAGAAAYYVGYLQPRTFLLKYNENGTITDAVDCALDPLSETKCTLKSFTVEKGIYQTSNFRVQPTESIVRFPNITNLCPFGEVFNATRFASVYAWNRKRISNCVADYSVLYNSASFSTFKCYGVSPTKLNDLCFTNVYADSFVIRGDEVRQIAPGQTGKIADYNYKLPDDFTGCVIAWNSNNLDSKVGGNYNYLYRLFRKSNLKPFERDISTEIYQAGSTPCNGVEGFNCYFPLQSYGFQPTNGVGYQPYRVVVLSFELLHAPATVCGPKKSTNLVKNKCVNFNFNGLTGTGVLTESNKKFLPFQQFGRDIADTTDAVRDPQTLEILDITPCSFGGVSVITPGTNTSNQVAVLYQDVNCTEVPVAIHADQLTPTWRVYSTGSNVFQTRAGCLIGAEHVNNSYECDIPIGAGICASYQTQTNSPRRARSVASQSIIAYTMSLGAENSVAYSNNSIAIPTNFTISVTTEILPVSMTKTSVDCTMYICGDSTECSNLLLQYGSFCTQLNRALTGIAVEQDKNTQEVFAQVKQIYKTPPIKDFGGFNFSQILPDPSKPSKRSFIEDLLFNKVTLADAGFIKQYGDCLGDIAARDLICAQKFNGLTVLPPLLTDEMIAQYTSALLAGTITSGWTFGAGAALQIPFAMQMAYRFNGIGVTQNVLYENQKLIANQFNSVIGKIQDSLSSTASALGKLQDVVNQNAQALNTLVKQLSSNFGAISSVLNDILSRLDPPEAEVQIDRLITGRLQSLQTYVTQQLIRAAEIRASANLAATKMSECVLGQSKRVDFCGKGYHLMSFPQSAPHGVVFLHVTYVPAQEKNFTTAPAICHDGKAHFPREGVFVSNGTHWFVTQRNFYEPQIITTDNTFVSGNCDVVIGIVNNTVYDPLQPELDSGGSGYIPEAPRDGQAYVRKDGEWVLLSTFL

SEQ ID NO: 9733 - protein, 1177 aa, Artificial Sequence
  SARS-CoV-2/Guangdong/GD2020087-P0008/2020__EPI_ISL_413863 spike protein (1-1147)(K986P_V987P) Foldon construct
MFVFLVLLPLVSSQCVNLTTRTQLPPAYTNSFTRGVYYPDKVFRSSVLHSTQDLFLPFFSNVTWFHAIHVSGTNGTKRFDNPVLPFNDGVYFASTEKSNIIRGWIFGTTLDSKTQSLLIVNNATNVVIKVCEFQFCNDPFLGVYYHKNNKSWMESEFRVYSSANNCTFEYVSQPFLMDLEGKQGNFKNLREFVFKNIDGYFKIYSKHTPINLVRDLPQGFSALEPLVDLPIGINITRFQTLLALHRSYLTPGDSSSGWTAGAAAYYVGYLQPRTFLLKYNENGTITDAVDCALDPLSETKCTLKSFTVEKGIYQTSNFRVQPTESIVRFPNITNLCPFGEVFNATRFASVYAWNRKRISNCVADYSVLYNSASFSTFKCYGVSPTKLNDLCFTNVYADSFVIRGDEVREIAPGQTGKIADYNYKLPDDFTGCVIAWNSNNLDSKVGGNYNYLYRLFRKSNLKPFERDISTEIYQAGSTPCNGVEGFNCYFPLQSYGFQPTNGVGYQPYRVVVLSFELLHAPATVCGPKKSTNLVKNKCVNFNFNGLTGTGVLTESNKKFLPFQQFGRDIADTTDAVRDPQTLEILDITPCSFGGVSVITPGTNTSNQVAVLYQDVNCTEVPVAIHADQLTPTWRVYSTGSNVFQTRAGCLIGAEHVNNSYECDIPIGAGICASYQTQTNSPRRARSVASQSIIAYTMSLGAENSVAYSNNSIAIPTNFTISVTTEILPVSMTKTSVDCTMYICGDSTECSNLLLQYGSFCTQLNRALTGIAVEQDKNTQEVFAQVKQIYKTPPIKDFGGFNFSQILPDPSKPSKRSFIEDLLFNKVTLADAGFIKQYGDCLGDIAARDLICAQKFNGLTVLPPLLTDEMIAQYTSALLAGTITSGWTFGAGAALQIPFAMQMAYRFNGIGVTQNVLYENQKLIANQFNSAIGKIQDSLSSTASALGKLQDVVNQNAQALNTLVKQLSSNFGAISSVLNDILSRLDPPEAEVQIDRLITGRLQSLQTYVTQQLIRAAEIRASANLAATKMSECVLGQSKRVDFCGKGYHLMSFPQSAPHGVVFLHVTYVPAQEKNFTTAPAICHDGKAHFPREGVFVSNGTHWFVTQRNFYEPQIITTDNTFVSGNCDVVIGIVNNTVYDPLQPELDSGGSGYIPEAPRDGQAYVRKDGEWVLLSTFL

SEQ ID NO: 9734 - protein, 1177 aa, Artificial Sequence
  SARS-CoV-2/Sweden/01/2020__EPI_ISL_411951 spike protein (1-1147)(K986P_V987P) Foldon construct
MFVFLVLLPLVSSQCVNLTTRTQLPPAYTNSFTRGVYYPDKVFRSSVLHSTQDLFLPFFSNVTWFHAIHVSGTNGTKRFDNPVLPFNDGVYFASTEKSNIIRGWIFGTTLDSKTQSLLIVNNATNVVIKVCEFQFCNDPFLGVYYHKNNKSWMESEFRVYSSANNCTFEYVSQPFLMDLEGKQGNFKNLREFVFKNIDGYFKIYSKHTPINLVRDLPQGFSALEPLVDLPIGINITRFQTLLALHRSYLTPGDSSSGWTAGAAAYYVGYLQPRTFLLKYNENGTITDAVDCALDPLSETKCTLKSFTVEKGIYQTSNFRVQPTESIVRFPNITNLCPFGEVFNATRFASVYAWNRKRISNCVADYSVLYNSASFSTFKCYGVSPTKLNDLCFTNVYADSFVIRGDEVRQIAPGQTGKIADYNYKLPDDFTGCVIAWNSNNLDSKVGGNYNYLYRLFRKSNLKPFERDISTEIYQAGSTPCNGVEGFNCYFPLQSYGFQPTNGVGYQPYRVVVLSFELLHAPATVCGPKKSTNLVKNKCVNFNFNGLTGTGVLTESNKKFLPFQQFGRDIADTTDAVRDPQTLEILDITPCSFGGVSVITPGTNTSNQVAVLYQDVNCTEVPVAIHADQLTPTWRVYSTGSNVFQTRAGCLIGAEHVNNSYECDIPIGAGICASYQTQTNSPRRARSVASQSIIAYTMSLGAENSVAYSNNSIAIPTNFTISVTTEILPVSMTKTSVDCTMYICGDSTECSNLLLQYGSFCTQLNRALTGIAVEQDKNTQEVFAQVKQIYKTPPIKDCGGFNFSQILPDPSKPSKRSFIEDLLFNKVTLADAGFIKQYGDCLGDIAARDLICAQKFNGLTVLPPLLTDEMIAQYTSALLAGTITSGWTFGAGAALQIPFAMQMAYRFNGIGVTQNVLYENQKLIANQFNSAIGKIQDSLSSTASALGKLQDVVNQNAQALNTLVKQLSSNFGAISSVLNDILSRLDPPEAEVQIDRLITGRLQSLQTYVTQQLIRAAEIRASANLAATKMSECVLGQSKRVDFCGKGYHLMSFPQSAPHGVVFLHVTYVPAQEKNFTTAPAICHDGKAHFPREGVFVSNGTHWFVTQRNFYEPQIITTDNTFVSGNCDVVIGIVNNTVYDPLQPELDSGGSGYIPEAPRDGQAYVRKDGEWVLLSTFL

SEQ ID NO: 9735 - protein, 1177 aa, Artificial Sequence
  SARS-CoV-2/Tianmen/HBCDC-HB-07/2020__EPI_ISL_412983 spike protein (1-1147)(K986P_V987P) Foldon construct
MFVFLVLLPLVSSQCVNLTTRTQLPPAYTNSFTRGVYYPDKVFRSSVLHSTQDLFLPFFSNVTWFHAIHVSGTNGTKRFDNPVLPFNDGVYFASTEKSNIIRGWIFGTTLDSKTQSLLIVNNATNVVIKVCEFQFCNDPFLGVYYHKNNKSWMESEFRVYSSANNCTFEYVSQPFLMDLEGKQGNFKNLREFVFKNIDGYFKIYSKHTPINLVRDLPQGFSALEPLVDLPIGINITRFQTLLALHRSYLTPGDSSSGWTAGAAAYYVGYLQPRTFLLKYNENGTITDAVDCALDPLSETKCTLKSFTVEKGIYQTSNFRVQPTESIVRFPNITNLCPFGEVFNATRFASVYAWNRKRISNCVADYSVLYNSASFSTFKCYGVSPTKLNDLCFTNVYADSFVIRGDEVRQIAPGQTGKIADYNYKLPDDFTGCVIAWNSNNLDSKVGGNYNYLYRLFRKSNLKPFERDISTEIYQAGSTPCNGVEGFNCYFPLQSYGFQPTNGVGYQPYRVVVLSFELLHAPATVCGPKKSTNLVKNKCVNFNFNGLTGTGVLTESNKKFLPFQQFGRDIADTTDAVRDPQTLEILDITPCSFGGVSVITPGTNTSNQVAVLYQDLNCTEVPVAIHADQLTPTWRVYSTGSNVFQTRAGCLIGAEHVNNSYECDIPIGAGICASYQTQTNSPRRARSVASQSIIAYTMSLGAENSVAYSNNSIAIPTNFTISVTTEILPVSMTKTSVDCTMYICGDSTECSNLLLQYGSFCTQLNRALTGIAVEQDKNTQEVFAQVKQIYKTPPIKDFGGFNFSQILPDPSKPSKRSFIEDLLFNKVTLADAGFIKQYGDCLGDIAARDLICAQKFNGLTVLPPLLTDEMIAQYTSALLAGTITSGWTFGAGAALQIPFAMQMAYRFNGIGVTQNVLYENQKLIANQFNSAIGKIQDSLSSTASALGKLQDVVNQNAQALNTLVKQLSSNFGAISSVLNDILSRLDPPEAEVQIDRLITGRLQSLQTYVTQQLIRAAEIRASANLAATKMSECVLGQSKRVDFCGKGYHLMSFPQSAPHGVVFLHVTYVPAQEKNFTTAPAICHDGKAHFPREGVFVSNGTHWFVTQRNFYEPQIITTDNTFVSGNCDVVIGIVNNTVYDPLQPELDSGGSGYIPEAPRDGQAYVRKDGEWVLLSTFL

SEQ ID NO: 9736 - protein, 1177 aa, Artificial Sequence
  SARS-CoV-2/Hong Kong/case42_VM20002493/2020__EPI_ISL_414527 spike protein (1-1147)(K986P_V987P) Foldon construct
MFVFLVLLPLVSSQCVNLTTRTQLPPAYTNSFTRGVYYPDKVFRSSVLHSTQDLFLPFFSNVTWFHAIHVSGTNGTKRFDNPVLPFNDGVYFASTEKSNIIRGWIFGTTLDSKTQSLLIVNNATNVVIKVCEFQFCNDPFLGVYYHKNNKSWMESEFRVYSSANNCTFEYVSQPFLMDLEGKQGNFKNLREFVFKNIDGYFKIYSKHTPINLVRDLPQGFSALEPLVDLPIGINITRFQTLLALHRSYLTPGDSSSGWTAGAAAYYVGYLQPRTFLLKYNENGTITDAVDCALDPLSETKCTLKSFTVEKGIYQTSNFRVQPTESIVRFPNITNLCPFGEVFNATRFASVYAWNRKRISNCVADYSVLYNSASFSTFKCYGVSPTKLNDLCFTNVYADSFVIRGDEVRQIAPGQTGKIADYNYKLPDDFTGCVIAWNSNNLDSKVGGNYNYLYRLFRKSNLKPFERDISTEIYQAGSTPCNGVEGFNCYFPLQSYGFQPTNGVGYQPYRVVVLSFELLHAPATVCGPKKSTNLVKNKCVNFNFNGLTGTGVLTESNKKFLPFQQFGRDIADTTDAVRDPQTLEILDITPCSFGGVSVITPGTNTSNQVAVLYQDVNCTEVPVAIHADQLTPTWRVYSTGSNVFQTRAGCLIGAEHVNNSYECDIPIGAGICASYQTQTNSPRRARSVASQSIIAYTMSLGAENSVAYSNNSIAIPTNFAISVTTEILPVSMTKTSVDCTMYICGDSTECSNLLLQYGSFCTQLNRALTGIAVEQDKNTQEVFAQVKQIYKTPPIKDFGGFNFSQILPDPSKPSKRSFIEDLLFNKVTLADAGFIKQYGDCLGDIAARDLICAQKFNGLTVLPPLLTDEMIAQYTSALLAGTITSGWTFGAGAALQIPFAMQMAYRFNGIGVTQNVLYENQKLIANQFNSAIGKIQDSLSSTASALGKLQDVVNQNAQALNTLVKQLSSNFGAISSVLNDILSRLDPPEAEVQIDRLITGRLQSLQTYVTQQLIRAAEIRASANLAATKMSECVLGQSKRVDFCGKGYHLMSFPQSAPHGVVFLHVTYVPAQEKNFTTAPAICHDGKAHFPREGVFVSNGTHWFVTQRNFYEPQIITTDNTFVSGNCDVVIGIVNNTVYDPLQPELDSGGSGYIPEAPRDGQAYVRKDGEWVLLSTFL

SEQ ID NO: 9737 - protein, 1177 aa, Artificial Sequence
  SARS-CoV-2/USA/CruiseA-23/2020__EPI_ISL_414482 spike protein (1-1147)(K986P_V987P) Foldon construct
MFVFLVLLPLVSSQCVNLTTRTQLPPAYTNSFTRGVYYPDKVFRSSVLHSTQDLFLPFFSNVTWFHAIHVSGTNGTKRFDNPVLPFNDGVYFASTEKSNIIRGWIFGTTLDSKTQSLLIVNNATNVVIKVCEFQFCNDPFLGVYYHKNNKSWMESEFRVYSSANNCTFEYVSQPFLMDLEVKQGNFKNLREFVFKNIDGYFKIYSKHTPINLVRDLPQGFSALEPLVDLPIGINITRFQTLLALHRSYLTPGDSSSGWTAGAAAYYVGYLQPRTFLLKYNENGTITDAVDCALDPLSETKCTLKSFTVEKGIYQTSNFRVQPTESIVRFPNITNLCPFGEVFNATRFASVYAWNRKRISNCVADYSVLYNSASFSTFKCYGVSPTKLNDLCFTNVYADSFVIRGDEVRQIAPGQTGKIADYNYKLPDDFTGCVIAWNSNNLDSKVGGNYNYLYRLFRKSNLKPFERDISTEIYQAGSTPCNGVEGFNCYFPLQSYGFQPTNGVGYQPYRVVVLSFELLHAPATVCGPKKSTNLVKNKCVNFNFNGLTGTGVLTESNKKFLPFQQFGRDIADTTDAVRDPQTLEILDITPCSFGGVSVITPGTNTSNQVAVLYQDVNCTEVPVAIHADQLTPTWRVYSTGSNVFQTRAGCLIGAEHVNNSYECDIPIGAGICASYQTQTNSPRRARSVASQSIIAYTMSLGAENSVAYSNNSIAIPTNFTISVTTEILPVSMTKTSVDCTMYICGDSTECSNLLLQYGSFCTQLNRALTGIAVEQDKNTQEVFAQVKQIYKTPPIKDFGGFNFSQILPDPSKPSKRSFIEDLLFNKVTLADAGFIKQYGDCLGDIAARDLICAQKFNGLTVLPPLLTDEMIAQYTSALLAGTITSGWTFGAGAALQIPFAMQMAYRFNGIGVTQNVLYENQKLIANQFNSAIGKIQDSLSSTASALGKLQDVVNQNAQALNTLVKQLSSNFGAISSVLNDILSRLDPPEAEVQIDRLITGRLQSLQTYVTQQLIRAAEIRASANLAATKMSECVLGQSKRVDFCGKGYHLMSFPQSAPHGVVFLHVTYVPAQEKNFTTAPAICHDGKAHFPREGVFVSNGTHWFVTQRNFYEPQIITTDNTFVSGNCDVVIGIVNNTVYDPLQPELDSGGSGYIPEAPRDGQAYVRKDGEWVLLSTFL

SEQ ID NO: 9738 - protein, 1177 aa, Artificial Sequence
  SARS-CoV-2/Hong Kong/case85_VM20002868/2020__EPI_ISL_414519 spike protein (1-1147)(K986P_V987P) Foldon construct
MFVFLVLVPLVSSQCVNLTTRTQLPPAYTNSFTRGVYYPDKVFRSSVLHSTQDLFLPFFSNVTWFHAIHVSGTNGTKRFDNPVLPFNDGVYFASTEKSNIIRGWIFGTTLDSKTQSLLIVNNATNVVIKVCEFQFCNDPFLGVYYHKNNKSWMESEFRVYSSANNCTFEYVSQPFLMDLEGKQGNFKNLREFVFKNIDGYFKIYSKHTPINLVRDLPQGFSALEPLVDLPIGINITRFQTLLALHRSYLTPGDSSSGWTAGAAAYYVGYLQPRTFLLKYNENGTITDAVDCALDPLSETKCTLKSFTVEKGIYQTSNFRVQPTESIVRFPNITNLCPFGEVFNATRFASVYAWNRKRISNCVADYSVLYNSASFSTFKCYGVSPTKLNDLCFTNVYADSFVIRGDEVRQIAPGQTGKIADYNYKLPDDFTGCVIAWNSNNLDSKVGGNYNYLYRLFRKSNLKPFERDISTEIYQAGSTPCNGVEGFNCYFPLQSYGFQPTNGVGYQPYRVVVLSFELLHAPATVCGPKKSTNLVKNKCVNFNFNGLTGTGVLTESNKKFLPFQQFGRDIADTTDAVRDPQTLEILDITPCSFGGVSVITPGTNTSNQVAVLYQDVNCTEVPVAIHADQLTPTWRVYSTGSNVFQTRAGCLIGAEHVNNSYECDIPIGAGICASYQTQTNSPRRARSVASQSIIAYTMSLGAENSVAYSNNSIAIPTNFTISVTTEILPVSMTKTSVDCTMYICGDSTECSNLLLQYGSFCTQLNRALTGIAVEQDKNTQEVFAQVKQIYKTPPIKDFGGFNFSQILPDPSKPSKRSFIEDLLFNKVTLADAGFIKQYGDCLGDIAARDLICAQKFNGLTVLPPLLTDEMIAQYTSALLAGTITSGWTFGAGAALQIPFAMQMAYRFNGIGVTQNVLYENQKLIANQFNSAIGKIQDSLSSTASALGKLQDVVNQNAQALNTLVKQLSSNFGAISSVLNDILSRLDPPEAEVQIDRLITGRLQSLQTYVTQQLIRAAEIRASANLAATKMSECVLGQSKRVDFCGKGYHLMSFPQSAPHGVVFLHVTYVPAQEKNFTTAPAICHDGKAHFPREGVFVSNGTHWFVTQRNFYEPQIITTDNTFVSGNCDVVIGIVNNTVYDPLQPELDSGGSGYIPEAPRDGQAYVRKDGEWVLLSTFL

SEQ ID NO: 9739 - protein, 1177 aa, Artificial Sequence; identical to SEQ ID NO: 9729
  SARS-CoV-2/England/200990660/2020__EPI_ISL_414523 spike protein (1-1147)(K986P_V987P) Foldon construct

SEQ ID NO: 9740 - protein, 1177 aa, Artificial Sequence
  SARS-CoV-2/Australia/NSW09/2020__EPI_ISL_413595 spike protein (1-1147)(K986P_V987P) Foldon construct
MFVFLVLLPLVSSQCVNLTTRTQLPPAYTNSFTRGVYYPDKVFRSSVLHSTQDLFLPFFSNVTWFHAIHVSGTNGTKRFDNPVLPFNDGVYFASTEKSNIIRGWIFGTTLDSKTQSLLIVNNATNVVIKVCEFQFCNDPFLGVYYHKNNKSWMESEFRVYSSANNCTFEYVSQPFLMDLEGKQGNFKNLREFVFKNIDGYFKIYSKHTPINLVRDLPQGFSALEPLVDLPIGINITRFQTLLALHRSYLTPGDSSSGWTAGAAAYYVGYLQPRTFLLKYNENGTITDAVDCALDPLSETKCTLKSFTVEKGIYQTSNFRVQPTESIVRFPNITNLCPFGEVFNATRFASVYAWNRKRISNCVADYSVLYNSASFSTFKCYGVSPTKLNDLCFTNVYADSFVIRGDEVRQIAPGQTGKIADYNYKLPDDFTGCVIAWNSNNLDSKVGGNYNYLYRLFRKSNLKPFERDISTEIYQAGSTPCNGVEGFNCYFPLQSYGFQPTNGVGYQPYRVVVLSFELLHAPATVCGPKKSTNLVKNKCVNFNFNGLTGTGVLTESNKKFLPFQQFGRDIADTTDAVRDPQTLEILDITPCSFGGVSVITPGTNTSNQVAVLYQDVNCTEVPVAIHADQLTPTWRVYSTGSNVFQTRAGCLIGAEHVNNSYECDIPIGAGICASYQTQTNSPRRARSVASQSIIAYTMSLGAENSVAYSNNSIAIPTNFTISVTTEILPVSMTKTSVDCTMYICGDSTECSNLLLQYGSFCTQLNRALTGIAVEQDKNTQEVFAQVKQIYKTPPIKDFGGFNFSQILPDPSKPSKRSFIEDLLFNKVTLADAGFIKQYGDCLGDIAARDLICAQKFNGLTVLPPLLTDEMIAQYTSALLAGTITSGWTFGAGAALQIPFAMQMAYRFNGIGVTQNVLYENQKLIANQFNSAIGKIQDSLSFTASALGKLQDVVNQNAQALNTLVKQLSSNFGAISSVLNDILSRLDPPEAEVQIDRLITGRLQSLQTYVTQQLIRAAEIRASANLAATKMSECVLGQSKRVDFCGKGYHLMSFPQSAPHGVVFLHVTYVPAQEKNFTTAPAICHDGKAHFPREGVFVSNGTHWFVTQRNFYEPQIITTDNTFVSGNCDVVIGIVNNTVYDPLQPELDSGGSGYIPEAPRDGQAYVRKDGEWVLLSTFL

SEQ ID NO: 9741 - protein, 1177 aa, Artificial Sequence; identical to SEQ ID NO: 9721
  SARS-CoV-2/Australia/NSW10/2020__EPI_ISL_413596 spike protein (1-1147)(K986P_V987P) Foldon construct

SEQ ID NO: 9742 - protein, 1177 aa, Artificial Sequence
  SARS-CoV-2/Switzerland/1000477797/2020__EPI_ISL_413023 spike protein (1-1147)(K986P_V987P) Foldon construct
MFVFLVLLPLVSSQCVNLTTRTQLPPAYTNSFTRGVYYPDKVFRSSVLHSTQDLFLPFFSNVTWFHAIHVSGTNGTKRFDNPVLPFNDGVYFASTEKSNIIRGWIFGTTLDSKTQSLLIVNNATNVVIKVCEFQFCNDPFLGVYYHKNNKSWMESEFRVYSSANNCTFEYVSQPFLMDLEGKQGNFKNLREFVFKNIDGYFNIYSKHTPINLVRDLPQGFSALEPLVDLPIGINITRFQTLLALHRSYLTPGDSSSGWTAGAAAYYVGYLQPRTFLLKYNENGTITDAVDCALDPLSETKCTLKSFTVEKGIYQTSNFRVQPTESIVRFPNITNLCPFGEVFNATRFASVYAWNRKRISNCVADYSVLYNSASFSTFKCYGVSPTKLNDLCFTNVYADSFVIRGDEVRQIAPGQTGKIADYNYKLPDDFTGCVIAWNSNNLDSKVGGNYNYLYRLFRKSNLKPFERDISTEIYQAGSTPCNGVEGFNCYFPLQSYGFQPTNGVGYQPYRVVVLSFELLHAPATVCGPKKSTNLVKNKCVNFNFNGLTGTGVLTESNKKFLPFQQFGRDIADTTDAVRDPQTLEILDITPCSFGGVSVITPGTNTSNQVAVLYQGVNCTEVPVAIHADQLTPTWRVYSTGSNVFQTRAGCLIGAEHVNNSYECDIPIGAGICASYQTQTNSPRRARSVASQSIIAYTMSLGAENSVAYSNNSIAIPTNFTISVTTEILPVSMTKTSVDCTMYICGDSTECSNLLLQYGSFCTQLNRALTGIAVEQDKNTQEVFAQVKQIYKTPPIKDFGGFNFSQILPDPSKPSKRSFIEDLLFNKVTLADAGFIKQYGDCLGDIAARDLICAQKFNGLTVLPPLLTDEMIAQYTSALLAGTITSGWTFGAGAALQIPFAMQMAYRFNGIGVTQNVLYENQKLIANQFNSAIGKIQDSLSSTASALGKLQDVVNQNAQALNTLVKQLSSNFGAISSVLNDILSRLDPPEAEVQIDRLITGRLQSLQTYVTQQLIRAAEIRASANLAATKMSECVLGQSKRVDFCGKGYHLMSFPQSAPHGVVFLHVTYVPAQEKNFTTAPAICHDGKAHFPREGVFVSNGTHWFVTQRNFYEPQIITTDNTFVSGNCDVVIGIVNNTVYDPLQPELDSGGSGYIPEAPRDGQAYVRKDGEWVLLSTFL

SEQ ID NO: 9743 - protein, 1177 aa, Artificial Sequence
  SARS-CoV-2/Belgium/BA-02291/2020__EPI_ISL_415159 spike protein (1-1147)(K986P_V987P) Foldon construct
MFVFLVLLPLVSSQCVNLTTRTQLPPAYTNSFTRGVYYPDKVFRSSVLHSTQDLFLPFFSNVTWFHAIHVSGTNGTKRFDNPVLPFNDGVYFASTEKSNIIRGWIFGTTLDSKTQSLLIVNNATNVVIKVCEFQFCNDPFLGVYYHKNNKSWMESEFRVYSSANNCTFEYVSQPFLMDLEGKQGNFKNLREFVFKNIDGYFKIYSKHTPINLVRDLPQGFSALEPLVDLPIGINITRFQTLLALHRSYLTPGDSSSGWTAGAAAYYVGYLQPRTFLLKYNENGTITDAVDCALDPLSETKCTLKSFTVEKGIYQTSNFRVQPTESIVRFPNITNLCPFGEVFNATRFASVYAWNRKRISNCVADYSVLYNSASFSTFKCYGVSPTKLNDLCFTNVYADSFVIRGDEVRQIAPGQTGKIADYNYKLPDDFTGCVIAWNSNNLDSKVGGNYNYLYRLFRRSNLKPFERDISTEIYQAGSTPCNGVEGFNCYFPLQSYGFQPTNGVGYQPYRVVVLSFELLPAPATVCGPKKSTNLVKNKCVNFNFNGLTGTGVLTESNKKFLPFQQFGRDIADTTDAVRDPQTLEILDITPCSFGGVSVITPGTNTSNQVAVLYQGVNCTEVPVAIHADQLTPTWRVYSTGSNVFQTRAGCLIGAEHVNNSYECDIPIGAGICASYQTQTNSPRRARSVASQSIIAYTMSLGAENSVAYSNNSIAIPTNFTISVTTEILPVSMTKTSVDCTMYICGDSTECSNLLLQYGSFCTQLNRALTGIAVEQDKNTQEVFAQVKQIYKTPPIKDFGGFNFSQILPDPSKPSKRSFIEDLLFNKVTLADAGFIKQYGDCLGDIAARDLICAQKFNGLTVLPPLLTDEMIAQYTSALLAGTITSGWTFGAGAALQIPFAMQMAYRFNGIGVTQNVLYENQKLIANQFNSAIGKIQDSLSSAAPALGKLQDVVNQNAQALNTLVKQLSSNFGAISSVLNDILSRLDPPEAEVQIDRLITGRLQSLQTYVTQQLIRAAEIRASANLAATKMSECVLGQSKRVDFCGKGYHLMSFPQSAPHGVVFLHVTYVPAQEKNFTTAPAICHDGKAHFPREGVFVSNGTHWFVTQRNFYEPQIITTDNTFVSGNCDVVIGIVNNTVYDPLQPELDSGGSGYIPEAPRDGQAYVRKDGEWVLLSTFL

SEQ ID NO: 9744 - protein, 1177 aa, Artificial Sequence
  SARS-CoV-2/USA/WA8-UW5/2020__EPI_ISL_413486 spike protein (1-1147)(K986P_V987P) Foldon construct
MFVFLVLLPLVSSQCVNLTTRTQLPPAYTNSFTRGVYYPDKVFRSSVLHSTQDLFLPFFSNVTWFHAIHVSGTNGTKRFDNPVLPFNDGVYFASTEKSNIIRGWIFGTTLDSKTQSLLIVNNATNVVIKVCEFQFCNDPFLGVYYHKNNKSWMESEFRVYSSANNCTFEYVSQPFLMDLEGKQGNFKNLREFVFKNIDGYFKIYSKHTPINLVRDLPQGFSALEPLVDLPIGINITRFQTLLALHRSYLTPGDSSSGWTAGAAAYYVGYLQPRTFLLKYNENGTITDAVDCALDPLSETKCTLKSFTVEKGIYQTSNFRVQPTESIVRFPNITNLCPFGEVFNATRFASVYAWNRKRISNCVADYSVLYNSASFSTFKCYGVSPTKLNDLCFTNVYADSFVIRGDEVRQIAPGQTGKIADYNYKLPDDFTGCVIAWNSNNLDSKVGGNYNYLYRLFRKSNLKPFERDISTEIYQAGSTPCNGVEGFNCYFPLQSYGFQPTNGVGYQPYRVVVLSFELLHAPATVCGPKKSTNLVKNKCVNFNFNGLTGTGVLTESNKKFLPFQQFGRDIADTTDAVRDPQTLEILDITPCSFGGVSVITPGTNTSNQVAVLYQDVNCTEVPVAIHADQLTPTWRVYSTGSNVFQTRAGCLIGAEYVNNSYECDIPIGAGICASYQTQTNSPRRARSVASQSIIAYTMSLGAENSVAYSNNSIAIPTNFTISVTTEILPVSMTKTSVDCTMYICGDSTECSNLLLQYGSFCTQLNRALTGIAVEQDKNTQEVFAQVKQIYKTPPIKDFGGFNFSQILPDPSKPSKRSFIEDLLFNKVTLADAGFIKQYGDCLGDIAARDLICAQKFNGLTVLPPLLTDEMIAQYTSALLAGTITSGWTFGAGAALQIPFAMQMAYRFNGIGVTQNVLYENQKLIANQFNSAIGKIQDSLSSTASALGKLQDVVNQNAQALNTLVKQLSSNFGAISSVLNDILSRLDPPEAEVQIDRLITGRLQSLQTYVTQQLIRAAEIRASANLAATKMSECVLGQSKRVDFCGKGYHLMSFPQSAPHGVVFLHVTYVPAQEKNFTTAPAICHDGKAHFPREGVFVSNGTHWFVTQRNFYEPQIITTDNTFVSGNCDVVIGIVNNTVYDPLQPELDSGGSGYIPEAPRDGQAYVRKDGEWVLLSTFL

SEQ ID NO: 9745 - protein, 1177 aa, Artificial Sequence
  SARS-CoV-2/England/20102000506/2020__EPI_ISL_415147 spike protein (1-1147)(K986P_V987P) Foldon construct
MFVFLVLLPLVSSQCVNLTTRTQLPPAYTNSFTRGVYYPDKVFRSSVLHSTQDLFLPFFSNVTWFHAIHVSGTNGTKRFDNPVLPFNDGVYFASTEKSNIIRGWIFGTTLDSKTQSLLIVNNATNVVIKVCEFQFCNDPFLGVYYHKNNKSWMESEFRVYSSANNCTFEYVSQPFLMDLEGKQGNFKNLREFVFKNIDGYFKIYSKHTPINLVRDLPQGFSALEPLVDLPIGINITRFQTLLALHRSYLTPGDSSSGWTAGAAAYYVGYLQPRTFLLKYNENGTITDAVDCALDPLSETKCTLKSFTVEKGIYQTSNFRVQPTESIVRFPNITNLCPFGEVFNATRFASVYAWNRKRISNCVADYSVLYNSASFSTFKCYGVSPTKLNDLCFTNVYADSFVIRGDEVRQIAPGQTGKIADYNYKLPDDFTGCVIAWNSNNLDSKVGGNYNYLYRLFRKSNLKPFERDISTEIYQAGSTPCNGVEGFNCYFPLQSYGFQPTNGVGYQPYRVVVLSFELLHAPATVCGPKKSTNLVKNKCVNFNFNGLTGTGVLTESNKKFLPFQQFGRDIADTTDAVRDPQTLEILDITPCSFGGVSVITPGTNTSNQVAVLYQGVNCTEVPVAIHADQLTPTWRVYSTGSNVFQTRAGCLIGAEHVNNSYECDIPIGAGICASYQTQTNSPRRARSVASQSIIAYTMSLGAENSVAYSNNSIAIPTNFTISVTTEILPVSMTKTSVDCTMYICGDSTECSNLLLQYGSFCTQLNRALTGIAVEQDKNTQEVFAQVKQIYKTPPIKDFGGFNFSQILPDPSKPSKRSFIEDLLFNKVTLADAGFIKQYGYCLGDIAARDLICAQKFNGLTVLPPLLTDEMIAQYTSALLAGTITSGWTFGAGAALQIPFAMQMAYRFNGIGVTQNVLYENQKLIANQFNSAIGKIQDSLSSTASALGKLQDVVNQNAQALNTLVKQLSSNFGAISSVLNDILSRLDPPEAEVQIDRLITGRLQSLQTYVTQQLIRAAEIRASANLAATKMSECVLGQSKRVDFCGKGYHLMSFPQSAPHGVVFLHVTYVPAQEKNFTTAPAICHDGKAHFPREGVFVSNGTHWFVTQRNFYEPQIITTDNTFVSGNCDVVIGIVNNTVYDPLQPELDSGGSGYIPEAPRDGQAYVRKDGEWVLLSTFL

SEQ ID NO: 9746 - protein, 1177 aa, Artificial Sequence
  SARS-CoV-2/Belgium/VAG-03013/2020__EPI_ISL_415155 spike protein (1-1147)(K986P_V987P) Foldon construct
MFVFLVLLPLVSSQCVNLTTRTQLPPAYTNSFTRGVYYPDKVFRSSVLHSTQDLFLPFFSNVTWFHAIHVSGTNGTKRFDNPVLPFNDGVYFASTEKSNIIRGWIFGTTLDSKTQSLLIVNNATNVVIKVCEFQFCNDPFLGVYYHKNNKSWMESEFRVYSSANNCTFEYVSQPFLMDLEGKQGNFKNLREFVFKNIDGYFKIYSKHTPINLVRDLPQGFSALEPLVDLPIGINITRFQTLLALHRSYLTPGDSSSGWTAGAAAYYVGYLQPRTFLLKYNENGTITDAVDCALDPLSETKCTLKSFTVEKGIYQTSNFRVQPTESIVRFPNITNLCPFGEVFNATRFASVYAWNRKRISNCVADYSVLYNSASFSTFKCYGVSPTKLNDLCFTNVYADSFVIRGDEVRQIAPGQTGKIADYNYKLPDDFTGCVIAWNSNNLDSKVGGNYNYLYRLFRKSNLKPFERDISTEIYQAGSTPCNGVEGFNCYFPLQSYGFQPTNGVGYQPYRVVVLSFELLHAPATVCGPKKSTNLVKNKCVNFNFNGLTGTGVLTESNKKFLPFQQFGRDIADTTDAVRDPQTLEILDITPCSFGGVSVITPGTNTSNQVAVLYQGVNCTEVPVAIHADQLTPTWRVYSTGSNVFQTRAGCLIGAEHVNNSYECDIPIGAGICASYQTQTNSPRRARSVASQSIIAYTMSLGAENSVAYSNNSIAIPTNFTISVTTEILPVSMTKTSVDCTMYICGDSTECSNLLLQYGSFCTQLNRALTGIAVEQDKNTQEVFAQVKQIYKTPPIKDFGGFNFSQILPDPSKPSKRSFIEDLLFNKVTLADAGFIKQYGDCLGDIAARDLICAQKFNGLTVLPPLLTDEMIAQYTSALLAGTITSGWTFGAGAALQIPFAMQMAYRFNGIGVTQNVLYENQKLIANQFNSAIGKIQDSLSSTATALGKLQDVVNQNAQALNTLVKQLSSNFGAISSVLNDILSRLDPPEAEVQIDRLITGRLQSLQTYVTQQLIRAAEIRASANLAATKMSECVLGQSKRVDFCGKGYHLMSFPQSAPHGVVFLHVTYVPAQEKNFTTAPAICHDGKAHFPREGVFVSNGTHWFVTQRNFYEPQIITTDNTFVSGNCDVVIGIVNNTVYDPLQPELDSGGSGYIPEAPRDGQAYVRKDGEWVLLSTFL

SEQ ID NO: 9747 - protein, 1177 aa, Artificial Sequence
  SARS-CoV-2/Belgium/BC-03016/2020__EPI_ISL_415157 spike protein (1-1147)(K986P_V987P) Foldon construct
MFVFLVLLPLVSSQCVNLTTRTQLPPAYTNSFTRGVYYPDKVFRSSVLHSTQDLFLPFFSNVTWFHAIHVSGTNGTKRFDNPVLPFNDGVYFASTEKSNIIRGWIFGTTLDSKTQSLLIVNNATNVVIKVCEFQFCNDPFLGVYYHKNNKSWMESEFRVYSSANNCTFEYVSQPFLMDLEGKQGNFKNLREFVFKNIDGYFKIYSKHTPINLVRDLPQGFSALEPLVDLPIGINITRFQTLLALHRSYLTPGDSSSGWTAGAAAYYVGYLQPRTFLLKYNENGTITDAVDCALDPLSETKCTLKSFTVEKGIYQTSNFRVQPTESIVRFPNITNLCPFGEVFNATRFASVYAWNRKRISNCVADYSVLYNSASFSTFKCYGVSPTKLNDLCFTNVYADSFVIRGDEVRQIAPGQTGKIADYNYKLPDDFTGCVIAWNSNNLDSKVGGNYNYLYRLFRKSNLKPFERDISTEIYQAGSTPCNGVEGFNCYFPLQSYGFQPTNGVGYQPYRVVVLSFELLHAPATVCGPKKSTNLVKNKCVNFNFNGLTGTGVLTESNKKFLPFQQFGRDIADTTDAVRDPQTLEILDITPCSFGGVSVITPGTNTSNQVAVLYQGVNCTEVPVAIHADQLTPTWRVYSTGSNVFQTRAGCLIGAEHVNNSYECDIPIGAGICASYQTQTNSPRRARSVASQSIIAYTMSLGAENSVAYSNNSIAIPTNFTISVTTEILPVSMTKTSVDCTMYICGDSTECSNLLLQYGSFCTQLNRALTGIAVEQDKNTQEVFAQVKQIYKTPPIKDFGGFNFSQILPDPSKPSKRSFIEDLLFNKVTLADAGFIKQYGDCLGDIAARDLICAQKFNGLTVLPPLLTDEMIAQYTSALLAGTITSGWTFGAGAALQIPFAMQMAYRFNGIGVTQNVLYENQKLIANQFNSAIGKIQDSLSSTAPALGKLQDVVNQNAQALNTLVKQLSSNFGAISSVLNDILSRLDPPEAEVQIDRLITGRLQSLQTYVTQQLIRAAEIRASANLAATKMSECVLGQSKRVDFCGKGYHLMSFPQSAPHGVVFLHVTYVPAQEKNFTTAPAICHDGKAHFPREGVFVSNGTHWFVTQRNFYEPQIITTDNTFVSGNCDVVIGIVNNTVYDPLQPELDSGGSGYIPEAPRDGQAYVRKDGEWVLLSTFL

SEQ ID NO: 9748 - protein, 1177 aa, Artificial Sequence
  SARS-CoV-2/Germany/BavPat3/2020__EPI_ISL_414521 spike protein (1-1147)(K986P_V987P) Foldon construct
MFVFLVLLPLVSSQCVNLTTRTQLPPAYTNSFTRGVYYPDKVFRSSVLHSTQDLFLPFFSNVTWFHAIHVSGTNGTKRFDNPVLPFNDGVYFASTEKSNIIRGWIFGTTLDSKTQSLLIVNNATNVVIKVCEFQFCNDPFLGVYYHKNNKSWMESEFRVYSSANNCTFEYVSQPFLMDLEGKQGNFKNLREFVFKNIDGYFKIYSKHTPINLVRDLPQGFSALEPLVDLPIGINITRFQTLLALHRSYLTPGDSSSGWTAGAAAYYVGYLQPRTFLLKYNENGTITDAVDCALDPLSETKCTLKSFTVEKGIYQTSNFRVQPTESIVRFPNITNLCPFGEVFNATRFASVYAWNRKRISNCVADYSVLYNSASFSTFKCYGVSPTKLNDLCFTNVYADSFVIRGDEVRQIAPGQTGKIADYNYKLPDDFTGCVIAWNSNNLDSKVGGNYNYLYRLFRKSNLKPFERDISTEIYQAGSTPCNGVEGFNCYFPLQSYGFQPTNGVGYQPYRVVVLSFELLHAPATVCGPKKSTNLVKNKCVNFNFNGLTGTGVLTESNKKFLPFQQFGRDIADTTDAVRDPQTLEILDITPCSFGGVSVITPGTNTSNQVAVLYQDVNCTEVPVAIHADQLTPTWRVYSTGSNVFQTRAGCLIGAEHVNNSYECDIPIGAGICASYQTQTNSPRRARSVASQSIIAYTMSLGAENSVAYSNNSIAIPTNFTISVTTEILPVSMTKTSVDCTMYICGDSTECSNLLLQYGSFCTQLNRALTGIAVEQDKNTQQVFAQVKQIYKTPPIKDFGGFNFSQILPDPSKPSKRSFIEDLLFNKVTLADAGFIKQYGDCLGDIAARDLICAQKFNGLTVLPPLLTDEMIAQYTSALLAGTITSGWTFGAGAALQIPFAMQMAYRFNGIGVTQNVLYENQKLIANQFNSAIGKIQDSLSSTASALGKLQDVVNQNAQALNTLVKQLSSNFGAISSVLNDILSRLDPPEAEVQIDRLITGRLQSLQTYVTQQLIRAAEIRASANLAATKMSECVLGQSKRVDFCGKGYHLMSFPQSAPHGVVFLHVTYVPAQEKNFTTAPAICHDGKAHFPREGVFVSNGTHWFVTQRNFYEPQIITTDNTFVSGNCDVVIGIVNNTVYDPLQPELDSGGSGYIPEAPRDGQAYVRKDGEWVLLSTFL

SEQ ID NO: 9749 - protein, 1177 aa, Artificial Sequence
  SARS-CoV-2/France/HF1805/2020__EPI_ISL_414628 spike protein (1-1147)(K986P_V987P) Foldon construct
MFVFLVLLPLVSSQCVNLTTRTQLPPAYTNSFTRGVYYPDKVFRSSVLHSTQDLFLPFFSNVTWFHAIHVSGTNGTKRFDNPVLPFNDGVYFASTEKSNIIRGWIFGTTLDSKTQSLLIVNNATNVVIKVCEFQFCNDPFLGVYYHKNNKSWMESEFRVYSSANNCTFEYVSQPFLMDLEGKQGNFKNLREFVFKNIDGYFKIYSKHTPINLVRDLPQGFSALEPLVDLPIGINITRFQTLLALHRSYLTPGDSSSGWTAGAAAYYVGYLQPRTFLLKYNENGTITDAVDCALDPLSETKCTLKSFTVEKGIYQTSNFRVQPTESIVRFPNITNLCPFGEVFNATRFASVYAWNRKRISNCVADYSVLYNSASFSTFKCYGVSPTKLNDLCFTNVYADSFVIRGDEVRQIAPGQTGKIADYNYKLPDDFTGCVIAWNSNNLDSKVGGNYNYLYRLFRKSNLKPFERDISTEIYQAGSTPCNGVEGFNCYFPLQSYGFQPTNGVGYQPYRVVVLSFELLHAPATVCGPKKSTNLVKNKCVNFNFNGLTGTGVLTESNKKFLPFQQFGRDIADTTDAVRDPQTLEILDITPCSFGGVSVITPGTNTSNQVAVLYQGVNCTEVPVAIHADQLTPTWRVYSTGSNVFQTRAGCLIGAEHVNNSYECDIPIGAGICASYQTQTNSPRRARSVASQSIIAYTMSLGAENSVAYSNNSIAIPTNFTISVTTEILPVSMTKTSVDCTMYICGDSTECSNLLLQYGSFCTQLNRALTGIAVEQDKNTQEVFAQVKQIYKTPPIKDFGGFNFSQILPDPSKPSKRSFIEDLLFNKVTLADAGFIKQYGDCLGDIAARDLICAQKFNGLTVLPPLLTDEMIAQYTSALLAGTITSGWTFGAGAALQIPFAMQMAYRFNGIGVTQNVLYENQKLIANQFNSAIGKIQDSLSSTASALGKLQDVVNQNAQALNTLVKQLSSNFGAISSVLNDILSRLDPPEAEVQIDRLITGRLQSLQTYVTQQLIRAAEIRASANLAATKMSECVLGQSKRVDFCGKGYHLMSFPQSAPHGVVFLHVTYVPAQEKNFTTAPAICHDGKAHFPREGVFVSNGTHWFVTQRNFYEPQIITTDNTFVSGNCDVVIGVVNNTVYDPLQPELDSGGSGYIPEAPRDGQAYVRKDGEWVLLSTFL

SEQ ID NO: 9750 - protein, 1177 aa, Artificial Sequence
  SARS-CoV-2/Netherlands/ZuidHolland_9/2020__EPI_ISL_414445 spike protein (1-1147)(K986P_V987P) Foldon construct
MFVFLVLLPLVSSQCVNLTTRTQLPPAYTNSFTRGVYYPDKVFRSSVLHSTQDLFLPFFSNVTWFHAIHVSGTNGTKRFDNPVLPFNDGVYFASTEKSNIIRGWIFGTTLDSKTQSLLIVNNATNVVIKVCEFQFCNDPFLGVYYHKNNKSWMESEFRVYSSANNCTFEYVSQPFLMDLEGKQGNFKNLREFVFKNIDGYFKIYSKHTPINLVRDLPQGFSALEPLVDLPIGINITRFQTLLALHRSYLTPGDSSSGWTAGAAAYYVGYLQPRTFLLKYNENGTITDAVDCALDPLSETKCTLKSFTVEKGIYQTSNFRVQPTESIVRFPNITNLCPFGEVFNATRFASVYAWNRKRISNCVADYSVLYNSASFSTFKCYGVSPTKLNDLCFTNVYADSFVIRGDEVRQIAPGQTGKIADYNYKLPDDFTGCVIAWNSNNLDSKVGGNYNYLYRLFRKSNLKPFERDISTEIYQAGSTPCNGVEGFNCYFPLQSYGFQPTNGVGYQPYRVVVLSFELLHAPATVCGPKKSTNLVKNKCVNFNFNGLTGTGVLTESNKKFLPFQQFGRDIADTTDAVRDPQTLEILDITPCSFGGVSVITPGTNTSNQVAVLYQGVNCTEVPVAIHADQLTPTWRVYSTGSNVFQTRAGCLIGAEHVNNSYECDIPIGAGICASYQTQTNSPRRARSVASQSIIAYTMSLGAENSVAYSNNSIAIPTNFTISVTTEILPVSMTKTSVDCTMYICGDSTECSNLLLQYGSFCTQLNRALTGIAVEQDKNTQEVFAQVKQIYKTPPIKDFGGFNFSQILPDPSKPSKRSFIEDLLFNKVTLADAGFIKQYGDCLGDIAARDLICVQKFNGLTVLPPLLTDEMIAQYTSALLAGTITSGWTFGAGAALQIPFAMQMAYRFNGIGVTQNVLYENQKLIANQFNSAIGKIQDSLSSTASALGKLQDVVNQNAQALNTLVKQLSSNFGAISSVLNDILSRLDPPEAEVQIDRLITGRLQSLQTYVTQQLIRAAEIRASANLAATKMSECVLGQSKRVDFCGKGYHLMSFPQSAPHGVVFLHVTYVPAQEKNFTTAPAICHDGKAHFPREGVFVSNGTHWFVTQRNFYEPQIITTDNTFVSGNCDVVIGIVNNTVYDPLQPELDSGGSGYIPEAPRDGQAYVRKDGEWVLLSTFL

SEQ ID NO: 9751 - protein, 1177 aa, Artificial Sequence
  SARS-CoV-2/Finland/FIN03032020A/2020__EPI_ISL_413602 spike protein (1-1147)(K986P_V987P) Foldon construct
MFVFLVLLPLVSSQCVNLTTRTQLPPAYTNSFTRGVYYPDKVFRSSVLHSTQDLFLPFFSNVTWFHAIHVSGTNGTKRFDNPVLPFNDGVYFASTEKSNIIRGWIFGTTLDSKTQSLLIVNNATNVVIKVCEFQFCNDPFLGVYYHKNNKSWMESEFRVYSSANNCTFEYVSQPFLMDLEGKQGNFKNLREFVFKNIDGYFKIYSKHTPINLVRDLPQGFSALEPLVDLPIGINITRFQTLLALHRSYLTPGDSSSGWTAGAAAYYVGYLQPRTFLLKYNENGTITDAVDCALDPLSETKCTLKSFTVEKGIYQTSNFRVQPTESIVRFPNITNLCPFGEVFNATRFASVYAWNRKRISNCVADYSVLYNSASFSTFKCYGVSPTKLNDLCFTNVYADSFVIRGDEVRQIAPGQTGKIADYNYKLPDDFTGCVISWNSNNLDSKVGGNYNYLYRLFRKSNLKPFERDISTEIYQAGSTPCNGVEGFNCYFPLQSYGFQPTNGVGYQPYRVVVLSFELLHAPATVCGPKKSTNLVKNKCVNFNFNGLTGTGVLTESNKKFLPFQQFGRDIADTTDAVRDPQTLEILDITPCSFGGVSVITPGTNTSNQVAVLYQGVNCTEVPVAIHADQLTPTWRVYSTGSNVFQTRAGCLIGAEHVNNSYECDIPIGAGICASYQTQTNSPRRARSVASQSIIAYTMSLGAENSVAYSNNSIAIPTNFTISVTTEILPVSMTKTSVDCTMYICGDSTECSNLLLQYGSFCTQLNRALTGIAVEQDKNTQEVFAQVKQIYKTPPIKDFGGFNFSQILPDPSKPSKRSFIEDLLFNKVTLADAGFIKQYGDCLGDIAARDLICAQKFNGLTVLPPLLTDEMIAQYTSALLAGTITSGWTFGAGAALQIPFAMQMAYRFNGIGVTQNVLYENQKLIANQFNSAIGKIQDSLSSTASALGKLQDVVNQNAQALNTLVKQLSSNFGAISSVLNDILSRLDPPEAEVQIDRLITGRLQSLQTYVTQQLIRAAEIRASANLAATKMSECVLGQSKRVDFCGKGYHLMSFPQSAPHGVVFLHVTYVPAQEKNFTTAPAICHDGKAHFPREGVFVSNGTHWFVTQRNFYEPQIITTDNTFVSGNCDVVIGIVNNTVYDPLQPELDSGGSGYIPEAPRDGQAYVRKDGEWVLLSTFL

SEQ ID NO: 9752 - protein, 1177 aa, Artificial Sequence
  SARS-CoV-2/France/GE1977/2020__EPI_ISL_414632 spike protein (1-1147)(K986P_V987P) Foldon construct
MFVFLVLLPLVSSQCVNLTTRTQLPPAYTNSFTRGVYYPDKVFRSSVLHSTQDLFLPFFSNVTWFHAIHVSGTNGTKRFDNPVLPFNDGVYFASTEKSNIIRGWIFGTTLDSKTQSLLIVNNATNVVIKVCEFQFCNDPFLGVYYHKNNKSWMESEFRVYSSANNCTFEYVSQPFLMDLEGKQGNFKNLREFVFKNIDGYFKIYSKHTPINLVRDLPQGFSALEPLVDLPIGINITRFQTLLALHRSYLTPGDSSSGWTAGAAAYYVGYLQPRTFLLKYNENGTITDAVDCALDPLSETKCTLKSFTVEKGIYQTSNFRVQPTESIVRFPNITNLCPFGEVFNATRFASVYAWNRKRISNCVADYSVLYNSASFSTFKCYGVSPTKLNDLCFTNVYADSFVIRGDEVRQIAPGQTGKIADYNYKLPDDFTGCVIAWNSNNLDSKVGGNYNYLYRLFRKSNLKPFERDISTEIYQAGSTPCNGVEGFNCYFPLQSYGFQPTNGVGYQPYRVVVLSFELLHAPATVCGPKKSTNLVKNKCVNFNFNGLTGTGVLTESNKKFLPFQQFGRDIADTTDAVRDPQTLEILDITPCSFGGVSVITPGTNTSNQVAVLYQGVNCTEVPVAIHADQLTPTWRVYSTGSNVFQTRAGCLIGAEHVNNSYECDIPIGAGICASYQTQTNSPRRARSVASQSIIAYTMSLGAENSVAYSNNSIAIPTNFTISVTTEILPVSMTKTSVDCTMYICGDSTECSNLLLQYGSFCTQLNRALTGIAVEQDKNTQEVFAQVKQIYKTPPIKDFGGFNFSQILPDPSKPSKRSFIEDLLFNKVTLADAGFIKQYGDCLGDIAARDLICAQKFNGLTVLPPLLTDEMIAQYTSALLAGTITSGWTFGAGAALQIPFAMQMAYRFNGIGVTQNVLYENQKLIANQFNSAIGKIQDSLFSTASALGKLQDVVNQNAQALNTLVKQLSSNFGAISSVLNDILSRLDPPEAEVQIDRLITGRLQSLQTYVTQQLIRAAEIRASANLAATKMSECVLGQSKRVDFCGKGYHLMSFPQSAPHGVVFLHVTYVPAQEKNFTTAPAICHDGKAHFPREGVFVSNGTHWFVTQRNFYEPQIITTDNTFVSGNCDVVIGIVNNTVYDPLQPELDSGGSGYIPEAPRDGQAYVRKDGEWVLLSTFL

SEQ ID NO: 9753 - protein, 1177 aa, Artificial Sequence
  SARS-CoV-2/Finland/FIN-313/2020__EPI_ISL_414641 spike protein (1-1147)(K986P_V987P) Foldon construct
MFVFLVLLPLVSSQCVNLTTRTQLPPAYTNSFTRGVYYPDKVFRSSVLHSTQDLFLPFFSNVTWFHAIHVSGTNGTKRFDNPVLPFNDGVYFASTEKSNIIRGWIFGTTLDSKTQSLLIVNNATNVVIKVCEFQFCNDPFLGVYYHKNNKSWMESEFRVYSSANNCTFEYVSQPFLMDLEGKQGNFKNLREFVFKNIDGYFKIYSKHTPINLVRDLPQGFSALEPLVDLPIGINITRFKTLLALHRSYLTPGDSSSGWTAGAAAYYVGYLQPRTFLLKYNENGTITDAVDCALDPLSETKCTLKSFTVEKGIYQTSNFRVQPTESIVRFPNITNLCPFGEVFNATRFASVYAWNRKRISNCVADYSVLYNSASFSTFKCYGVSPTKLNDLCFTNVYADSFVIRGDEVRQIAPGQTGKIADYNYKLPDDFTGCVIAWNSNNLDSKVGGNYNYLYRLFRKSNLKPFERDISTEIYQAGSTPCNGVEGFNCYFPLQSYGFQPTNGVGYQPYRVVVLSFELLHAPATVCGPKKSTNLVKNKCVNFNFNGLTGTGVLTESNKKFLPFQQFGRDIADTTDAVRDPQTLEILDITPCSFGGVSVITPGTNTSNQVAVLYQGVNCTEVPVAIHADQLTPTWRVYSTGSNVFQTRAGCLIGAEHVNNSYECDIPIGAGICASYQTQTNSPRRARSVASQSIIAYTMSLGAENSVAYSNNSIAIPTNFTISVTTEILPVSMTKTSVDCTMYICGDSTECSNLLLQYGSFCTQLNRALTGIAVEQDKNTQEVFAQVKQIYKTPPIKDFGGFNFSQILPDPSKPSKRSFIEDLLFNKVTLADAGFIKQYGDCLGDIAARDLICAQKFNGLTVLPPLLTDEMIAQYTSALLAGTITSGWTFGAGAALQIPFAMQMAYRFNGIGVTQNVLYENQKLIANQFNSAIGKIQDSLSSTASALGKLQDVVNQNAQALNTLVKQLSSNFGAISSVLNDILSRLDPPEAEVQIDRLITGRLQSLQTYVTQQLIRAAEIRASANLAATKMSECVLGQSKRVDFCGKGYHLMSFPQSAPHGVVFLHVTYVPAQEKNFTTAPAICHDGKAHFPREGVFVSNGTHWFVTQRNFYEPQIITTDNTFVSGNCDVVIGIVNNTVYDPLQPELDSGGSGYIPEAPRDGQAYVRKDGEWVLLSTFL

SEQ ID NO: 9754 - protein, 1177 aa, Artificial Sequence
  SARS-CoV-2/Netherlands/ZuidHolland_2/2020__EPI_ISL_414556 spike protein (1-1147)(K986P_V987P) Foldon construct
MFVFLVLLPLVSSQCVNLTTRTQLPPAYTNSFTRGVYYPDKVFRSSVLHSTQDLFLPFFSNVTWFHAIHVSGTNGTKRFDNPVLPFNDGVYFASTEKSNIIRGWIFGTTLDSKTQSLLIVNNATNVVIKVCEFQFCNDPFLGVYYHKNNKSWMESEFRVYSSANNCTFEYVSQPFLMDLEGKQGNFKNLREFVFKNIDGYFKIYSKHTPINLVRDLPQGFSALEPLVDLPIGINITRFQTLLALHRSYLTPGDSSSGWTAGAAAYYVGYLQPRTFLLKYNENGTITDAVDCALDPLSETKCTLKSFTVEKGIYQTSNFRVQPTESIVRFPNITNLCPFGEVFNATRFASVYAWNRKRISNCVADYSVLYNSASFSTFKCYGVSPTKLNDLCFTNVYADSFVIRGDEVRQIAPGQTGKIADYNYKLPDDFTGCVIAWNSNNLDSKVGGNYNYLYRLFRKSNLKPFERDISTEIYQAGSTPCNGVEGFNCYFPLQSYGFQPTNGVGYQPYRVVVLSFELLHAPATVCGPKKSTNLVKNKCVNFNFNGLTGTGVLTESNKKFLPFQQFGRDIADTTDAVRDPQTLEILDITPCSFGGVSVITPGTNTSNQVAVLYQGVNCTEVPVAIHADQLTPTWRVYSTGSNVFQTRAGCLIGAEHVNNSYECDIPIGAGICASYQTQTNSPRRARSVASQSIIAYTMSLGAENSVAYSNNSIAIPTNFTISVTTEILPVSMTKTSVDCTMYICGDSTECSNLLLQYGSFCTQLNRALTGIALEQDKNTQEVFAQVKQIYKTPPIKDFGGFNFSQILPDPSKPSKRSFIEDLLFNKVTLADAGFIKQYGDCLGDIAARDLICAQKFNGLTVLPPLLTDEMIAQYTSALLAGTITSGWTFGAGAALQIPFAMQMAYRFNGIGVTQNVLYENQKLIANQFNSAIGKIQDSLSSTASALGKLQDVVNQNAQALNTLVKQLSSNFGAISSVLNDILSRLDPPEAEVQIDRLITGRLQSLQTYVTQQLIRAAEIRASANLAATKMSECVLGQSKRVDFCGKGYHLMSFPQSAPHGVVFLHVTYVPAQEKNFTTAPAICHDGKAHFPREGVFVSNGTHWFVTQRNFYEPQIITTDNTFVSGNCDVVIGIVNNTVYDPLQPELDSGGSGYIPEAPRDGQAYVRKDGEWVLLSTFL

SEQ ID NO: 9755 - protein, 1177 aa, Artificial Sequence
  SARS-CoV-2/USA/WA-UW31/2020__EPI_ISL_414618 spike protein (1-1147)(K986P_V987P) Foldon construct
MFVFLVLLPLVSSQCVNLTTRTQLPPAYTNSFTRGVYYPDKVFRSSVLHSTQDLFLPFFSNVTWFHAIHVSGTNGTKRFDNPVLPFNDGVYFASTEKSNIIRGWIFGTTLDSKTQSLLIVNNATNVVIKVCEFQFCNDPFLGVYYHKNNKSWMESEFRVYSSANNCTFEYVSQPFLMDLEGKQGNFKNLREFVFKNIDGYFKIYSKHTPINLVRDLPQGFSALEPLVDLPIGINITRFQTLLALHRSYLTPGDSSSGWTAGAAAYYVGYLQPRTFLLKYNENGTITDAVDCALDPLSETKCTLKSFTVEKGIYQTSNFRVQPTESIVRFPNITNLCPFGEVFNATRFASVYAWNRKRISNCVADYSVLYNSASFSTFKCYGVSPTKLNDLCFTNVYADSFVIRGDEVRQIAPGQTGKIADYNYKLPDDFTGCVIAWNSNNLDSKVGGNYNYLYRLFRKSNLKPFERDISTEIYQAGSTPCNGAEGFNCYFPLQSYGFQPTNGVGYQPYRVVVLSFELLHAPATVCGPKKSTNLVKNKCVNFNFNGLTGTGVLTESNKKFLPFQQFGRDIADTTDAVRDPQTLEILDITPCSFGGVSVITPGTNTSNQVAVLYQDVNCTEVPVAIHADQLTPTWRVYSTGSNVFQTRAGCLIGAEHVNNSYECDIPIGAGICASYQTQTNSPRRARSVASQSIIAYTMSLGAENSVAYSNNSIAIPTNFTISVTTEILPVSMTKTSVDCTMYICGDSTECSNLLLQYGSFCTQLNRALTGIAVEQDKNTQEVFAQVKQIYKTPPIKDFGGFNFSQILPDPSKPSKRSFIEDLLFNKVTLADAGFIKQYGDCLGDIAARDLICAQKFNGLTVLPPLLTDEMIAQYTSALLAGTITSGWTFGAGAALQIPFAMQMAYRFNGIGVTQNVLYENQKLIANQFNSAIGKIQDSLSSTASALGKLQDVVNQNAQALNTLVKQLSSNFGAISSVLNDILSRLDPPEAEVQIDRLITGRLQSLQTYVTQQLIRAAEIRASANLAATKMSECVLGQSKRVDFCGKGYHLMSFPQSAPHGVVFLHVTYVPAQEKNFTTAPAICHDGKAHFPREGVFVSNGTHWFVTQRNFYEPQIITTDNTFVSGNCDVVIGIVNNTVYDPLQPELDSGGSGYIPEAPRDGQAYVRKDGEWVLLSTFL

SEQ ID NO: 9756 - protein, 1177 aa, Artificial Sequence
  SARS-CoV-2/South Korea/SNU01/2020__EPI_ISL_411929 spike protein (1-1147)(K986P_V987P) Foldon construct
MFVFLVLLPLVSSQCVNLTTRTQLPPAYTNSFTRGVYYPDKVFRSSVLHSTQDLFLPFFSNVTWFHAIHVSGTNGTKRFDNPVLPFNDGVYFASTEKSNIIRGWIFGTTLDSKTQSLLIVNNATNVVIKVCEFQFCNDPFLGVYYHKNNKSWMESEFRVYSSANNCTFEYVSQPFLMDLEGKQGNFKNLREFVFKNIDGYFKIYSKHTPINLVRDLPQGFWALEPLVDLPIGINITRFQTLLALHRSYLTPGDSSSGWTAGAAAYYVGYLQPRTFLLKYNENGTITDAVDCALDPLSETKCTLKSFTVEKGIYQTSNFRVQPTESIVRFPNITNLCPFGEVFNATRFASVYAWNRKRISNCVADYSVLYNSASFSTFKCYGVSPTKLNDLCFTNVYADSFVIRGDEVRQIAPGQTGKIADYNYKLPDDFTGCVIAWNSNNLDSKVGGNYNYLYRLFRKSNLKPFERDISTEIYQAGSTPCNGVEGFNCYFPLQSYGFQPTNGVGYQPYRVVVLSFELLHAPATVCGPKKSTNLVKNKCVNFNFNGLTGTGVLTESNKKFLPFQQFGRDIADTTDAVRDPQTLEILDITPCSFGGVSVITPGTNTSNQVAVLYQDVNCTEVPVAIHADQLTPTWRVYSTGSNVFQTRAGCLIGAEHVNNSYECDIPIGAGICASYQTQTNSPRRARSVASQSIIAYTMSLGAENSVAYSNNSIAIPTNFTISVTTEILPVSMTKTSVDCTMYICGDSTECSNLLLQYGSFCTQLNRALTGIAVEQDKNTQEVFAQVKQIYKTPPIKDFGGFNFSQILPDPSKPSKRSFIEDLLFNKVTLADAGFIKQYGDCLGDIAARDLICAQKFNGLTVLPPLLTDEMIAQYTSALLAGTITSGWTFGAGAALQIPFAMQMAYRFNGIGVTQNVLYENQKLIANQFNSAIGKIQDSLSSTASALGKLQDVVNQNAQALNTLVKQLSSNFGAISSVLNDILSRLDPPEAEVQIDRLITGRLQSLQTYVTQQLIRAAEIRASANLAATKMSECVLGQSKRVDFCGKGYHLMSFPQSAPHGVVFLHVTYVPAQEKNFTTAPAICHDGKAHFPREGVFVSNGTHWFVTQRNFYEPQIITTDNTFVSGNCDVVIGIVNNTVYDPLQPELDSGGSGYIPEAPRDGQAYVRKDGEWVLLSTFL

SEQ ID NO: 9757 - protein, 1177 aa, Artificial Sequence
  SARS-CoV-2/China/WF0004/2020__EPI_ISL_413694 spike protein (1-1147)(K986P_V987P) Foldon construct
MFVFLVLLPLVSSQCVNLTTRTQLPPAYTNSFTRGVYYPDKVFRSSVLHSTQDLFLPFFSNVTWFHAIHVSGTNGTKRFDNPVLPFNDGVYFASTEKSNIIRGWIFGTTLDSKTQSLLIVNNATNVVIKVCEFQFCNDPFLGVYYHKNNKSWTESEFRVYSSANNCTFEYVSQPFLMDLEGKQGNFKNLREFVFKNIDGYFKIYSKHTPINLVRDLPQGFSALEPLVDLPIGINITRFQTLLALHRSYLTPGDSSSGWTAGAAAYYVGYLQPRTFLLKYNENGTITDAVDCALDPLSETKCTLKSFTVEKGIYQTSNFRVQPTESIVRFPNITNLCPFGEVFNATRFASVYAWNRKRISNCVADYSVLYNSASFSTFKCYGVSPTKLNDLCFTNVYADSFVIRGDEVRQIAPGQTGKIADYNYKLPDDFTGCVIAWNSNNLDSKVGGNYNYLYRLFRKSNLKPFERDISTEIYQAGSTPCNGVEGFNCYFPLQSYGFQPTNGVGYQPYRVVVLSFELLHAPATVCGPKKSTNLVKNKCVNFNFNGLTGTGVLTESNKKFLPFQQFGRDIADTTDAVRDPQTLEILDITPCSFGGVSVITPGTNTSNQVAVLYQDVNCTEVPVAIHADQLTPTWRVYSTGSNVFQTRAGCLIGAEHVNNSYECDIPIGAGICASYQTQTNSPRRARSVASQSIIAYTMSLGAENSVAYSNNSIAIPTNFTISVTTEILPVSMTKTSVDCTMYICGDSTECSNLLLQYGSFCTQLNRALTGIAVEQDKNTQEVFAQVKQIYKTPPIKDFGGFNFSQILPDPSKPSKRSFIEDLLFNKVTLADAGFIKQYGDCLGDIAARDLICAQKFNGLTVLPPLLTDEMIAQYTSALLAGTITSGWTFGAGAALQIPFAMQMAYRFNGIGVTQNVLYENQKLIANQFNSAIGKIQDSLSSTASALGKLQDVVNQNAQALNTLVKQLSSNFGAISSVLNDILSRLDPPEAEVQIDRLITGRLQSLQTYVTQQLIRAAEIRASANLAATKMSECVLGQSKRFDFCGKGYHLMSFPQSAPHGVVFLHVTYVPAQEKNFTTAPAICHDGKAHFPREGVFVSNGTHWFVTQRNFYEPQIITTDNTFVSGNCDVVIGIVNNTVYDPLQPELDSGGSGYIPEAPRDGQAYVRKDGEWVLLSTFL

SEQ ID NO: 9758 - protein, 1177 aa, Artificial Sequence
  SARS-CoV-2/China/WF0028/2020__EPI_ISL_413791 spike protein (1-1147)(K986P_V987P) Foldon construct
MFVFLVLLPLVSSQCVNLTTRTQLPPAYTNSFTRGVYYPDKVFRSSVLHSTQDLFLPFFSNVTWFHAIHVSGTNGTKRFDNPVLPFNDGVYFASTEKSNIIRGWIFGTTLDSKTQSLLIVNNATNVVIKVCEFQFCNDPFLGVYYHKNNKSWMESEFRVYSSANNCTFEYVSQPFLMDLEGKQGNFKNLREFVFKNIDGYFKIYSKHTPINLVRDLPQGFSALEPLVDLPIGINITRFQTLLALHRSYLTPGDSSSGWTAGAAAYYVGYLQPRTFLLKYNENGTITDAVDCALDPLSETKCTLKSFTVEKGIYQTSNFRVQPTESIVRFPNITNLCPFGEVFNATRFASVYAWNRKRISNCVADYSVLYNSASFSTFKCYGVSPTKLNDLCFTNVYADSFVIRGDEVRQIAPGQTGKIADYNYKLPDDFTGCVIAWNSNNLDSKVGGNYNYLYRLFRKSNLKPFERDISTEIYQAGSTPCNGVEGFNCYFPLQSYGFQPTNGVGYQPYRVVVLSFELLHAPATVCGPKKSTNLVKNKCVNFNFNGLTGTGVLTESNKKFLPFQQFGRDIADTTDAVRDPQTLEILDITPCSFGGVSVITPGTNTSNQVAVLYQDVNCTEVPVAIHADQLTPTWRVYSTGSNVFQTRAGCLIGAEHVNNSYECDIPIGAGICASYQTQTNSPRRARSVASQSIIAYTMSLGAENSVAYSNNSIAIPTNFTISVTTEILPVSMTKTSVDCTMYICGDSTECSNLLLQYGSFCTQLNRALTGIAVEQDKNTQEVFAQVKQIYKTPPIKDFGGFNFSQILPDPSKPSKRSFIEDLLFNKVTLADAGFIKQYGDCLGDIAARDLICAQKFNGLTVLPPLLTDEMIAQYTSALLAGTITSGWTFGAGAALQIPFAMQMAYRFNGIGVTQNVLYENQKLIANQFNSAIGKIQDSLSSTASALGKLQDVVNQNAQALNTLVKQLSSNFGAISSVLNDILSRLDPPEAEVQIDRLITGRLQSLQTYVTQQLIRAAEIRASANLAATKMSECVLGQSKRVDFCGKGYHLMSFPQSAPHGVVFLHVTYVPAQEKNFTTAPAICHDGKAHFPREGVFVSNGTHWFVTQRNFYEPQIITTDNTFVSGNCDVVIGIVNNTVYDPLQPELESGGSGYIPEAPRDGQAYVRKDGEWVLLSTFL

SEQ ID NO: 9759 - protein, 1177 aa, Artificial Sequence
  SARS-CoV-2/2019-nCoV/USA-CruiseA-18/2020__MT159716.1 spike protein (1-1147)(K986P_V987P) Foldon construct
MFVFLVLLPLVSSQCVNLTTRTQLPPAYTNSFTRGVYYPDKVFRSSVLHSTQDLFLPFFSNVTWFHAIHVSGTNGTKRFDNPVLPFNDGVYFASTEKSNIIRGWIFGTTLDSKTQSLLIVNNATNVVIKVCEFQFCNDPFLGVYYHKNNKSWMESELRVYSSANNCTFEYVSQPFLMDLEGKQGNFKNLREFVFKNIDGYFKIYSKHTPINLVRDLPQGFSALEPLVDLPIGINITRFQTLLALHRSYLTPGDSSSGWTAGAAAYYVGYLQPRTFLLKYNENGTITDAVDCALDPLSETKCTLKSFTVEKGIYQTSNFRVQPTESIVRFPNITNLCPFGEVFNATRFASVYAWNRKRISNCVADYSVLYNSASFSTFKCYGVSPTKLNDLCFTNVYADSFVIRGDEVRQIAPGQTGKIADYNYKLPDDFTGCVIAWNSNNLDSKVGGNYNYLYRLFRKSNLKPFERDISTEIYQAGSTPCNGVEGFNCYFPLQSYGFQPTNGVGYQPYRVVVLSFELLHAPATVCGPKKSTNLVKNKCVNFNFNGLTGTGVLTESNKKFLPFQQFGRDIADTTDAVRDPQTLEILDITPCSFGGVSVITPGTNTSNQVAVLYQDVNCTEVPVAIHADQLTPTWRVYSTGSNVFQTRAGCLIGAEHVNNSYECDIPIGAGICASYQTQTNSPRRARSVASQSIIAYTMSLGAENSVAYSNNSIAIPTNFTISVTTEILPVSMTKTSVDCTMYICGDSTECSNLLLQYGSFCTQLNRALTGIAVEQDKNTQEVFAQVKQIYKTPPIKDFGGFNFSQILPDPSKPSKRSFIEDLLFNKVTLADAGFIKQYGDCLGDIAARDLICAQKFNGLTVLPPLLTDEMIAQYTSALLAGTITSGWTFGAGAALQIPFAMQMAYRFNGIGVTQNVLYENQKLIANQFNSAIGKIQDSLSSTASALGKLQDVVNQNAQALNTLVKQLSSNFGAISSVLNDILSRLDPPEAEVQIDRLITGRLQSLQTYVTQQLIRAAEIRASANLAATKMSECVLGQSKRVDFCGKGYHLMSFPQSAPHGVVFLHVTYVPAQEKNFTTAPAICHDGKAHFPREGVFVSNGTHWFVTQRNFYEPQIITTDNTFVSGNCDVVIGIVNNTVYDPLQPELDSGGSGYIPEAPRDGQAYVRKDGEWVLLSTFL

SEQ ID NO: 9760 - protein, 1177 aa, Artificial Sequence
  SARS-CoV-2/SARS-CoV-2/Yunnan-01/human/2020/CHN__MT049951.1 spike protein (1-1147)(K986P_V987P) Foldon construct
MFVFLVLLPLVSSQCVNLTTRTQLPPANTNSFTRGVYYPDKVFRSSVLHSTQDLFLPFFSNVTWFHAIHVSGTNGTKRFDNPVLPFNDGVYFASTEKSNIIRGWIFGTTLDSKTQSLLIVNNATNVVIKVCEFQFCNDPFLGVYYHKNNKSWMESEFRVYSSANNCTFEYVSQPFLMDLEGKQGNFKNLREFVFKNIDGYFKIYSKHTPINLVRDLPQGFSALEPLVDLPIGINITRFQTLLALHRSYLTPGDSSSGWTAGAAAYYVGYLQPRTFLLKYNENGTITDAVDCALDPLSETKCTLKSFTVEKGIYQTSNFRVQPTESIVRFPNITNLCPFGEVFNATRFASVYAWNRKRISNCVADYSVLYNSASFSTFKCYGVSPTKLNDLCFTNVYADSFVIRGDEVRQIAPGQTGKIADYNYKLPDDFTGCVIAWNSNNLDSKVGGNYNYLYRLFRKSNLKPFERDISTEIYQAGSTPCNGVEGFNCYFPLQSYGFQPTNGVGYQPYRVVVLSFELLHAPATVCGPKKSTNLVKNKCVNFNFNGLTGTGVLTESNKKFLPFQQFGRDIADTTDAVRDPQTLEILDITPCSFGGVSVITPGTNTSNQVAVLYQDVNCTEVPVAIHADQLTPTWRVYSTGSNVFQTRAGCLIGAEHVNNSYECDIPIGAGICASYQTQTNSPRRARSVASQSIIAYTMSLGAENSVAYSNNSIAIPTNFTISVTTEILPVSMTKTSVDCTMYICGDSTECSNLLLQYGSFCTQLNRALTGIAVEQDKNTQEVFAQVKQIYKTPPIKDFGGFNFSQILPDPSKPSKRSFIEDLLFNKVTLADAGFIKQYGDCLGDIAARDLICAQKFNGLTVLPPLLTDEMIAQYTSALLAGTITSGWTFGAGAALQIPFAMQMAYRFNGIGVTQNVLYENQKLIANQFNSAIGKIQDSLSSTASALGKLQDVVNQNAQALNTLVKQLSSNFGAISSVLNDILSRLDPPEAEVQIDRLITGRLQSLQTYVTQQLIRAAEIRASANLAATKMSECVLGQSKRVDFCGKGYHLMSFPQSAPHGVVFLHVTYVPAQEKNFTTAPAICHDGKAHFPREGVFVSNGTHWFVTQRNFYEPQIITTDNTFVSGNCDVVIGIVNNTVYDPLQPELDSGGSGYIPEAPRDGQAYVRKDGEWVLLSTFL

SEQ ID NO: 9761 - protein, 1177 aa, Artificial Sequence
  SARS-CoV-2/USA/WA-UW292/2020__EPI_ISL_418077 spike protein (1-1147)(K986P_V987P) Foldon construct
MFVFLVLLPLVSSQCVNLTTRTQLPPAYTNSFTRGVYYPDKVFRSSVLHSTQDLFLPFFSNVTWFHAIHVSGTNGTKRFDNPVLPFNDGVYFASTEKSNIIRGWIFGTTLDSKTQSLLIVNNATNVVIKVCEFQFCNDPFLGVYYHKNNKSWMESEFRVYSSANNCTFEYVSQPFLMDLEGKQGNFKNLREFVFKNIDGYFKIYSKHTPINLVRDLPQGFSALEPLVDLPIGINITRFQTLLALHRSYLTPGDSSSGWTAGAAAYYVGYLQPRTFLLKYNENGTITDAVDCALDPLSETKCTLKSFTVEKGIYQTSNFRVQPTESIVRFPNITNLCPFGEVFNATRFASVYAWNRKRISNCVADYSVLYNSASFSTFKCYGVSPTKLNDLCFTNVYADSFVIRGDEVRQIAPGQTGKIADYNYKLPDDFTGCVIAWNSNNLDSKVGGNYNYLYRLFRKSNLKPFERDISTEIYQASSTPCNGVEGFNCYFPLQSYGFQPTNGVGYQPYRVVVLSFELLHAPATVCGPKKSTNLVKNKCVNFNFNGLTGTGVLTESNKKFLPFQQFGRDIADTTDAVRDPQTLEILDITPCSFGGVSVITPGTNTSNQVAVLYQDVNCTEVPVAIHADQLTPTWRVYSTGSNVFQTRAGCLIGAEHVNNSYECDIPIGAGICASYQTQTNSPRRARSVASQSIIAYTMSLGAENSVAYSNNSIAIPTNFTISVTTEILPVSMTKTSVDCTMYICGDSTECSNLLLQYGSFCTQLNRALTGIAVEQDKNTQEVFAQVKQIYKTPPIKDFGGFNFSQILPDPSKPSKRSFIEDLLFNKVTLADAGFIKQYGDCLGDIAARDLICAQKFNGLTVLPPLLTDEMIAQYTSALLAGTITSGWTFGAGAALQIPFAMQMAYRFNGIGVTQNVLYENQKLIANQFNSAIGKIQDSLSSTASALGKLQDVVNQNAQALNTLVKQLSSNFGAISSVLNDILSRLDPPEAEVQIDRLITGRLQSLQTYVTQQLIRAAEIRASANLAATKMSECVLGQSKRVDFCGKGYHLMSFPQSAPHGVVFLHVTYVPAQEKNFTTAPAICHDGKAHFPREGVFVSNGTHWFVTQRNFYEPQIITTDNTFVSGNCDVVIGIVNNTVYDPLQPELDSGGSGYIPEAPRDGQAYVRKDGEWVLLSTFL

SEQ ID NO: 9762 - protein, 1177 aa, Artificial Sequence
  SARS-CoV-2/Iceland/192/2020__EPI_ISL_417819 spike protein (1-1147)(K986P_V987P) Foldon construct
MFVFFVLLPLVSSQCVNLTTRTQLPPAYTNSFTRGVYYPDKVFRSSVLHSTQDLFLPFFSNVTWFHAIHVSGTNGTKRFDNPVLPFNDGVYFASTEKSNIIRGWIFGTTLDSKTQSLLIVNNATNVVIKVCEFQFCNDPFLGVYYHKNNKSWMESEFRVYSSANNCTFEYVSQPFLMDLEGKQGNFKNLREFVFKNIDGYFKIYSKHTPINLVRDLPQGFSALEPLVDLPIGINITRFQTLLALHRSYLTPGDSSSGWTAGAAAYYVGYLQPRTFLLKYNENGTITDAVDCALDPLSETKCTLKSFTVEKGIYQTSNFRVQPTESIVRFPNITNLCPFGEVFNATRFASVYAWNRKRISNCVADYSVLYNSASFSTFKCYGVSPTKLNDLCFTNVYADSFVIRGDEVRQIAPGQTGKIADYNYKLPDDFTGCVIAWNSNNLDSKVGGNYNYLYRLFRKSNLKPFERDISTEIYQAGSTPCNGVEGFNCYFPLQSYGFQPTNGVGYQPYRVVVLSFELLHAPATVCGPKKSTNLVKNKCVNFNFNGLTGTGVLTESNKKFLPFQQFGRDIADTTDAVRDPQTLEILDITPCSFGGVSVITPGTNTSNQVAVLYQGVNCTEVPVAIHADQLTPTWRVYSTGSNVFQTRAGCLIGAEHVNNSYECDIPIGAGICASYQTQTNSPRRARSVASQSIIAYTMSLGAENSVAYSNNSIAIPTNFTISVTTEILPVSMTKTSVDCTMYICGDSTECSNLLLQYGSFCTQLNRALTGIAVEQDKNTQEVFAQVKQIYKTPPIKDFGGFNFSQILPDPSKPSKRSFIEDLLFNKVTLADAGFIKQYGDCLGDIAARDLICAQKFNGLTVLPPLLTDEMIAQYTSALLAGTITSGWTFGAGAALQIPFAMQMAYRFNGIGVTQNVLYENQKLIANQFNSAIGKIQDSLSSTASALGKLQDVVNQNAQALNTLVKQLSSNFGAISSVLNDILSRLDPPEAEVQIDRLITGRLQSLQTYVTQQLIRAAEIRASANLAATKMSECVLGQSKRVDFCGKGYHLMSFPQSAPHGVVFLHVTYVPAQEKNFTTAPAICHDGKAHFPREGVFVSNGTHWFVTQRNFYEPQIITTDNTFVSGNCDVVIGIVNNTVYDPLQPELDSGGSGYIPEAPRDGQAYVRKDGEWVLLSTFL

SEQ ID NO: 9763 - protein, 1177 aa, Artificial Sequence
  SARS-CoV-2/Belgium/ULG-6939/2020__EPI_ISL_417020 spike protein (1-1147)(K986P_V987P) Foldon construct
MFVFLVLLPLVSSQCVNLTTRTQLPPAYTNSFTRGVYYPDKVFRSSVLHSTQDLFLPFFSNVTWFHAIHVSGTNGTKRFDNPVLPFNDGVYFASTEKSNIIRGWIFGTTLDSKTQSLLIVNNATNVVIKVCEFQFCNDPFLGVYYHKNNKSWMESEFRVYSSANNCTFEYVSQPFLMDLEGKQGNFKNLREFVFKNIDGYFKIYSKHTPINLVRDLPQGFSALEPLVDLPIGINITRFQTLLALHRSYLTPGDSSSGWTAGAAAYYVGYLQPRTFLLKYNENGTITDAVDCALDPLSETKCTLKSFTVEKGIYQTSNFRVQPTESIVRFPNITNLCPFGEVFNATRFASVYAWNRKRISNCVADYSVLYNSASFSTFKCYGVSPTKLNDLCFTNVYADSFVIRGDEVRQIAPGQTGKIADYNYKLPDDFTGCVIAWNSNNLDSKVGGNYNYLYRLFRKSNLKPFERDISTEIYQAGSTPCNGVEGFNCYFPLQSYGFQPTNGVGYQPYRVVVLSFELLHAPATVCGPKKSTNLVKNKCVNFNFNGLTGTGVLTESNKKFLPFQQFGRDIADTTDAVRDPQTLEILDITPCSFGGVSVITPGTNTSNQVAVLYQGVNCTEVPVAIHADQLTPTWRVYSTGSNVFQTRAGCLIGAEHVNNSYECDIPIGAGICASYQTQTNSPRRARSVASQSIIAYTMSLGAENSVVYSNNSIAIPTNFTISVTTEILPVSMTKTSVDCTMYICGDSTECSNLLLQYGSFCTQLNRALTGIAVEQDKNTQEVFAQVKQIYKTPPIKDFGGFNFSQILPDPSKPSKRSFIEDLLFNKVTLADAGFIKQYGDCLGDIAARDLICAQKFNGLTVLPPLLTDEMIAQYTSALLAGTITSGWTFGAGAALQIPFAMQMAYRFNGIGVTQNVLYENQKLIANQFNSAIGKIQDSLSSTASALGKLQDVVNQNAQALNTLVKQLSSNFGAISSVLNDILSRLDPPEAEVQIDRLITGRLQSLQTYVTQQLIRAAEIRASANLAATKMSECVLGQSKRVDFCGKGYHLMSFPQSAPHGVVFLHVTYVPAQEKNFTTAPAICHDGKAHFPREGVFVSNGTHWFVTQRNFYEPQIITTDNTFVSGNCDVVIGIVNNTVYDPLQPELDSGGSGYIPEAPRDGQAYVRKDGEWVLLSTFL

SEQ ID NO: 9764 - protein, 1177 aa, Artificial Sequence
  SARS-CoV-2/France/HF2496/2020__EPI_ISL_418231 spike protein (1-1147)(K986P_V987P) Foldon construct
MFVFLVLLPLVSSQCVNLTTRTQLPPAYTNSFTRGVYYPDKVFRSSVLHSTQDLFLPFFSNVTWFHAIHVSGTNGTKRFDNPVLPFNDGVYFASTEKSNIIRGWIFGTTLDSKTQSLLIVNNATNVVIKVCEFQFCNDPFLGVYYHKNNKSWMESEFRVYSSANNCTFEYVSQPFLMDLEGKQGNFKNLREFVFKNIDGYFKIYSKHTPINLVRDLPQGFSALEPLVDLPIGINITRFQTLLALHRSYLTPGDSSSGWTAGAAAYYVGYLQPRTFLLKYNENGTITDAVDCALDPLSETKCTLKSFTVEKGIYQTSNFRVQPTESIVRFPNITNLCPFGEVFNATRFASVYAWNRKRISNCVADYSVLYNSASFSTFKCYGVSPTKLNDLCFTNVYADSFVIRGDEVRQIAPGQTGKIADYNYKLPDDFTGCVIAWNSNNLDSKVGGNYNYLYRLFRKSNLKPFERDISTEIYQAGSTPCNGVEGFNCYFPLQSYGFQPTNGVGYQPYRVVVLSFELLHAPATVCGPKKSTNLVKNKCVNFNFNGLTGTGVLTESNKKFLPFQQFGRDIADTTDAVRDPQTLEILDITPCSFGGVSVITPGTNTSNQVAVLYQGVNCTEVPVAIHADQLTPTWRVYSTGSNVFQTRAGCLIGAEHVNNSYECDIPIGAGICASYQTQTNSPRRARSVASQSIIAYTMSLGAENSVAYSNNSIAIPTNFTISVTTEILPVSMTKTSVDCTMYICGDSTECSNLLLQYGSFCTQLNRALTGIAVEQDKNTQEVFAQVKQIYKTPPIKDFGGFNFSQILPDPSKPSKRSFIEDLLFNKVTLADAGFIKQYGDCLGDIVARDLICAQKFNGLTVLPPLLTDEMIAQYTSALLAGTITSGWTFGAGAALQIPFAMQMAYRFNGIGVTQNVLYENQKLIANQFNSAIGKIQDSLSSTASALGKLQDVVNQNAQALNTLVKQLSSNFGAISSVLNDILSRLDPPEAEVQIDRLITGRLQSLQTYVTQQLIRAAEIRASANLAATKMSECVLGQSKRVDFCGKGYHLMSFPQSAPHGVVFLHVTYVPAQEKNFTTAPAICHDGKAHFPREGVFVSNGTHWFVTQRNFYEPQIITTDNTFVSGNCDVVIGIVNNTVYDPLQPELDSGGSGYIPEAPRDGQAYVRKDGEWVLLSTFL

SEQ ID NO: 9765 - protein, 1177 aa, Artificial Sequence
  SARS-CoV-2/USA/WA-UW291/2020__EPI_ISL_418076 spike protein (1-1147)(K986P_V987P) Foldon construct
MFVFLVLLPLVSSQCVNLTTRTQLPPAYTNSFTRGVYYPDKVFRSSVLHSTQDLFLPFFSNVTWFHAIHVSGTNGTKRFDNPVLPFNDGVYFASTEKSNIIRGWIFGTTLDSKTQSLLIVNNATNVVIKVCEFQFCNDPFLGVYYHKNNKSWMESEFRVYSSANNCTFEYVSQPFLMDLEGKQGNFKNLREFVFKNIDGYFKIYSKHTPINLVRDLPQGFSALEPLVDLPIGINITRFQTLLALHRSYLTPGDSSSGWTAGAAAYYVGYLQPRTFLLKYNENGTITDAVDCALDPLSETKCTLKSFTVEKGIYQTSNFRVQPTESIVRFPNITNLCPFGEVFNATRFASVYAWNRKRISNCVADYSVLYNSASFSTFKCYGVSPTKLNDLCFTNVYADSFVIRGDEVRQIAPGQTGKIADYNYKLPDDFTGCVIAWNSNNLDSKVGGNYNYLYRLFRKSNLKPFERDISTEIYQAGSTPCNGVEGFNCYFPLQSYGFQPTNGVGYQPYRVVVLSFELLHAPATVCGPKKSTNLVKNKCVNFNFNGLTGTGVLTESNKKFLPFQQFGRDIADTTDAVRDPQTLEILDITPCSFGGVSVITPGTNTSNQVAVLYQGVNCTEVPVAIHADQLTPTWRVYSTGSNVFQTRAGCLIGAEHVNNSYECDIPIGAGICASYQTQTNSPRRARSVASQSIIAYTMSLGAENSVAYSNNSIAIPTNFTISVTTEILPVSMTKTSVDCTMYICGDSTECSNLLLQYGSFCTQLNRALTGIAVEQDKNTQEVFAQVKQIYKTPPIKDFGGFNFSQILPDPSKPSKRSFIEDLLFNKVTLADAGFIKQYGDCLGDIAARDLICAQKFNGLTVLPPLLTDEMIAQYTSALLAGTITSGWTFGAGAALQIPFAMQMAYRFNGIGVTQNVLYENQKLIANQFNSAIGKIQYSLSSTASALGKLQDVVNQNAQALNTLVKQLSSNFGAISSVLNDILSRLDPPEAEVQIDRLITGRLQSLQTYVTQQLIRAAEIRASANLAATKMSECVLGQSKRVDFCGKGYHLMSFPQSAPHGVVFLHVTYVPAQEKNFTTAPAICHDGKAHFPREGVFVSNGTHWFVTQRNFYEPQIITTDNTFVSGNCDVVIGIVNNTVYDPLQPELDSGGSGYIPEAPRDGQAYVRKDGEWVLLSTFL

SEQ ID NO: 9766 - protein, 1177 aa, Artificial Sequence; identical to SEQ ID NO: 9729
  SARS-CoV-2/Portugal/PT0034/2020__EPI_ISL_418019 spike protein (1-1147)(K986P_V987P) Foldon construct

SEQ ID NO: 9767 - protein, 1177 aa, Artificial Sequence; identical to SEQ ID NO: 9721
  SARS-CoV-2/Iceland/202/2020__EPI_ISL_417750 spike protein (1-1147)(K986P_V987P) Foldon construct

SEQ ID NO: 9768 - protein, 1177 aa, Artificial Sequence
  SARS-CoV-2/USA/WA-UW261/2020__EPI_ISL_418046 spike protein (1-1147)(K986P_V987P) Foldon construct
MFVFLVLLPLVSSQCVNLTTRTQLPPAYTNSFTRGVYYPDKVFRSSVLHSTQDLFLPFFSNVTWFHAIHVSGTNGTKRFDNPVLPFNDGVYFASTEKSNIIRGWIFGTTLDSKTQSLLIVNNATNVVIKVCEFQFCNDPFLGVYYHKNNKSWMESEFRVYSSANNCTFEYVSQPFLMDLEGKQGNFKNLREFVFKNIDGYFKIYSKHTPINLVRDLPQGFSALEPLVDLPIGINITRFQTLLALHRSYLTPGDSSSGWTAGAAAYYVGYLQPRTFLLKYNENGTITDAVDCALDPLSETKCTLKSFTVEKGIYQTSNFRVQPTESIVRFPNITNLCPFGEVFNATRFTSVYAWNRKRISNCVADYSVLYNSASFSTFKCYGVSPTKLNDLCFTNVYADSFVIRGDEVRQIAPGQTGKIADYNYKLPDDFTGCVIAWNSNNLDSKVGGNYNYLYRLFRKSNLKPFERDISTEIYQAGSTPCNGVEGFNCYFPLQSYGFQPTNGVGYQPYRVVVLSFELLHAPATVCGPKKSTNLVKNKCVNFNFNGLTGTGVLTESNKKFLPFQQFGRDIADTTDAVRDPQTLEILDITPCSFGGVSVITPGTNTSNQVAVLYQDVNCTEVPVAIHADQLTPTWRVYSTGSNVFQTRAGCLIGAEHVNNSYECDIPIGAGICASYQTQTNSPRRARSVASQSIIAYTMSLGAENSVAYSNNSIAIPTNFTISVTTEILPVSMTKTSVDCTMYICGDSTECSNLLLQYGSFCTQLNRALTGIAVEQDKNTQEVFAQVKQIYKTPPIKDFGGFNFSQILPDPSKPSKRSFIEDLLFNKVTLADAGFIKQYGDCLGDIAARDLICAQKFNGLTVLPPLLTDEMIAQYTSALLAGTITSGWTFGAGAALQIPFAMQMAYRFNGIGVTQNVLYENQKLIANQFNSAIGKIQDSLSSTASALGKLQDVVNQNAQALNTLVKQLSSNFGAISSVLNDILSRLDPPEAEVQIDRLITGRLQSLQTYVTQQLIRAAEIRASANLAATKMSECVLGQSKRVDFCGKGYHLMSFPQSAPHGVVFLHVTYVPAQEKNFTTAPAICHDGKAHFPREGVFVSNGTHWFVTQRNFYEPQIITTDNTFVSGNCDVVIGIVNNTVYDPLQPELDSGGSGYIPEAPRDGQAYVRKDGEWVLLSTFL

SEQ ID NO: 9769 - protein, 1177 aa, Artificial Sequence
  SARS-CoV-2/Portugal/PT0035/2020__EPI_ISL_418020 spike protein (1-1147)(K986P_V987P) Foldon construct
MFVFLVLLPLVSSQCVNLTTRTQLPPAYTNSFTRGVYYPDKVFRSSVLHSTQDLFLPFFSNVTWFHAIHVSGTNGTKRFDNPVLPFNDGVYFASTEKSNIIRGWIFGTTLDSKTQSLLIVNNATNVVIKVCEFQFCNDPFLGVYYHKNNKSWMESEFRVYSSANNCTFEYVSQPFLMDLEGKQGNFKNLREFVFKNIDGYFKIYSKHTPINLVRDLPQGFSALEPLVDLPIGINITRFQTLLALHRSYLTPGDSSSGWTAGAAAYYVGYLQPRTFLLKYNENGTITDAVDCALDPLSETKCTLKSFTVEKGIYQTSNFRVQPTESIVRFPNITNLCPFGEVFNATRFASVYAWNRKRISNCVADYSVLYNSASFSTFKCYGVSPTKLNDLCFTNVYADSFVIRGDEVRQIAPGQTGKIADYNYKLPDDFTGCVIAWNSNNLDSKVGGNYNYLYRLFRKSNLKPFERDISTEIYQAGSTPCNGVEGFNCYFPLQSYGFQPTNGVGYQPYRVVVLSFELLHAPATVCGPKKSTNLVKNKCVNFNFNGLTGTGVLTESNKKFLPFQQFGRDIADTTDAVRDPQTLEILDITPCSFGGVSVITPGTNTSNQVAVLYQDVNCTEVPVAIHADQLTPTWRVYSTGSNVFQTRAGCLIGAEHVNNSYECDIPIGAGICASYQTQTNSPRRARSVASQSIIAYTMSLGAENSVAYSNNSIAIPTNFTISVTTEILPVSMTKTSVDCTMYICGDSTECSNLLLQYGSFCTQLNRALTGIAVEQDKNTQEVFAQVKQIYKTPPIKDFGGFNFSQILPDPSKPSKRSFIEDLLFNKVTLADAGFIKQYGDCLGDISARDLICAQKFNGLTVLPPLLTDEMIAQYTSALLAGTITSGWTFGAGAALQIPFAMQMAYRFNGIGVTQNVLYENQKLIANQFNSAIGKIQDSLSSTASALGKLQDVVNQNAQALNTLVKQLSSNFGAISSVLNDILSRLDPPEAEVQIDRLITGRLQSLQTYVTQQLIRAAEIRASANLAATKMSECVLGQSKRVDFCGKGYHLMSFPQSAPHGVVFLHVTYVPAQEKNFTTAPAICHDGKAHFPREGVFVSNGTHWFVTQRNFYEPQIITTDNTFVSGNCDVVIGIVNNTVYDPLQPELDSGGSGYIPEAPRDGQAYVRKDGEWVLLSTFL

SEQ ID NO: 9770 - protein, 1177 aa, Artificial Sequence
  SARS-CoV-2/USA/NY-NYUMC7/2020__EPI_ISL_418192 spike protein (1-1147)(K986P_V987P) Foldon construct
MFVFLVLLPLVSSQCVNLTTRTQLPPAYTNSFTRGVYYPDKVFRSSVLHSTQDLFLPFFSNVTWFHAIHVSGTNGTKRFDNPVLPFNDGVYFASTEKSNIIRGWIFGTTLDSKTQSLLIVNNATNVVIKVCEFQFCNDPFLGVYHHKNNKSWMESEFRVYSSANNCTFEYVSQPFLMDLEGKQGNFKNLREFVFKNIDGYFKIYSKHTPINLVRDLPQGFSALEPLVDLPIGINITRFQTLLALHRSYLTPGDSSSGWTAGAAAYYVGYLQPRTFLLKYNENGTITDAVDCALDPLSETKCTLKSFTVEKGIYQTSNFRVQPTESIVRFPNITNLCPFGEVFNATRFASVYAWNRKRISNCVADYSVLYNSASFSTFKCYGVSPTKLNDLCFTNVYADSFVIRGDEVRQIAPGQTGKIADYNYKLPDDFTGCVIAWNSNNLDSKVGGNYNYLYRLFRKSNLKPFERDISTEIYQAGSTPCNGVEGFNCYFPLQSYGFQPTNGVGYQPYRVVVLSFELLHAPATVCGPKKSTNLVKNKCVNFNFNGLTGTGVLTESNKKFLPFQQFGRDIADTTDAVRDPQTLEILDITPCSFGGVSVITPGTNTSNQVAVLYQGVNCTEVPVAIHADQLTPTWRVYSTGSNVFQTRAGCLIGAEHVNNSYECDIPIGAGICASYQTQTNSPRRARSVASQSIIAYTMSLGAENSVAYSNNSIAIPTNFTISVTTEILPVSMTKTSVDCTMYICGDSTECSNLLLQYGSFCTQLNRALTGIAVEQDKNTQEVFAQVKQIYKTPPIKDFGGFNFSQILPDPSKPSKRSFIEDLLFNKVTLADAGFIKQYGDCLGDIAARDLICAQKFNGLTVLPPLLTDEMIAQYTSALLAGTITSGWTFGAGAALQIPFAMQMAYRFNGIGVTQNVLYENQKLIANQFNSAIGKIQDSLSSTASALGKLQDVVNQNAQALNTLVKQLSSNFGAISSVLNDILSRLDPPEAEVQIDRLITGRLQSLQTYVTQQLIRAAEIRASANLAATKMSECVLGQSKRVDFCGKGYHLMSFPQSAPHGVVFLHVTYVPAQEKNFTTAPAICHDGKAHFPREGVFVSNGTHWFVTQRNFYEPQIITTDNTFVSGNCDVVIGIVNNTVYDPLQPELDSGGSGYIPEAPRDGQAYVRKDGEWVLLSTFL

SEQ ID NO: 9771 - protein, 1177 aa, Artificial Sequence
  SARS-CoV-2/Iceland/189/2020__EPI_ISL_417709 spike protein (1-1147)(K986P_V987P) Foldon construct
MFVFLVLLPLVSSQCVNLTTRTQLPPAYTNSFTRGVYYPDKVFRSSVLHSTQDLFLPFFSNVTWFHAIHVSGTNGTKRFDNPVLPFNDGVYFASTEKSNIIRGWIFGTTLDSKTQSLLIVNNATNVVIKVCEFQFCNDPFLGVYYHKNNKSWMESEFRVYSSANNCTFEYVSQPFLMDLEGKQGNFKNLREFVFKNIDGYFKIYSKHTPINLVRDLPQGFSALEPLVDLPIGINITRFQTLLALHRSYLTPGDSSSGWTAGAAAYYVGYLQPRTFLLKYNENGTITDAVDCALDPLSETKCTLKSFTVEKGIYQTSNFRVQPTESIVRFPNITNLCPFGEVFNATRFASVYAWNRKRISNCVADYSVLYNSASFSTFKCYGVSPTKLNDLCFTNVYADSFVIRGDEVRQIAPGQTGKIADYNYKLPDDFTGCVIAWNSNNLDSKVGGNYNYLYRLFRKSNLKPFERDISTEIYQAGSTPCNGVEGFNCYFPLQSYGFQPTNGVGYQPYRVVVLSFELLHAPATVCGPKKSTNLVKNKCVNFNFNGLTGTGVLTESNKKFLPFQQFGRDIADTTDAVRDPQTLEILDITPCSFGGVSVITPGTNTSNQVAVLYQGVNCTEVPVAIHADQLTPTWRVYSTGSNVFQTRAGCLIGAEHVNNSYECDIPIGAGICASYQTQTNSPRRARSVASQSIIAYTMSLGAENSVAYSNNSIAIPTNFTISVTTEILPVSMTKTSVDCTMYICGDSTECSNLLLQYGSFCTQLNRALTGIAVEQDKNTQEVFAQVKQIYKTPPIKDFGGFNFSQILPDPSKPSKRSFIEDLLFNKVTLADAGFTKQYGDCLGDIAARDLICAQKFNGLTVLPPLLTDEMIAQYTSALLAGTITSGWTFGAGAALQIPFAMQMAYRFNGIGVTQNVLYENQKLIANQFNSAIGKIQDSLSSTASALGKLQDVVNQNAQALNTLVKQLSSNFGAISSVLNDILSRLDPPEAEVQIDRLITGRLQSLQTYVTQQLIRAAEIRASANLAATKMSECVLGQSKRVDFCGKGYHLMSFPQSAPHGVVFLHVTYVPAQEKNFTTAPAICHDGKAHFPREGVFVSNGTHWFVTQRNFYEPQIITTDNTFVSGNCDVVIGIVNNTVYDPLQPELDSGGSGYIPEAPRDGQAYVRKDGEWVLLSTFL

SEQ ID NO: 9772 - protein, 1177 aa, Artificial Sequence
  SARS-CoV-2/Australia/NSW56/2020__EPI_ISL_417408 spike protein (1-1147)(K986P_V987P) Foldon construct
MFVFLVLLPLVSSQCVNLTTRTQLPPAYTNSFTRGVYYPDKVFRSSVLHSTQDLFLPFFSNVTWFHAIHVSGTNGTKRFDNPVLPFNDGVYFASTEKSNIIRGWIFGTTLDSKTQSLLIVNNATNVVIKVCEFQFCNDPFLGVYYHKNNKSWMESEFRVYSSANNCTFEYVSQPFLMDLEGKQGNFKNLREFVFKNIDGYFKIYSKHTPINLVRDLPQGFSALEPLVDLPIGINITRFQTLLALHRSYLTPGDSSSGWTAGAAAYYVGYLQPRTFLLKYNENGTITDAVDCALDPLSETKCTLKSFTVEKGIYQTSNFRVQPTESIVRFPNITNLCPFGEVFNATRFASVYAWNRKRISNCVADYSVLYNSASFSTFKCYGVSPTKLNDLCFTNVYADSFVIRGDEVRQIAPGQTGKIADYNYKLPDDFTGCVIAWNSNNLDSKVGGNYNYLYRLFRKSNLKPFERDISTEIYQAGSTPCNGVEGFNCYFPLQSYGFQPTNGVGYQPYRVVVLSFELLHAPATVCGPKKSTNLVKNKCVNFNFNGLTGTGVLTESNKKFLPFQQFGRDIADTTDAVRDPQTLEILDITPCSFGGVSVITPGTNTSNQVAVLYQDVNCTEVPVAIHADQLTPTWRVYSTGSNVFQTRAGCLIGAEHVNNSYECDIPIGAGICASYQTQTNSPRRARSVASQSIIAYTMSLGAENSVAYSNNSIAIPTNFTISVTTEILPVSMTKTSVDCTMYICGDSTECSNLLLQYGSFCTQLNRALTGIAVEQDKNTQEVFAQVKQIYKTPPIKDFGGFNFSQILPDSSKPSKRSFIEDLLFNKVTLADAGFIKQYGDCLGDIAARDLICAQKFNGLTVLPPLLTDEMIAQYTSALLAGTITSGWTFGAGAALQIPFAMQMAYRFNGIGVTQNVLYENQKLIANQFNSAIGKIQDSLSSTASALGKLQDVVNQNAQALNTLVKQLSSNFGAISSVLNDILSRLDPPEAEVQIDRLITGRLQSLQTYVTQQLIRAAEIRASANLAATKMSECVLGQSKRVDFCGKGYHLMSFPQSAPHGVVFLHVTYVPAQEKNFTTAPAICHDGKAHFPREGVFVSNGTHWFVTQRNFYEPQIITTDNTFVSGNCDVVIGIVNNTVYDPLQPELDSGGSGYIPEAPRDGQAYVRKDGEWVLLSTFL

SEQ ID NO: 9773 - protein, 1177 aa, Artificial Sequence
  SARS-CoV-2/Iceland/280/2020__EPI_ISL_417608 spike protein (1-1147)(K986P_V987P) Foldon construct
MFVFLVLLPLVSSQCVNLTTRTQLPPAYTNSFTRGVYYPDKVFRSSVLHSTQDLFLPFFSNVTWFHAIHVSGTNGTKRFDNPVLPFNDGVYFASTEKSNIIRGWIFGTTLDSKTQSLLIVNNATNVVIKVCEFQFCNDPFLGVYYHKNNKSWMESEFRVYSSANNCTFEYVSQPFLMDLEGKQGNFKNLREFVFKNIDGYFKIYSKHTPINLVRDLPQGFSALEPLVDLPIGINITRFQTLLALHRSYLTPGDSSSGWTAGAAAYYVGYLQPRTFLLKYNENGTITDAVDCALDPLSETKCTLKSFTVEKGIYQTSNFRVQPTESIVRFPNITNLCPFGEVFNATRFASVYAWNRKRISNCVADYSVLYNSASFSTFKCYGVSPTKLNDLCFTNVYADSFVIRGDEVRQIAPGQTGKIADYNYKLPDDFTGCVIAWNSNNLDSKVGGNYNYLYRLFRKSNLKPFERDISTEIYQAGSTPCNGVEGFNCYFPLQSYGFQPTNGVGYQPYRVVVLSFELLHAPATVCGPKKSTNLVKNKCVNFNFNGLTGTGVLTESNKKFLPFQQFGRDIADTTDAVRDPQTLEILDITPCSFGGVSVITPGTNTSNQVAVLYQGVNCTEVPVAIHADQLTPTWRVYSTGSNVFQTRAGCLIGAEHVNNSYECDIPIGAGICASYHTQTNSPRRARSVASQSIIAYTMSLGAENSVAYSNNSIAIPTNFTISVTTEILPVSMTKTSVDCTMYICGDSTECSNLLLQYGSFCTQLNRALTGIAVEQDKNTQEVFAQVKQIYKTPPIKDFGGFNFSQILPDPSKPSKRSFIEDLLFNKVTLADAGFIKQYGDCLGDIAARDLICAQKFNGLTVLPPLLTDEMIAQYTSALLAGTITSGWTFGAGAALQIPFAMQMAYRFNGIGVTQNVLYENQKLIANQFNSAIGKIQDSLSSTASALGKLQDVVNQNAQALNTLVKQLSSNFGAISSVLNDILSRLDPPEAEVQIDRLITGRLQSLQTYVTQQLIRAAEIRASANLAATKMSECVLGQSKRVDFCGKGYHLMSFPQSAPHGVVFLHVTYVPAQEKNFTTAPAICHDGKAHFPREGVFVSNGTHWFVTQRNFYEPQIITTDNTFVSGNCDVVIGIVNNTVYDPLQPELDSGGSGYIPEAPRDGQAYVRKDGEWVLLSTFL

SEQ ID NO: 9774 - protein, 1177 aa, Artificial Sequence; identical to SEQ ID NO: 9729
  SARS-CoV-2/Iceland/247/2020__EPI_ISL_417575 spike protein (1-1147)(K986P_V987P) Foldon construct

SEQ ID NO: 9775 - protein, 1177 aa, Artificial Sequence
  SARS-CoV-2/Iceland/238/2020__EPI_ISL_417566 spike protein (1-1147)(K986P_V987P) Foldon construct
MFVFLVLLPLVSSQCVNLTTRTQLPPAYTNSFTRGVYYPDKVFRSSVLHSTQDLFLPFFSNVTWFHAIHVSGTNGTKRFDNPVLPFNDGVYFASTEKSNIIRGWIFGTTLDSKTQSLLIVNNATNVVIKVCEFQFCNDPFLGVYYHKNNKSWMESEFRVYSSANNCTFEYVSQPFLMDLEGKQGNFKNLREFVFKNIDGYFKIYSKHTPINLVRDLPQGFSALEPLVDLPIGINITRFQTLLALHRSYLTPGDSSSGWTAGAAAYYVGYLQPRTFLLKYNENGTITDAVDCALDPLSETKCTLKSFTVEKGIYQTSNFRVQPTESIVRFPNITNLCPFGEVFNATRFASVYAWNRKRISNCVADYSVLYNSASFSTFKCYGVSPTKLNDLCFTNVYADSFVIRGDEVRQIAPGQTGKIADYNYKLPDDFTGCVIAWNSNNLDSKVGGNYNYLYRLFRKSNLKPFERDISTEIYQAGSTPCNGVEGFNCYFPLQSYGFQPTNGVGYQPYRVVVLSFELLHAPATVCGPKKSTNLVKNKCVNFNFNGLTGTGVLTESNKKFLPFQQFGRDIADTTDAVRDPQTLEILDITPCSFGGVSVITPGTNTSNQVAVLYQGVNCTEVPVAIHADQLTPTWRVYSTGSNVFQTRAGCLIGAEHVNNSYECDIPIGAGICASYQTQTNSPRRARSVASQSIIAYTMSLGAENSVAYSNNSIAIPTNFTISVTTEILPVSMTKTSVDCTMYICGDSTECSNLLLQYGSFCTQLNRALTGIAVEQDKNTQEVFAQVKQIYKTPPIKDFGGFNFSQILPDPSKPSKRSFIEDLLFNKVTLADVGFIKQYGDCLGDIAARDLICAQKFNGLTVLPPLLTDEMIAQYTSALLAGTITSGWTFGAGAALQIPFAMQMAYRFNGIGVTQNVLYENQKLIANQFNSAIGKIQDSLSSTASALGKLQDVVNQNAQALNTLVKQLSSNFGAISSVLNDILSRLDPPEAEVQIDRLITGRLQSLQTYVTQQLIRAAEIRASANLAATKMSECVLGQSKRVDFCGKGYHLMSFPQSAPHGVVFLHVTYVPAQEKNFTTAPAICHDGKAHFPREGVFVSNGTHWFVTQRNFYEPQIITTDNTFVSGNCDVVIGIVNNTVYDPLQPELDSGGSGYIPEAPRDGQAYVRKDGEWVLLSTFL

SEQ ID NO: 9776 - protein, 1177 aa, Artificial Sequence
  SARS-CoV-2/Greece/16/2020__EPI_ISL_418265 spike protein (1-1147)(K986P_V987P) Foldon construct
MFVFLVLLPLVSSQCVNLTTRTQLPPAYTNSFTRGVYYPDKVFRSSVLHSTQDLFLPFFSNVTWFHAIHVSGTNGTKRFDNPVLPFNDGVYFASTEKSNIIRGWIFGTTLDSKTQSLLIVNNATNVVIKVCEFQFCNDPFLGVYYHKNNKSWMESEFRVYSSANNCTFEYVSQPFLMDLEGKQGNFKNLREFVFKNVDGYFKIYSKHTPINLVRDLPQGFSALEPLVDLPIGINITRFQTLLALHRSYLTPGDSSSGWTAGAAAYYVGYLQPRTFLLKYNENGTITDAVDCALDPLSETKCTLKSFTVEKGIYQTSNFRVQPTESIVRFPNITNLCPFGEVFNATRFASVYAWNRKRISNCVADYSVLYNSASFSTFKCYGVSPTKLNDLCFTNVYADSFVIRGDEVRQIAPGQTGKIADYNYKLPDDFTGCVIAWNSNNLDSKVGGNYNYLYRLFRKSNLKPFERDISTEIYQAGSTPCNGVEGFNCYFPLQSYGFQPTNGVGYQPYRVVVLSFELLHAPATVCGPKKSTNLVKNKCVNFNFNGLTGTGVLTESNKKFLPFQQFGRDIADTTDAVRDPQTLEILDITPCSFGGVSVITPGTNTSNQVAVLYQDVNCTEVPVAIHADQLTPTWRVYSTGSNVFQTRAGCLIGAEHVNNSYECDIPIGAGICASYQTQTNSPRRARSVASQSIIAYTMSLGAENSVAYSNNSIAIPTNFTISVTTEILPVSMTKTSVDCTMYICGDSTECSNLLLQYGSFCTQLNRALTGIAVEQDKNTQEVFAQVKQIYKTPPIKDFGGFNFSQILPDPSKPSKRSFIEDLLFNKVTLADAGFIKQYGDCLGDIAARDLICAQKFNGLTVLPPLLTDEMIAQYTSALLAGTITSGWTFGAGAALQIPFAMQMAYRFNGIGVTQNVLYENQKLIANQFNSAIGKIQDSLSSTASALGKLQDVVNQNAQALNTLVKQLSSNFGAISSVLNDILSRLDPPEAEVQIDRLITGRLQSLQTYVTQQLIRAAEIRASANLAATKMSECVLGQSKRVDFCGKGYHLMSFPQSAPHGVVFLHVTYVPAQEKNFTTAPAICHDGKAHFPREGVFVSNGTHWFVTQRNFYEPQIITTDNTFVSGNCDVVIGIVNNTVYDPLQPELDSGGSGYIPEAPRDGQAYVRKDGEWVLLSTFL

SEQ ID NO: 9777 - protein, 1177 aa, Artificial Sequence
  SARS-CoV-2/Iceland/319/2020__EPI_ISL_417648 spike protein (1-1147)(K986P_V987P) Foldon construct
MFVFLVLLPLVSSQCVNLTTRTQLPPAYTNSFTRGVYYPDKVFRSSVLHSTQDLFLPFFSNVTWFHAIHVSGTNGTKRFDNPVLPFNDGVYFASTEKSNIIRGWIFGTTLDSKTQSLLIVNNATNVVIKVCEFQFCNDPFLGVYYHKNNKSWMESEFRVYSSANNCTFEYVSQPFLIDLEGKQGNFKNLREFVFKNIDGYFKIYSKHTPINLVRDLPQGFSALEPLVDLPIGINITRFQTLLALHRSYLTPGDSSSGWTAGAAAYYVGYLQPRTFLLKYNENGTITDAVDCALDPLSETKCTLKSFTVEKGIYQTSNFRVQPTESIVRFPNITNLCPFGEVFNATRFASVYAWNRKRISNCVADYSVLYNSASFSTFKCYGVSPTKLNDLCFTNVYADSFVIRGDEVRQIAPGQTGKIADYNYKLPDDFTGCVIAWNSNNLDSKVGGNYNYLYRLFRKSNLKPFERDISTEIYQAGSTPCNGVEGFNCYFPLQSYGFQPTNGVGYQPYRVVVLSFELLHAPATVCGPKKSTNLVKNKCVNFNFNGLTGTGVLTESNKKFLPFQQFGRDIADTTDAVRDPQTLEILDITPCSFGGVSVITPGTNTSNQVAVLYQGVNCTEVPVAIHADQLTPTWRVYSTGSNVFQTRAGCLIGAEHVNNSYECDIPIGAGICASYQTQTNSPRRARSVASQSIIAYTMSLGAENSVAYSNNSIAIPTNFTISVTTEILPVSMTKTSVDCTMYICGDSTECSNLLLQYGSFCTQLNRALTGIAVEQDKNTQEVFAQVKQIYKTPPIKDFGGFNFSQILPDPSKPSKRSFIEDLLFNKVTLADAGFIKQYGDCLGDIAARDLICAQKFNGLTVLPPLLTDEMIAQYTSALLAGTITSGWTFGAGAALQIPFAMQMAYRFNGIGVTQNVLYENQKLIANQFNSAIGKIQDSLSSTASALGKLQDVVNQNAQALNTLVKQLSSNFGAISSVLNDILSRLDPPEAEVQIDRLITGRLQSLQTYVTQQLIRAAEIRASANLAATKMSECVLGQSKRVDFCGKGYHLMSFPQSAPHGVVFLHVTYVPAQEKNFTTAPAICHDGKAHFPREGVFVSNGTHWFVTQRNFYEPQIITTDNTFVSGNCDVVIGIVNNTVYDPLQPELDSGGSGYIPEAPRDGQAYVRKDGEWVLLSTFL

SEQ ID NO: 9778 - protein, 1177 aa, Artificial Sequence
  SARS-CoV-2/Congo/94/2020__EPI_ISL_417947 spike protein (1-1147)(K986P_V987P) Foldon construct
MFVFLVLLPLVSSQCVNLTTRTQLPPAYTNSFTRGVYYPDKVFRSSVLHSTQDLFLPFFSNVTWFHAIHVSGTNGTKRFDNPVLPFNDGVYFASTEKSNIIRGWIFGTTLDSKTQSLLIVNNATNVVIKVCEFQFCNDPFLGVYYHKNNKSWMESEFRVYSSANNCTFEYVSQPFLMDLEGKQGNFKNLREFVFKNIDGYFKIYSKHTPINLVRDLPQGFSALEPLVDLPIGINITRFQTLLALHRSYLTPGDSSSGWTAGAAAYYVGYLQPRTFLLKYNENGTITDAVDCALDPLSETKCTLKSFTVEKGIYQTSNFRVQPTESIVRFPNITNLCPFGEVFNATRFASVYAWNRKRISNCVADYSVLYNSASFSTFKCYGVSPTKLNDLCFTNVYADSFVIRGDEVRQIAPGQTGKIADYNYKLPDDFTGCVIAWNSNNLDSKVGGNYNYLYRLFRKSNLKPFERDISTEIYQAGSTPCNGVEGFNCYFPLQSYGFQPTNGVGYQPYRVVVLSFELLHAPATVCGPKKSTNLVKNKCVNFNFNGLTGTGVLTESNKKFLPFQQFGRDIADTTDAVRDPQTLEILDITPCSFGGVSVITPGTNTSNQVAVLYQGVNCTEVPVAIHADQLTPTWRVYSTGSNVFQTRAGCLIGAEHVNNSYECDIPIGAGICASYQTQTNSPRRARSVASQSIIAYTMSLGAENSVAYSNNSIAIPTNFTISVTTEILPVSMTKTSVDCTMYICGDSTECSNLLLQYGSFCTQLNRALTGIAVEQDKNTQEVFAQVKQIYKTPPIKDFGGFNFSQILPDPSKPSKRSFIEDILFNKVTLADAGFIKQYGDCLGDIAARDLICAQKFNGLTVLPPLLTDEMIAQYTSALLAGTITSGWTFGAGAALQIPFAMQMAYRFNGIGVTQNVLYENQKLIANQFNSAIGKIQDSLSSTASALGKLQDVVNQNAQALNTLVKQLSSNFGAISSVLNDILSRLDPPEAEVQIDRLITGRLQSLQTYVTQQLIRAAEIRASANLAATKMSECVLGQSKRVDFCGKGYHLMSFPQSAPHGVVFLHVTYVPAQEKNFTTAPAICHDGKAHFPREGVFVSNGTHWFVTQRNFYEPQIITTDNTFVSGNCDVVIGIVNNTVYDPLQPELDSGGSGYIPEAPRDGQAYVRKDGEWVLLSTFL

SEQ ID NO: 9779 - protein, 1177 aa, Artificial Sequence
  SARS-CoV-2/Congo/158/2020__EPI_ISL_417950 spike protein (1-1147)(K986P_V987P) Foldon construct
MFVFLVLLPLVSSQCVNLTTRTQLPPAYTNSFTRGVYYPDKVFRSSVLHSTQDLFLPFFSNVTWFHAIHVSGTNGTKRFDNPVLPFNDGVYFASTEKSNIIRGWIFGTTLDSKTQSLLIVNNATNVVIKVCEFQFCNDPFLGVYYHKNNKSWMESEFRVYSSANNCTFEYVSQPFLMDLEGKQGNFKNLREFVFKNIDGYFKIYSKHTPINLVRDLPQGFSALEPLVDLPIGINITRFQTLLALHRSYLTPGDSSSGWTAGAAAYYVGYLQPRTFLLKYNENGTITDAVDCALDPLSETKCTLKSFTVEKGIYQTSNFRVQPTESIVRFPNITNLCPFGEVFNATRFASVYAWNRKRISNCVADYSVLYNSASFSTFKCYGVSPTKLNDLCFTNVYADSFVIRGDEVRQIAPGQTGKIADYNYKLPDDFTGCVIAWNSNNLDSKVGGNYNYLYRLFRKSNLKPFERDISTEIYQAGSTPCNGVEGFNCYFPLQSYGFQPTNGVGYQPYRVVVLSFELLHAPATVCGPKKSTNLVKNKCVNFNFNGLTGTGVLTESNKKFLPFQQFGRDIADTTDAVRDPQTLEILDITPCSFGGVSVITPGTNTSNQVAVLYQDVNCTEVPVAIHADQLTPTWRVYSTGSNVFQTRAGCLIGAEHVNNSYECDIPIGAGICASYQTQTNSPRRARSVASQSIIAYTMSLGAENSVAYSNNSIAIPTNFTISVTTEILPVSMTKTSVDCTMYICGDSTECSNLLLQYGSFCTQLNRALTGIAVEQDKNTQEVFAQVKQIYKTPPIKDFGGFNFSQILPDPSKPSKRSFIEDLLFNKVTLADAGFIKQYGDCLGDIAARDLICAQKFNGLTVLPPLLTDEMIAQYTSALLAGTITSGWTFGAGAALQIPFAMQMAYRFNGIGVTQNVLYENQKLIANQFNSAIGKIQDSLSSTASALGKLQDVVNQNAQALNTLVKQLSSNFGAISSVLNDILSRLDPPEAEVQIDRLITGRLQSLQTYVTQQLIRAAEIRASANLAATKMSECVLGQSKRVDFCGKGYHLMSFPQSAPHGVVFLHVTYVPAQEKNFTTAPAICHDGKAHFPREGVFVSNGTHWFVTQRNFYEPQIITTDNTFLSGNCDVVIGIVNNTVYDPLQPELDSGGSGYIPEAPRDGQAYVRKDGEWVLLSTFL

SEQ ID NO: 9780 - protein, 1177 aa, Artificial Sequence
  SARS-CoV-2/USA/UT-00034/2020__EPI_ISL_417977 spike protein (1-1147)(K986P_V987P) Foldon construct
MFVFLVLLPLVSSQCVNLTTRTQLPPAYTNSFTRGVYYPDKVFRSSVLHSTQDLFLPFFSNVTWFHAIHVSGTNGTKRFDNPVLPFNDGVYFASTEKSNIIRGWIFGTTLDSKTQSLLIVNNATNVVIKVCEFQFCNDPFLGVYYYKNNKSWMESEFRVYSSANNCTFEYVSQPFLMDLEGKQGNFKNLREFVFKNIDGYFKIYSKHTPINLVRDLPQGFSALEPLVDLPIGINITRFQTLLALHRSYLTPGDSSSGWTAGAAAYYVGYLQPRTFLLKYNENGTITDAVDCALDPLSETKCTLKSFTVEKGIYQTSNFRVQPTESIVRFPNITNLCPFGEVFNATRFASVYAWNRKRISNCVADYSVLYNSASFSTFKCYGVSPTKLNDLCFTNVYADSFVIRGDEVRQIAPGQTGKIADYNYKLPDDFTGCVIAWNSNNLDSKVGGNYNYLYRLFRKSNLKPFERDISTEIYQAGSTPCNGVEGFNCYFPLQSYGFQPTNGVGYQPYRVVVLSFELLHAPATVCGPKKSTNLVKNKCVNFNFNGLTGTGVLTESNKKFLPFQQFGRDIADTTDAVRDPQTLEILDITPCSFGGVSVITPGTNTSNQVAVLYQGVNCTEVPVAIHADQLTPTWRVYSTGSNVFQTRAGCLIGAEHVNNSYECDIPIGAGICASYQTQTNSPRRARSVASQSIIAYTMSLGAENSVAYSNNSIAIPTNFTISVTTEILPVSMTKTSVDCTMYICGDSTECSNLLLQYGSFCTQLNRALTGIAVEQDKNTQEVFAQVKQIYKTPPIKDFGGFNFSQILPDPSKPSKRSFIEDLLFNKVTLADAGFIKQYGDCLGDIAARDLICAQKFNGLTVLPPLLTDEMIAQYTSALLAGTITSGWTFGAGAALQIPFAMQMAYRFNGIGVTQNVLYENQKLIANQFNSAIGKIQDSLSSTASALGKLQDVVNQNAQALNTLVKQLSSNFGAISSVLNDILSRLDPPEAEVQIDRLITGRLQSLQTYVTQQLIRAAEIRASANLAATKMSECVLGQSKRVDFCGKGYHLMSFPQSAPHGVVFLHVTYVPAQEKNFTTAPAICHDGKAHFPREGVFVSNGTHWFVTQRNFYEPQIITTDNTFVSGNCDVVIGIVNNTVYDPLQPELDSGGSGYIPEAPRDGQAYVRKDGEWVLLSTFL

SEQ ID NO: 9781 - protein, 1177 aa, Artificial Sequence
  SARS-CoV-2/USA/UT-00033/2020__EPI_ISL_417976 spike protein (1-1147)(K986P_V987P) Foldon construct
MFVFLVLLPLVSSQCVNLTTRTQLPPAYTNSFTRGVYYPDKVFRSSVLHSTQDLFLPFFSNVTWFHAIHVSGTNGTKRFDNPVLPFNDGVYFASTEKSNIIRGWIFGTTLDSKTQSLLIVNNATNVVIKVCEFQFCNDPFLGVYYHKNNKSWMESEFRVYSSANNCTFEYVSQPFLMDLEGKQGNFKNLREFVFKNIDGYFKIYSKHTPINLVRDLPQGFSALEPLVDLPIGINITRFQTLLALHRSYLTPGDSSSGLTAGAAAYYVGYLQPRTFLLKYNENGTITDAVDCALDPLSETKCTLKSFTVEKGIYQTSNFRVQPTESIVRFPNITNLCPFGEVFNATRFASVYAWNRKRISNCVADYSVLYNSASFSTFKCYGVSPTKLNDLCFTNVYADSFVIRGDEVRQIAPGQTGKIADYNYKLPDDFTGCVIAWNSNNLDSKVGGNYNYLYRLFRKSNLKPFERDISTEIYQAGSTPCNGVEGFNCYFPLQSYGFQPTNGVGYQPYRVVVLSFELLHAPATVCGPKKSTNLVKNKCVNFNFNGLTGTGVLTESNKKFLPFQQFGRDIADTTDAVRDPQTLEILDITPCSFGGVSVITPGTNTSNQVAVLYQGVNCTEVPVAIHADQLTPTWRVYSTGSNVFQTRAGCLIGAEHVNNSYECDIPIGAGICASYQTQTNSPRRARSVASQSIIAYTMSLGAENSVAYSNNSIAIPTNFTISVTTEILPVSMTKTSVDCTMYICGDSTECSNLLLQYGSFCTQLNRALTGIAVEQDKNTQEVFAQVKQIYKTPPIKDFGGFNFSQILPDPSKPSKRSFIEDLLFNKVTLADAGFIKQYGDCLGDIAARDLICAQKFNGLTVLPPLLTDEMIAQYTSALLAGTITSGWTFGAGAALQIPFAMQMAYRFNGIGVTQNVLYENQKLIANQFNSAIGKIQDSLSSTASALGKLQDVVNQNAQALNTLVKQLSSNFGAISSVLNDILSRLDPPEAEVQIDRLITGRLQSLQTYVTQQLIRAAEIRASANLAATKMSECVLGQSKRVDFCGKGYHLMSFPQSAPHGVVFLHVTYVPAQEKNFTTAPAICHDGKAHFPREGVFVSNGTHWFVTQRNFYEPQIITTDNTFVSGNCDVVIGIVNNTVYDPLQPELDSGGSGYIPEAPRDGQAYVRKDGEWVLLSTFL

SEQ ID NO: 9782 - protein, 1177 aa, Artificial Sequence
  SARS-CoV-2/USA/WI-13/2020__EPI_ISL_417516 spike protein (1-1147)(K986P_V987P) Foldon construct
MFVFLVLLPLVSSQCVNLTTRTQLPPAYTNSFTRGVYYPDKVFRSSVLHSTQDLFLPFFSNVTWFHAIHVSGTNGTKRFDNPVLPFNDGVYFASTEKSNIIRGWIFGTTLDSKTQSLLIVNNATNVVIKVCEFQFCNDPFLGVYYHKNNKSWMESEFRVYSSANNCTFEYVSQPFLMDLEGKQGNFKNLREFVFKNIDGYFKIYSKHTPINLVRDLPQGFSALEPLVDLPIGINITRFQTLLALHRSYLTPGDSSSGWTAGAAAYYVGYLQPRTFLLKYNENGTITDAVDCALDPLSETKCTLKSFTVEKGIYQTSNFRVLPTESIVRFPNITNLCPFGEVFNATRFASVYAWNRKRISNCVADYSVLYNSASFSTFKCYGVSPTKLNDLCFTNVYADSFVIRGDEVRQIAPGQTGKIADYNYKLPDDFTGCVIAWNSNNLDSKVGGNYNYLYRLFRKSNLKPFERDISTEIYQAGSTPCNGVEGFNCYFPLQSYGFQPTNGVGYQPYRVVVLSFELLHAPATVCGPKKSTNLVKNKCVNFNFNGLTGTGVLTESNKKFLPFQQFGRDIADTTDAVRDPQTLEILDITPCSFGGVSVITPGTNTSNQVAVLYQGVNCTEVPVAIHADQLTPTWRVYSTGSNVFQTRAGCLIGAEHVNNSYECDIPIGAGICASYQTQTNSPRRARSVASQSIIAYTMSLGAENSVAYSNNSIAIPTNFTISVTTEILPVSMTKTSVDCTMYICGDSTECSNLLLQYGSFCTQLNRALTGIAVEQDKNTQEVFAQVKQIYKTPPIKDFGGFNFSQILPDPSKPSKRSFIEDLLFNKVTLADAGFIKQYGDCLGDIAARDLICAQKFNGLTVLPPLLTDEMIAQYTSALLAGTITSGWTFGAGAALQIPFAMQMAYRFNGIGVTQNVLYENQKLIANQFNSAIGKIQDSLSSTASALGKLQDVVNQNAQALNTLVKQLSSNFGAISSVLNDILSRLDPPEAEVQIDRLITGRLQSLQTYVTQQLIRAAEIRASANLAATKMSECVLGQSKRVDFCGKGYHLMSFPQSAPHGVVFLHVTYVPAQEKNFTTAPAICHDGKAHFPREGVFVSNGTHWFVTQRNFYEPQIITTDNTFVSGNCDVVIGIVNNTVYDPLQPELDSGGSGYIPEAPRDGQAYVRKDGEWVLLSTFL

SEQ ID NO: 9783 - protein, 1176 aa, Artificial Sequence
  SARS-CoV-2/India/1-27/2020__EPI_ISL_413522 spike protein (1-1146)(K985P_V986P) Foldon construct
MFVFLVLLPLVSSQCVNLTTRTQLPPAYTNSFTRGVYYPDKVFRSSVLHSTQDLFLPFFSNVTWFHAIHVSGTNGTKRFDNPVLPFNDGVYFASTEKSNIIRGWIFGTTLDSKTQSLLIVNNATNVVIKVCEFQFCNDPFLGVYHKNNKSWMESEFRVYSSANNCTFEYVSQPFLMDLEGKQGNFKNLREFVFKNIDGYFKIYSKHTPINLVRDLPQGFSALEPLVDLPIGINITRFQTLLALHRSYLTPGDSSSGWTAGAAAYYVGYLQPRTFLLKYNENGTITDAVDCALDPLSETKCTLKSFTVEKGIYQTSNFRVQPTESIVRFPNITNLCPFGEVFNATRFASVYAWNRKRISNCVADYSVLYNSASFSTFKCYGVSPTKLNDLCFTNVYADSFVIRGDEVIQIAPGQTGKIADYNYKLPDDFTGCVIAWNSNNLDSKVGGNYNYLYRLFRKSNLKPFERDISTEIYQAGSTPCNGVEGFNCYFPLQSYGFQPTNGVGYQPYRVVVLSFELLHAPATVCGPKKSTNLVKNKCVNFNFNGLTGTGVLTESNKKFLPFQQFGRDIADTTDAVRDPQTLEILDITPCSFGGVSVITPGTNTSNQVAVLYQDVNCTEVPVAIHADQLTPTWRVYSTGSNVFQTRAGCLIGAEHVNNSYECDIPIGAGICASYQTQTNSPRRARSVASQSIIAYTMSLGAENSVAYSNNSIAIPTNFTISVTTEILPVSMTKTSVDCTMYICGDSTECSNLLLQYGSFCTQLNRALTGIAVEQDKNTQEVFAQVKQIYKTPPIKDFGGFNFSQILPDPSKPSKRSFIEDLLFNKVTLADAGFIKQYGDCLGDIAARDLICAQKFNGLTVLPPLLTDEMIAQYTSALLAGTITSGWTFGAGAALQIPFAMQMAYRFNGIGVTQNVLYENQKLIANQFNSAIGKIQDSLSSTASALGKLQDVVNQNAQALNTLVKQLSSNFGAISSVLNDILSRLDPPEAEVQIDRLITGRLQSLQTYVTQQLIRAAEIRASANLAATKMSECVLGQSKRVDFCGKGYHLMSFPQSAPHGVVFLHVTYVPAQEKNFTTAPAICHDGKAHFPREGVFVSNGTHWFVTQRNFYEPQIITTDNTFVSGNCDVVIGIVNNTVYDPLQPELDSGGSGYIPEAPRDGQAYVRKDGEWVLLSTFL

SEQ ID NO: 9784 - protein, 1171 aa, Artificial Sequence
  SARS-CoV-2/pangolin/Guangxi/P4L/2017__EPI_ISL_410538 spike protein (1-1141)(K980P_V981P) Foldon construct
MFVFLFVLPLVSSQCVNLTTRTGIPPGYTNSSTRGVYYPDKVFRSSILHLTQDLFLPFFSNVTWFNTINYQGGFKKFDNPVLPFNDGVYFASTEKSNIIRGWIFGTTLDARTQSLLIVNNATNVVIKVCEFQFCTDPFLGVYYHNNNKTWVENEFRVYSSANNCTFEYISQPFLMDLEGKQGNFKNLREFVFKNVDGYFKIYSKHTPIDLVRDLPRGFAALEPLVDLPIGINITRFQTLLALHRSYLTPGNLESGWTTGAAAYYVGYLQQRTFLLSYNQNGTITDAVDCSLDPLSETKCTLKSLTVEKGIYQTSNFRVQPTISIVRFPNITNLCPFGEVFNASKFASVYAWNRKRISNCVADYSVLYNSTSFSTFKCYGVSPTKLNDLCFTNVYADSFVVKGDEVRQIAPGQTGVIADYNYKLPDDFTGCVIAWNSVKQDALTGGNYGYLYRLFRKSKLKPFERDISTEIYQAGSTPCNGQVGLNCYYPLERYGFHPTTGVNYQPFRVVVLSFELLNGPATVCGPKLSTTLVKDKCVNFNFNGLTGTGVLTTSKKQFLPFQQFGRDISDTTDAVRDPQTLEILDITPCSFGGVSVITPGTNTSNQVAVLYQDVNCTEVPMAIHAEQLTPAWRVYSAGANVFQTRAGCLVGAEHVNNSYECDIPVGAGICASYHSMSSLRSVNQRSIIAYTMSLGAENSVAYSNNSIAIPTNFTISVTTEILPVSMTKTSVDCTMYICGDSIECSNLLLQYGSFCTQLNRALTGIAVEQDKNTQEVFAQVKQIYKTPPIKDFGGFNFSQILPDPSKPSKRSFIEDLLFNKVTLADAGFIKQYGDCLGDIAARDLICAQKFNGLTVLPPLLTDEMIAQYTSALLAGTITSGWTFGAGAALQIPFAMQMAYRFNGIGVTQNVLYENQKLIANQFNSAIGKIQDSLSSTASALGKLQDVVNQNAQALNTLVKQLSSNFGAISSVLNDILSRLDPPEAEVQIDRLITGRLQSLQTYVTQQLIRAAEIRASANLAATKMSECVLGQSKRVDFCGKGYHLMSFPQSAPHGVVFLHVTYVPAQEKNFTTAPAICHEGKAHFPREGVFVSNGTHWFITQRNFYEPQIITTDNTFVSGSCDVVIGIVNNTVYDPLQPELDSGGSGYIPEAPRDGQAYVRKDGEWVLLSTFL

SEQ ID NO: 9785 - protein, 1171 aa, Artificial Sequence
  SARS-CoV-2/pangolin/Guangxi/P5L/2017__EPI_ISL_410540 spike protein (1-1141)(K980P_V981P) Foldon construct
MFVFLFVLPLVSSQCVNLTTRTGIPPGYTNSSTRGVYYPDKVFRSSILHLTQDLFLPFFSNVTWFNTINYQGGFKKFDNPVLPFNDGVYFASTEKSNIIRGWIFGTTLDARTQSLLIVNNATNVVIKVCEFQFCTDPFLGVYYHNNNKTWVENEFRVYSSANNCTFEYISQPFLMDLEGKQGNFKNLREFVFKNVDGYFKIYSKHTPIDLVRDLPRGFAALEPLVDLPIGINITRFQTLLALHRSYLTPGKLESGWTTGAAAYYVGYLQQRTFLLSYNQNGTITDAVDCSLDPLSETKCTLKSLTVEKGIYQTSNFRVQPTISIVRFPNITNLCPFGEVFNASKFASVYAWNRKRISNCVADYSVLYNSTSFSTFKCYGVSPTKLNDLCFTNVYADSFVVKGDEVRQIAPGQTGVIADYNYKLPDDFTGCVIAWNSVKQDALTGGNYGYLYRLFRKSKLKPFERDISTEIYQAGSTPCNGQVGLNCYYPLERYGFHPTTGVNYQPFRVVVLSFELLNGPATVCGPKLSTTLVKDKCVNFNFNGLTGTGVLTTSKKQFLPFQQFGRDISDTTDAVRDPQTLEILDITPCSFGGVSVITPGTNTSNQVAVLYQDVNCTEVPMAIHAEQLTPAWRVYSAGANVFQTRAGCLVGAEHVNNSYECDIPVGAGICASYHSMSSFRSVNQRSIIAYTMSLGAENSVAYSNNSIAIPTNFTISVTTEILPVSMTKTSVDCTMYICGDSIECSNLLLQYGSFCTQLNRALTGIAVEQDKNTQEVFAQVKQIYKTPPIKDFGGFNFSQILPDPSKPSKRSFIEDLLFNKVTLADAGFIKQYGDCLGDIAARDLICAQKFNGLTVLPPLLTDEMIAQYTSALLAGTITSGWTFGAGAALQIPFAMQMAYRFNGIGVTQNVLYENQKLIANQFNSAIGKIQDSLSSTASALGKLQDVVNQNAQALNTLVKQLSSNFGAISSVLNDILSRLDPPEAEVQIDRLITGRLQSLQTYVTQQLIRAAEIRASANLAATKMSECVLGQSKRVDFCGKGYHLMSFPQSAPHGVVFLHVTYVPAQEKNFTTAPAICHEGKAHFPREGVFVSNGTHWFITQRNFYEPQIITTDNTFVSGSCDVVIGIVNNTVYDPLQPELDSGGSGYIPEAPRDGQAYVRKDGEWVLLSTFL

SEQ ID NO: 9786 - protein, 1171 aa, Artificial Sequence
  SARS-CoV-2/pangolin/Guangxi/P5E/2017__EPI_ISL_410541 spike protein (1-1141)(K980P_V981P) Foldon construct
MFVFLFVLPLVSSQCVNLTTRTGIPPGYTNSSTRGVYYPDKVFRSSILHLTQDLFLPFFSNVTWFNTITYQGGSKKFDNPVLPFNDGVYFASTEKSNIIRGWIFGTTLDARTQSLLIVNNATNVVIKVCEFQFCTDPFLGVYYHNNNKTWVENEFRVYSSANNCTFEYISQPFLMDLEGKQGNFKNLREFVFKNVDGYFKIYSKHTPIDLVRDLPRGFAALEPLVDLPIGINITRFQTLLALHRSYLTPGKLESGWTTGAAAYYVGYLQQRTFLLSYNQNGTITDAVDCSLDPLSETKCTLKSLTVEKGIYQTSNFRVQPTISIVRFPNITNLCPFGEVFNASKFASVYAWNRKRISNCVADYSVLYNSTSFSTFKCYGVSPTKLNDLCFTNVYADSFVVKGDEVRQIAPGQTGVIADYNYKLPDDFTGCVIAWNSVKQDALTGDNYGYLYRLFRKSKLKPFERDISTEIYQAGSTPCNGQVGLNCYYPLERYGFHPTTGVNYQPFRVVVLSFELLNGPATVCGPKLSTTLVKDKCVNFNFNGLTGTGVLTTSKKQFLPFQQFGRDISDTTDAVRDPQTLEILDITPCSFGGVSVITPGTNTSNQVAVLYQDVNCTEVPMAIHAEQLTPAWRVYSAGANVFQTRAGCLVGAEHVNNSYECDIPVGAGICASYHSMSSFRSVNQRSIIAYTMSLGAENSVAYSNNSIAIPTNFTISVTTEILPVSMTKTSVDCTMYICGDSIECSNLLLQYGSFCTQLNRALTGIAVEQDKNTQEVFAQVKQIYKTPPIKDFGGFNFSQILPDPSKPSKRSFIEDLLFNKVTLADAGFIKQYGDCLGDIAARDLICAQKFNGLTVLPPLLTDEMIAQYTSALLAGTITSGWTFGAGAALQIPFAMQMAYRFNGIGVTQNVLYENQKLIANQFNSAIGKIQDSLSSTASALGKLQDVVNQNAQALNTLVKQLSSNFGAISSVLNDILSRLDPPEAEVQIDRLITGRLQSLQTYVTQQLIRAAEIRASANLAATKMSECVLGQSKRVDFCGKGYHLMSFPQSAPHGVVFLHVTYVPAQEKNFTTAPAICHEGKAHFPREGVFVSNGTHWFITQRNFYEPQIITTDNTFVSGSCDVVIGIVNNTVYDPLQPELDSGGSGYIPEAPRDGQAYVRKDGEWVLLSTFL

SEQ ID NO: 9787 - protein, 1169 aa, Artificial Sequence
  SARS-CoV-2/pangolin/Guangxi/P1E/2017__EPI_ISL_410539 spike protein (1-1139)(K978P_V979P) Foldon construct
MFVFLFVLPLVSSQCVNLTTRTGIQPGYTNSSTRGVYYPDKVFRSSILHLTQDLFLPFFSNVTWFNTINYQGGFKKFDNPVLPFNDGVYFASTEKSNIIRGWIFGTTLDARTQSLLIVNNATNVVIKVCEFQFCTDPFLGVYYHNNNKTWVENEFRVYSSANNCTFEYISQPFLMDLEGKQGNFKNLREFVFKNVDGYFKIYSKHTPIDLVRDLPRGFAALEPLVDLPIGINITRFQTLLALHRSYLTPGKLESGWTTGAAAYYVGYLQQRTFLLSYNQNGTITDAVDCSLDPLSETKCTLKSLTVEKGIYQTSNFRVQPTISIVRFPNITNLCPFGEVFNASKFASVYAWNRKRISNCVADYSVLYNSTSFSTFKCYGVSPTKLNDLCFTNVYADSFVVKGDEVRQIAPGQTGVIADYNYKLPDDFTGCVIAWNSVKQDALTGGNYLYRLFRKSKLKPFERDISTEIYQAGSTPCNGQVGLNCYYPLERYGFHPTTGVNYQPFRVVVLSFELLNGPATVCGPKLSTTLVKDKCVNFNFNGLTGTGVLTTSKKQFLPFQQFGRDISDTTDAVRDPQTLEILDITPCSFGGVSVITPGTNTSNQVAVLYQDVNCTEVPMAIHAEQLTPAWRVYSAGANVFQTRAGCLVGAEHVNNSYECDIPVGAGICASYHSMSSLRSVNQRSIIAYTMSLGAENSVAYSNNSIAIPTNFTISVTTEILPVSMTKTSVDCTMYICGDSIECSNLLLQYGSFCTQLNRALTGIAVEQDKNTQEVFAQVKQIYKTPPIKDFGGFNFSQILPDPSKPSKRSFIEDLLFNKVTLADAGFIKQYGDCLGDIAARDLICAQKFNGLTVLPPLLTDEMIAQYTSALLAGTITSGWTFGAGAALQIPFAMQMAYRFNGIGVTQNVLYENQKLIANQFNSAIGKIQDSLSSTASALGKLQDVVNQNAQALNTLVKQLSSNFGAISSVLNDILSRLDPPEAEVQIDRLITGRLQSLQTYVTQQLIRAAEIRASANLAATKMSECVLGQSKRVDFCGKGYHLMSFPQSAPHGVVFLHVTYVPAQEKNFTTAPAICHEGKAHFPREGVFVSNGTHWFITQRNFYEPQIITTDNTFVSGSCDVVIGIVNNTVYDPLQPELDSGGSGYIPEAPRDGQAYVRKDGEWVLLSTFL

SEQ ID NO: 9788 - protein, 1177 aa, Artificial Sequence
  SARS-CoV-2/Wuhan/WIV05/2019__EPI_ISL_402128 spike protein (1-1147)(K986P_V987P_T887W_A1020W) Foldon construct
MFVFLVLLPLVSSQCVNLTTRTQLPPAYTNSFTRGVYYPDKVFRSSVLHSTQDLFLPFFSNVTWFHAIHVSGTNGTKRFDNPVLPFNDGVYFASTEKSNIIRGWIFGTTLDSKTQSLLIVNNATNVVIKVCEFQFCNDPFLGVYYHKNNKSWMESEFRVYSSANNCTFEYVSQPFLMDLEGKQGNFKNLREFVFKNIDGYFKIYSKHTPINLVRDLPQGFSALEPLVDLPIGINITRFQTLLALHRSYLTPGDSSSGWTAGAAAYYVGYLQPRTFLLKYNENGTITDAVDCALDPLSETKCTLKSFTVEKGIYQTSNFRVQPTESIVRFPNITNLCPFGEVFNATRFASVYAWNRKRISNCVADYSVLYNSASFSTFKCYGVSPTKLNDLCFTNVYADSFVIRGDEVRQIAPGQTGKIADYNYKLPDDFTGCVIAWNSNNLDSKVGGNYNYLYRLFRKSNLKPFERDISTEIYQAGSTPCNGVEGFNCYFPLQSYGFQPTNGVGYQPYRVVVLSFELLHAPATVCGPKKSTNLVKNKCVNFNFNGLTGTGVLTESNKKFLPFQQFGRDIADTTDAVRDPQTLEILDITPCSFGGVSVITPGTNTSNQVAVLYQDVNCTEVPVAIHADQLTPTWRVYSTGSNVFQTRAGCLIGAEHVNNSYECDIPIGAGICASYQTQTNSPRRARSVASQSIIAYTMSLGAENSVAYSNNSIAIPTNFTISVTTEILPVSMTKTSVDCTMYICGDSTECSNLLLQYGSFCTQLNRALTGIAVEQDKNTQEVFAQVKQIYKTPPIKDFGGFNFSQILPDPSKPSKRSFIEDLLFNKVTLADAGFIKQYGDCLGDIAARDLICAQKFNGLTVLPPLLTDEMIAQYTSALLAGTITSGWWFGAGAALQIPFAMQMAYRFNGIGVTQNVLYENQKLIANQFNSAIGKIQDSLSSTASALGKLQDVVNQNAQALNTLVKQLSSNFGAISSVLNDILSRLDPPEAEVQIDRLITGRLQSLQTYVTQQLIRAAEIRWSANLAATKMSECVLGQSKRVDFCGKGYHLMSFPQSAPHGVVFLHVTYVPAQEKNFTTAPAICHDGKAHFPREGVFVSNGTHWFVTQRNFYEPQIITTDNTFVSGNCDVVIGIVNNTVYDPLQPELDSGGSGYIPEAPRDGQAYVRKDGEWVLLSTFL

SEQ ID NO: 9789 - protein, 1173 aa, Artificial Sequence
  SARS-CoV-2/bat/Yunnan/RaTG13/2013__EPI_ISL_402131 spike protein (1-1143)(K982P_V983P_T883W_A1016W) Foldon construct
MFVFLVLLPLVSSQCVNLTTRTQLPPAYTNSSTRGVYYPDKVFRSSVLHLTQDLFLPFFSNVTWFHAIHVSGTNGIKRFDNPVLPFNDGVYFASTEKSNIIRGWIFGTTLDSKTQSLLIVNNATNVVIKVCEFQFCNDPFLGVYYHKNNKSWMESEFRVYSSANNCTFEYVSQPFLMDLEGKQGNFKNLREFVFKNIDGYFKIYSKHTPINLVRDLPPGFSALEPLVDLPIGINITRFQTLLALHRSYLTPGDSSSGWTAGAAAYYVGYLQPRTFLLKYNENGTITDAVDCALDPLSETKCTLKSFTVEKGIYQTSNFRVQPTDSIVRFPNITNLCPFGEVFNATTFASVYAWNRKRISNCVADYSVLYNSTSFSTFKCYGVSPTKLNDLCFTNVYADSFVITGDEVRQIAPGQTGKIADYNYKLPDDFTGCVIAWNSKHIDAKEGGNFNYLYRLFRKANLKPFERDISTEIYQAGSKPCNGQTGLNCYYPLYRYGFYPTDGVGHQPYRVVVLSFELLNAPATVCGPKKSTNLVKNKCVNFNFNGLTGTGVLTESNKKFLPFQQFGRDIADTTDAVRDPQTLEILDITPCSFGGVSVITPGTNASNQVAVLYQDVNCTEVPVAIHADQLTPTWRVYSTGSNVFQTRAGCLIGAEHVNNSYECDIPIGAGICASYQTQTNSRSVASQSIIAYTMSLGAENSVAYSNNSIAIPTNFTISVTTEILPVSMTKTSVDCTMYICGDSTECSNLLLQYGSFCTQLNRALTGIAVEQDKNTQEVFAQVKQIYKTPPIKDFGGFNFSQILPDPSKPSKRSFIEDLLFNKVTLADAGFIKQYGDCLGDIAARDLICAQKFNGLTVLPPLLTDEMIAQYTSALLAGTITSGWWFGAGAALQIPFAMQMAYRFNGIGVTQNVLYENQKLIANQFNSAIGKIQDSLSSTASALGKLQDVVNQNAQALNTLVKQLSSNFGAISSVLNDILSRLDPPEAEVQIDRLITGRLQSLQTYVTQQLIRAAEIRWSANLAATKMSECVLGQSKRVDFCGKGYHLMSFPQSAPHGVVFLHVTYVPAQEKNFTTAPAICHDGKAHFPREGVFVSNGTHWFVTQRNFYEPQIITTDNTFVSGSCDVVIGIVNNTVYDPLQPELDSGGSGYIPEAPRDGQAYVRKDGEWVLLSTFL

SEQ ID NO: 9790 - protein, 1177 aa, Artificial Sequence
  SARS-CoV-2/Wuhan/HBCDC-HB-01/2019__EPI_ISL_402132 spike protein (1-1147)(K986P_V987P_T887W_A1020W) Foldon construct
MFVFLVLLPLVSSQCVNLTTRTQLPPAYTNSITRGVYYPDKVFRSSVLHSTQDLFLPFFSNVTWFHAIHVSGTNGTKRFDNPVLPFNDGVYFASTEKSNIIRGWIFGTTLDSKTQSLLIVNNATNVVIKVCEFQFCNDPFLGVYYHKNNKSWMESEFRVYSSANNCTFEYVSQPFLMDLEGKQGNFKNLREFVFKNIDGYFKIYSKHTPINLVRDLPQGFSALEPLVDLPIGINITRFQTLLALHRSYLTPGDSSSGWTAGAAAYYVGYLQPRTFLLKYNENGTITDAVDCALDPLSETKCTLKSFTVEKGIYQTSNFRVQPTESIVRFPNITNLCPFGEVFNATRFASVYAWNRKRISNCVADYSVLYNSASFSTFKCYGVSPTKLNDLCFTNVYADSFVIRGDEVRQIAPGQTGKIADYNYKLPDDFTGCVIAWNSNNLDSKVGGNYNYLYRLFRKSNLKPFERDISTEIYQAGSTPCNGVEGFNCYFPLQSYGFQPTNGVGYQPYRVVVLSFELLHAPATVCGPKKSTNLVKNKCVNFNFNGLTGTGVLTESNKKFLPFQQFGRDIADTTDAVRDPQTLEILDITPCSFGGVSVITPGTNTSNQVAVLYQDVNCTEVPVAIHADQLTPTWRVYSTGSNVFQTRAGCLIGAEHVNNSYECDIPIGAGICASYQTQTNSPRRARSVASQSIIAYTMSLGAENSVAYSNNSIAIPTNFTISVTTEILPVSMTKTSVDCTMYICGDSTECSNLLLQYGSFCTQLNRALTGIAVEQDKNTQEVFAQVKQIYKTPPIKDFGGFNFSQILPDPSKPSKRSFIEDLLFNKVTLADAGFIKQYGDCLGDIAARDLICAQKFNGLTVLPPLLTDEMIAQYTSALLAGTITSGWWFGAGAALQIPFAMQMAYRFNGIGVTQNVLYENQKLIANQFNSAIGKIQDSLSSTASALGKLQDVVNQNAQALNTLVKQLSSNFGAISSVLNDILSRLDPPEAEVQIDRLITGRLQSLQTYVTQQLIRAAEIRWSANLAATKMSECVLGQSKRVDFCGKGYHLMSFPQSAPHGVVFLHVTYVPAQEKNFTTAPAICHDGKAHFPREGVFVSNGTHWFVTQRNFYEPQIITTDNTFVSGNCDVVIGIVNNTVYDPLQPELDSGGSGYIPEAPRDGQAYVRKDGEWVLLSTFL

SEQ ID NO: 9791 - protein, 1177 aa, Artificial Sequence
  SARS-CoV-2/Guangdong/20SF028/2020__EPI_ISL_403936 spike protein (1-1147)(K986P_V987P_T887W_A1020W) Foldon construct
MFVFLVLLPLVSSQCVNLTTRTQLPPAYTNSFTRGVYYPDKVFRSSVLYSTQDLFLPFFSNVTWFHAIHVSGTNGTKRFDNPVLPFNDGVYFASTEKSNIIRGWIFGTTLDSKTQSLLIVNNATNVVIKVCEFQFCNDPFLGVYYHKNNKSWMESEFRVYSSANNCTFEYVSQPFLMDLEGKQGNFKNLREFVFKNIDGYFKIYSKHTPINLVRDLPQGFSALEPLVDLPIGINITRFQTLLALHRSYLTPGDSSSGWTAGAAAYYVGYLQPRTFLLKYNENGTITDAVDCALDPLSETKCTLKSFTVEKGIYQTSNFRVQPTESIVRFPNITNLCPFGEVFNATRFASVYAWNRKRISNCVADYSVLYNSASFSTFKCYGVSPTKLNDLCFTNVYADSFVIRGDEVRQIAPGQTGKIADYNYKLPDDFTGCVIAWNSNNLDSKVGGNYNYLYRLFRKSNLKPFERDISTEIYQAGSTPCNGVEGFNCYFPLQSYGFQPTNGVGYQPYRVVVLSFELLHAPATVCGPKKSTNLVKNKCVNFNFNGLTGTGVLTESNKKFLPFQQFGRDIADTTDAVRDPQTLEILDITPCSFGGVSVITPGTNTSNQVAVLYQDVNCTEVPVAIHADQLTPTWRVYSTGSNVFQTRAGCLIGAEHVNNSYECDIPIGAGICASYQTQTNSPRRARSVASQSIIAYTMSLGAENSVAYSNNSIAIPTNFTISVTTEILPVSMTKTSVDCTMYICGDSTECSNLLLQYGSFCTQLNRALTGIAVEQDKNTQEVFAQVKQIYKTPPIKDFGGFNFSQILPDPSKPSKRSFIEDLLFNKVTLADAGFIKQYGDCLGDIAARDLICAQKFNGLTVLPPLLTDEMIAQYTSALLAGTITSGWWFGAGAALQIPFAMQMAYRFNGIGVTQNVLYENQKLIANQFNSAIGKIQDSLSSTASALGKLQDVVNQNAQALNTLVKQLSSNFGAISSVLNDILSRLDPPEAEVQIDRLITGRLQSLQTYVTQQLIRAAEIRWSANLAATKMSECVLGQSKRVDFCGKGYHLMSFPQSAPHGVVFLHVTYVPAQEKNFTTAPAICHDGKAHFPREGVFVSNGTHWFVTQRNFYEPQIITTDNTFVSGNCDVVIGIVNNTVYDPLQPELDSGGSGYIPEAPRDGQAYVRKDGEWVLLSTFL

SEQ ID NO: 9792 - protein, 1177 aa, Artificial Sequence
  SARS-CoV-2/Shenzhen/SZTH-001/2020__EPI_ISL_406592 spike protein (1-1147)(K986P_V987P_T887W_A1020W) Foldon construct
MFVFLVLLPLVSSQCVNLTTRTQLPPAYTNSFTRGVYYPDKVFRSSVLHSTQDLFLPFFSNVTWFHAIHVSGTNGTKRFDNPVLPFNDGVYFASTEKSNIIRGWIFGTTLDSKTQSLLIVNNATNVVIKVCEFQFCNDPFLGVYYHKNNKSWMESEFRVYSSANNCTFEYVSQPFLMDLEGKQGNFKNLREFVFKNIDGYFKIYSKHTPINLVRDLPQGFSALEPLVDLPIGINITRFQTLLALHRSYLTPGDSSSGWTAGAAAYYVGYLQPRTFLLKYNENGTITDAVDCALDPLSETKCTLKSFTVEKGIYQTSNFRVQPTESIVRFPNITNLCPFGEVFNATRFASVYAWNRKRISNCVADYSVLYNSASFSTFKCYGVSPTKLNDLCFTNVYADSFVIRGDEVRQIAPGQTGKIADYNYKLPDDFTGCVIAWNSNNLDSKVGGNYNYLYRLFRKSNLKPFERDISTEIYQAGSTPCNGVEGFNCYFPLQSYGFQPTNGVGYQPYRVVVLSFELLHAPATVCGPKKSTNLVKNKCVNFNFNGLTGTGVLTESNKKFLPFQQFGRDIADTTDAVRDPQTLEILDITPCSFGGVSVITPGTNTSNQVAVLYQDVNCTEVPVAIHADQLTPTWRVYSTGSNVFQTRAGCLIGAEHVNNSYECDIPIGAGICASYQTQTNSPRRARSVASQSIIAYTMSLGAENSVAYSNNSIAIPTNFTISVTTEILPVSMTKTSVDCTMYICGDSTECSNLLLQYGSFCTQLNRALTGIAVEQDKNTQEVFAQVKQIYKTPPIKDFGGFNFSQILPDPSKPSKRSFIEDLLFNKVTLADAGFIKQYGDCLGDIAARDLICAQKFNGLTVLPPLLTDEMIAQYTSALLAGTITSGWWFGAGAALQIPFAMQMAYRFNGIGVTQNVLYENQKLIANQFNSAIGKIQDSLSSTASALGKLQDVVNQNAQALNTLVKQLSSNFGAISSVLNDILSRLDPPEAEVQIDRLITGRLQSLQTYVTQQLIRAAEIRWSANLAATKMSECVLGQSKRVDFCGKGYHLMSFPQSAPHGVVFLHVTYVPAQEKNFTTAPAICHDGKAHFPREGVFVSNGTHWFVTQRNFYEPQIITTDNTFVSGNCDVLIGIVNNTVYDPLQPELDSGGSGYIPEAPRDGQAYVRKDGEWVLLSTFL

SEQ ID NO: 9793 - protein, 1177 aa, Artificial Sequence
  SARS-CoV-2/Shenzhen/SZTH-004/2020__EPI_ISL_406595 spike protein (1-1147)(K986P_V987P_T887W_A1020W) Foldon construct
MFVFLVLLPLVSSQCVNLTTRTQLPPAYTNSFTRGVYYPDKVFRSSVLHSTQDLFLPFFSNVTWFHAIHVSGTNGTKRFDNPVLPFNDGVYFASTEKSNIIRGWIFGTTLDSKTQSLLIVNNATNVVIKVCEFQFCNDPFLGVYYHKNNKSWMESEFRVYSSANNCTFEYVSQPFLMDLEGKQGNFKNLREFVFKNIDGYFKIYSKHTPINLVRDLPQGFSALEPLVDLPIGINITRFQTLLALHRSYLTPGDSSSGWTAGAAAYYVGYLQPRTFLLKYNENGTITDAVDCALDPLSETKCTLKSFTVEKGIYQTSNFRVQPTESIVRFPNITNLCPFGEVFNATRFASVYAWDRKRISNCVAYYSVLYNSASFSTFKCYGVSPTKLNDLCFTNVYADSFVIRGDEVRQIAPGQTGKIADYNYKLPDDFTGCVIAWNSNNLDSKVGGNYNYLYRLFRKSNLKPFERDISTEIYQAGSTPCNGVEGFNCYFPLQSYGFQPTNGVGYQPYRVVVLSFELLHAPATVCGPKKSTNLVKNKCVNFNFNGLTGTGVLTESNKKFLPFQQFGRDIADTTDAVRDPQTLEILDITPCSFGGVSVITPGTNTSNQVAVLYQDVNCTEVPVAIHADQLTPTWRVYSTGSNVFQTRAGCLIGAEHVNNSYECDIPIGAGICASYQTQTNSPRRARSVASQSIIAYTMSLGAENSVAYSNNSIAIPTNFTISVTTEILPVSMTKTSVDCTMYICGDSTECSNLLLQYGSFCTQLNRALTGIAVEQDKNTQEVFAQVKQIYKTPPIKDFGGFNFSQILPDPSKPSKRSFIEDLLFNKVTLADAGFIKQYGDCLGDIAARDLICAQKFNGLTVLPPLLTDEMIAQYTSALLAGTITSGWWFGAGAALQIPFAMQMAYRFNGIGVTQNVLYENQKLIANQFNSAIGKIQDSLSSTASALGKLQDVVNQNAQALNTLVKQLSSNFGAISSVLNDILSRLDPPEAEVQIDRLITGRLQSLQTYVTQQLIRAAEIRWSANLAATKMSECVLGQSKRVDFCGKGYHLMSFPQSAPHGVVFLHVTYVPAQEKNFTTAPAICHDGKAHFPREGVFVSNGTHWFVTQRNFYEPQIITTDNTFVSGNCDVVIGIVNNTVYDPLQPELDSGGSGYIPEAPRDGQAYVRKDGEWVLLSTFL

SEQ ID NO: 9794 - protein, 1177 aa, Artificial Sequence
  SARS-CoV-2/France/IDF0372/2020__EPI_ISL_406596 spike protein (1-1147)(K986P_V987P_T887W_A1020W) Foldon construct
MFVFLVLLPLVSSQCVNLTTRTQLPPAYTNSFTRGVYYPDKVFRSSVLHSTQDLFLPFFSNVTWFHAIHVSGTNGTKRFDNPVLPFNDGVYFASTEKSNIIRGWIFGTTLDSKTQSLLIVNNATNVVIKVCEFQFCNDPFLGVYYHKNNKSWMESEFRVYSSANNCTFEYVSQPFLMDLEGKQGNFKNLREFVFKNIDGYFKIYSKHTPINLVRDLPQGFSALEPLVDLPIGINITRFQTLLALHRSYLTPGDSSSGWTAGAAAYYVGYLQPRTFLLKYNENGTITDAVDCALDPLSETKCTLKSFTVEKGIYQTSNFRVQPTESIVRFPNITNLCPFGEVFNATRFASVYAWNRKRISNCVADYSFLYNSASFSTFKCYGVSPTKLNDLCFTNVYADSFVIRGDEVRQIAPGQTGKIADYNYKLPDDFTGCVIAWNSNNLDSKVGGNYNYLYRLFRKSNLKPFERDISTEIYQAGSTPCNGVEGFNCYFPLQSYGFQPTNGVGYQPYRVVVLSFELLHAPATVCGPKKSTNLVKNKCVNFNFNGLTGTGVLTESNKKFLPFQQFGRDIADTTDAVRDPQTLEILDITPCSFGGVSVITPGTNTSNQVAVLYQDVNCTEVPVAIHADQLTPTWRVYSTGSNVFQTRAGCLIGAEHVNNSYECDIPIGAGICASYQTQTNSPRRARSVASQSIIAYTMSLGAENSVAYSNNSIAIPTNFTISVTTEILPVSMTKTSVDCTMYICGDSTECSNLLLQYGSFCTQLNRALTGIAVEQDKNTQEVFAQVKQIYKTPPIKDFGGFNFSQILPDPSKPSKRSFIEDLLFNKVTLADAGFIKQYGDCLGDIAARDLICAQKFNGLTVLPPLLTDEMIAQYTSALLAGTITSGWWFGAGAALQIPFAMQMAYRFNGIGVTQNVLYENQKLIANQFNSAIGKIQDSLSSTASALGKLQDVVNQNAQALNTLVKQLSSNFGAISSVLNDILSRLDPPEAEVQIDRLITGRLQSLQTYVTQQLIRAAEIRWSANLAATKMSECVLGQSKRVDFCGKGYHLMSFPQSAPHGVVFLHVTYVPAQEKNFTTAPAICHDGKAHFPREGVFVSNGTHWFVTQRNFYEPQIITTDNTFVSGNCDVVIGIVNNTVYDPLQPELDSGGSGYIPEAPRDGQAYVRKDGEWVLLSTFL

SEQ ID NO: 9795 - protein, 1177 aa, Artificial Sequence
  SARS-CoV-2/Australia/VIC01/2020__EPI_ISL_406844 spike protein (1-1147)(K986P_V987P_T887W_A1020W) Foldon construct
MFVFLVLLPLVSSQCVNLTTRTQLPPAYTNSFTRGVYYPDKVFRSSVLHSTQDLFLPFFSNVTWFHAIHVSGTNGTKRFDNPVLPFNDGVYFASTEKSNIIRGWIFGTTLDSKTQSLLIVNNATNVVIKVCEFQFCNDPFLGVYYHKNNKSWMESEFRVYSSANNCTFEYVSQPFLMDLEGKQGNFKNLREFVFKNIDGYFKIYSKHTPINLVRDLPQGFSALEPLVDLPIGINITRFQTLLALHRRYLTPGDSSSGWTAGAAAYYVGYLQPRTFLLKYNENGTITDAVDCALDPLSETKCTLKSFTVEKGIYQTSNFRVQPTESIVRFPNITNLCPFGEVFNATRFASVYAWNRKRISNCVADYSVLYNSASFSTFKCYGVSPTKLNDLCFTNVYADSFVIRGDEVRQIAPGQTGKIADYNYKLPDDFTGCVIAWNSNNLDSKVGGNYNYLYRLFRKSNLKPFERDISTEIYQAGSTPCNGVEGFNCYFPLQSYGFQPTNGVGYQPYRVVVLSFELLHAPATVCGPKKSTNLVKNKCVNFNFNGLTGTGVLTESNKKFLPFQQFGRDIADTTDAVRDPQTLEILDITPCSFGGVSVITPGTNTSNQVAVLYQDVNCTEVPVAIHADQLTPTWRVYSTGSNVFQTRAGCLIGAEHVNNSYECDIPIGAGICASYQTQTNSPRRARSVASQSIIAYTMSLGAENSVAYSNNSIAIPTNFTISVTTEILPVSMTKTSVDCTMYICGDSTECSNLLLQYGSFCTQLNRALTGIAVEQDKNTQEVFAQVKQIYKTPPIKDFGGFNFSQILPDPSKPSKRSFIEDLLFNKVTLADAGFIKQYGDCLGDIAARDLICAQKFNGLTVLPPLLTDEMIAQYTSALLAGTITSGWWFGAGAALQIPFAMQMAYRFNGIGVTQNVLYENQKLIANQFNSAIGKIQDSLSSTASALGKLQDVVNQNAQALNTLVKQLSSNFGAISSVLNDILSRLDPPEAEVQIDRLITGRLQSLQTYVTQQLIRAAEIRWSANLAATKMSECVLGQSKRVDFCGKGYHLMSFPQSAPHGVVFLHVTYVPAQEKNFTTAPAICHDGKAHFPREGVFVSNGTHWFVTQRNFYEPQIITTDNTFVSGNCDVVIGIVNNTVYDPLQPELDSGGSGYIPEAPRDGQAYVRKDGEWVLLSTFL

SEQ ID NO: 9796 - protein, 1177 aa, Artificial Sequence
  SARS-CoV-2/Germany/BavPat1/2020__EPI_ISL_406862 spike protein (1-1147)(K986P_V987P_T887W_A1020W) Foldon construct
MFVFLVLLPLVSSQCVNLTTRTQLPPAYTNSFTRGVYYPDKVFRSSVLHSTQDLFLPFFSNVTWFHAIHVSGTNGTKRFDNPVLPFNDGVYFASTEKSNIIRGWIFGTTLDSKTQSLLIVNNATNVVIKVCEFQFCNDPFLGVYYHKNNKSWMESEFRVYSSANNCTFEYVSQPFLMDLEGKQGNFKNLREFVFKNIDGYFKIYSKHTPINLVRDLPQGFSALEPLVDLPIGINITRFQTLLALHRSYLTPGDSSSGWTAGAAAYYVGYLQPRTFLLKYNENGTITDAVDCALDPLSETKCTLKSFTVEKGIYQTSNFRVQPTESIVRFPNITNLCPFGEVFNATRFASVYAWNRKRISNCVADYSVLYNSASFSTFKCYGVSPTKLNDLCFTNVYADSFVIRGDEVRQIAPGQTGKIADYNYKLPDDFTGCVIAWNSNNLDSKVGGNYNYLYRLFRKSNLKPFERDISTEIYQAGSTPCNGVEGFNCYFPLQSYGFQPTNGVGYQPYRVVVLSFELLHAPATVCGPKKSTNLVKNKCVNFNFNGLTGTGVLTESNKKFLPFQQFGRDIADTTDAVRDPQTLEILDITPCSFGGVSVITPGTNTSNQVAVLYQGVNCTEVPVAIHADQLTPTWRVYSTGSNVFQTRAGCLIGAEHVNNSYECDIPIGAGICASYQTQTNSPRRARSVASQSIIAYTMSLGAENSVAYSNNSIAIPTNFTISVTTEILPVSMTKTSVDCTMYICGDSTECSNLLLQYGSFCTQLNRALTGIAVEQDKNTQEVFAQVKQIYKTPPIKDFGGFNFSQILPDPSKPSKRSFIEDLLFNKVTLADAGFIKQYGDCLGDIAARDLICAQKFNGLTVLPPLLTDEMIAQYTSALLAGTITSGWWFGAGAALQIPFAMQMAYRFNGIGVTQNVLYENQKLIANQFNSAIGKIQDSLSSTASALGKLQDVVNQNAQALNTLVKQLSSNFGAISSVLNDILSRLDPPEAEVQIDRLITGRLQSLQTYVTQQLIRAAEIRWSANLAATKMSECVLGQSKRVDFCGKGYHLMSFPQSAPHGVVFLHVTYVPAQEKNFTTAPAICHDGKAHFPREGVFVSNGTHWFVTQRNFYEPQIITTDNTFVSGNCDVVIGIVNNTVYDPLQPELDSGGSGYIPEAPRDGQAYVRKDGEWVLLSTFL

SEQ ID NO: 9797 - protein, 1177 aa, Artificial Sequence
  SARS-CoV-2/Wuhan/HBCDC-HB-02/2020__EPI_ISL_412978 spike protein (1-1147)(K986P_V987P_T887W_A1020W) Foldon construct
MFVFLVLLPLVSSQCVNLTTRTQLPPAYTNSFTRGVYYPDKVFRSSVLHSTQDLFLPFFSNVTWFHAIHVSGTNGTKRFDNPVLPFNDGVYFASTEKSNIIRGWIFGTTLDSKTQSLLIVNNATNVVIKVCEFQFCNDPFLGVYYHKNNKSWMESEFRVYSSANNCTFEYVSQPFLMDLEGKQGNFKNLREFVFKNIDGYFKIYSKHTPINLVRDLPQGFSALEPLVDLPIGINITRFQTLLALHRSYLTPGDSSSGWTAGAAAYYVGYLQPRTFLLKYNENGTITDAVDCALDPLSETKCTLKSFTVEKGIYQTSNFRVQPTESIVRFPNITNLCPFGEVFNATRFASVYAWNRKRISNCVADYSVLYNSASFSTFKCYGVSPTKLNDLCFTNVYADSFVIRGDEVRQIAPGQTGKIADYNYKLPDDFTGCVIAWNSNNLDSKVGGNYNYLYRLFRKSNLKPFERDISTEIYQAGSTPCNGVEGFNCYFPLQSYGFQPTNGVGYQPYRVVVLSFELLHAPATVCGPKKSTNLVKNKCVNFNFNGLTGTGVLTESNKKFLPFQQFGRDIADTTDAVRDPQTLEILDITPCSFGGVSVITPGTNTSNQVAVLYQDVNCTEVPVAIHADQLTPTWRVYSTGSNVFQTRAGCLIGAEHVNNSYECDIPIGAGICASYQTQTNSPRRARSVASQSIIAYTMSLGAENSVAYSNNSIAIPTNFTISVTTEILPVSMTKTSVDCTMYICGDSTECSNFLLQYGSFCTQLNRALTGIAVEQDKNTQEVFAQVKQIYKTPPIKDFGGFNFSQILPDPSKPSKRSFIEDLLFNKVTLADAGFIKQYGDCLGDIAARDLICAQKFNGLTVLPPLLTDEMIAQYTSALLAGTITSGWWFGAGAALQIPFAMQMAYRFNGIGVTQNVLYENQKLIANQFNSAIGKIQDSLSSTASALGKLQDVVNQNAQALNTLVKQLSSNFGAISSVLNDILSRLDPPEAEVQIDRLITGRLQSLQTYVTQQLIRAAEIRWSANLAATKMSECVLGQSKRVDFCGKGYHLMSFPQSAPHGVVFLHVTYVPAQEKNFTTAPAICHDGKAHFPREGVFVSNGTHWFVTQRNFYEPQIITTDNTFVSGNCDVVIGIVNNTVYDPLQPELDSGGSGYIPEAPRDGQAYVRKDGEWVLLSTFL

SEQ ID NO: 9798 - protein, 1177 aa, Artificial Sequence
  SARS-CoV-2/Australia/QLD02/2020__EPI_ISL_407896 spike protein (1-1147)(K986P_V987P_T887W_A1020W) Foldon construct
MFVFLVLLPLVSSQCVNLTTRTQLPPAYTNSFTRGVYYPDKVFRSSVLHSTQDLFLPFFSNVTWFHAIHVSGTNGTKRFDNPVLPFNDGVYFASTEKSNIIRGWIFGTTLDSKTQSLLIVNNATNVVIKVCEFQFCNDPFLGVYYHKNNKSWMESEFRVYSSANNCTFEYVSQPFLMDLEGKQGNFKNLREFVFKNIDGYFKIYSKHTPINLVRDLPQGFSALEPLVDLPIGINITRFQTLLALHRSYLTPGDSSSGWTAGAAAYYVGYLQPRTFLLKYNENGTITDAVDCALDPLSETKCTLKSFTVEKGIYQTSNFRVQPTESIVRFPNITNLCPFGEVFNATRFASVYAWNRKRISNCVADYSVLYNSASFSTFKCYGVSPTKLNDLCFTNVYADSFVIRGDEVRQIAPGQTGKIADYNYKLPDDFTGCVIAWNSNNLDSKVGGNYNYLYRLFRKSNLKPFERDISTEIYQAGSTPCNGVEGFNCYFPLQSYGFQPTNGVGYQPYRVVVLSFELLHAPATVCGPKKSTNLVKNKCVNFNFNGLTGTGVLTESNKKFLPFQQFGRDIADTTDAVRDPQTLEILDITPCSFGGVSVITPGTNTSNQVAVLYQDVNCTEVPVAIHADQLTPTWRVYSTGSNVFQTRAGCLIGAEHVNNSYECDIPIGAGICASYQTQTNSPRRARSVASQSIIAYTMSLGAENSVAYSNNSIAIPTNFTISVTTEILPVSMTKTSVDCTMYICGDSTECSNLLLQYGSFCTQLNRALTGIAVEQDKNTQEVFAQVKQIYKTPPIKDFGGFNFSQILPDPSKPSKRSFIEDLLFNKVTLADAGFIKQYGDCLGDIAARDLICAQKFNGLTVLPPLLTDEMIAQYTSALLAGTITSGWWFGAGAALQIPFAMQMAYRFNGIGVTQNVLYENQKLIANQFNSAIGKIQDSLSSTASALGKLQDVVNQNAQALNTLVKQLSSNFGAISSVLNDILSRLDPPEAEVQIDRLITGRLQSLQTYVTQQLIRAAEIRWSANLAATKMSECVLGQSKRVDFCGKGYHLMSFPQSAPHGVVFLHVTYVPAQEKNFTTAPAICHDGKAHFPREGVFVSNGTHWFVTQRNFYEPQIITTDNTFVSGNCDVVIGIVNNTVYDPLQLELDSGGSGYIPEAPRDGQAYVRKDGEWVLLSTFL

SEQ ID NO: 9799 - protein, 1177 aa, Artificial Sequence
  SARS-CoV-2/India/1-31/2020__EPI_ISL_413523 spike protein (1-1147)(K986P_V987P_T887W_A1020W) Foldon construct
MFVFLVLLPLVSSQCVNLTTRTQLPPAYTNSFTRGVYYPDKVFRSSVLHSTQDLFLPFFSNVTWFHAIHVSGTNGTKRFDNPVLPFNDGVYFASTEKSNIIRGWIFGTTLDSKTQSLLIVNNATNVVIKVCEFQFCNDPFLGVYYHKNNKSWMESEFRVYSSANNCTFEYVSQPFLMDLEGKQGNFKNLREFVFKNIDGYFKIYSKHTPINLVRDLPQGFSALEPLVDLPIGINITRFQTLLALHRSYLTPGDSSSGWTAGAAAYYVGYLQPRTFLLKYNENGTITDAVDCALDPLSETKCTLKSFTVEKGIYQTSNFRVQPTESIVRFPNITNLCPFGEVFNATRFASVYAWNRKRISNCVADYSVLYNSASFSTFKCYGVSPTKLNDLCFTNVYADSFVIRGDEVRQIAPGQTGKIADYNYKLPDDFTGCVIAWNSNNLDSKVGGNYNYLYRLFRKSNLKPFERDISTEIYQAGSTPCNGVEGFNCYFPLQSYGFQPTNGVGYQPYRVVVLSFELLHAPATVCGPKKSTNLVKNKCVNFNFNGLTGTGVLTESNKKFLPFQQFGRDIADTTDAVRDPQTLEILDITPCSFGGVSVITPGTNTSNQVAVLYQDVNCTEVPVAIHADQLTPTWRVYSTGSNVFQTRAGCLIGAEHVNNSYECDIPIGAGICASYQTQTNSPRRARSVASQSIIAYTMSLGAENSVAYSNNSIAIPTNFTISVTTEILPVSMTKTSVDCTMYICGDSTECSNLLLQYGSFCTQLNRALTGIAVEQDKNTQEVFAQVKQIYKTPPIKDFGGFNFSQILPDPSKPSKRSFIEDLLFNKVTLADAGFIKQYGDCLGDIAARDLICAQKFNGLTVLPPLLTDEMIAQYTSALLAGTITSGWWFGAGAALQIPFAMQMAYRFNGIGVTQNVLYENQKLIANQFNSVIGKIQDSLSSTASALGKLQDVVNQNAQALNTLVKQLSSNFGAISSVLNDILSRLDPPEAEVQIDRLITGRLQSLQTYVTQQLIRAAEIRWSANLAATKMSECVLGQSKRVDFCGKGYHLMSFPQSAPHGVVFLHVTYVPAQEKNFTTAPAICHDGKAHFPREGVFVSNGTHWFVTQRNFYEPQIITTDNTFVSGNCDVVIGIVNNTVYDPLQPELDSGGSGYIPEAPRDGQAYVRKDGEWVLLSTFL

SEQ ID NO: 9800 - protein, 1177 aa, Artificial Sequence
  SARS-CoV-2/Guangdong/GD2020087-P0008/2020__EPI_ISL_413863 spike protein (1-1147)(K986P_V987P_T887W_A1020W) Foldon construct
MFVFLVLLPLVSSQCVNLTTRTQLPPAYTNSFTRGVYYPDKVFRSSVLHSTQDLFLPFFSNVTWFHAIHVSGTNGTKRFDNPVLPFNDGVYFASTEKSNIIRGWIFGTTLDSKTQSLLIVNNATNVVIKVCEFQFCNDPFLGVYYHKNNKSWMESEFRVYSSANNCTFEYVSQPFLMDLEGKQGNFKNLREFVFKNIDGYFKIYSKHTPINLVRDLPQGFSALEPLVDLPIGINITRFQTLLALHRSYLTPGDSSSGWTAGAAAYYVGYLQPRTFLLKYNENGTITDAVDCALDPLSETKCTLKSFTVEKGIYQTSNFRVQPTESIVRFPNITNLCPFGEVFNATRFASVYAWNRKRISNCVADYSVLYNSASFSTFKCYGVSPTKLNDLCFTNVYADSFVIRGDEVREIAPGQTGKIADYNYKLPDDFTGCVIAWNSNNLDSKVGGNYNYLYRLFRKSNLKPFERDISTEIYQAGSTPCNGVEGFNCYFPLQSYGFQPTNGVGYQPYRVVVLSFELLHAPATVCGPKKSTNLVKNKCVNFNFNGLTGTGVLTESNKKFLPFQQFGRDIADTTDAVRDPQTLEILDITPCSFGGVSVITPGTNTSNQVAVLYQDVNCTEVPVAIHADQLTPTWRVYSTGSNVFQTRAGCLIGAEHVNNSYECDIPIGAGICASYQTQTNSPRRARSVASQSIIAYTMSLGAENSVAYSNNSIAIPTNFTISVTTEILPVSMTKTSVDCTMYICGDSTECSNLLLQYGSFCTQLNRALTGIAVEQDKNTQEVFAQVKQIYKTPPIKDFGGFNFSQILPDPSKPSKRSFIEDLLFNKVTLADAGFIKQYGDCLGDIAARDLICAQKFNGLTVLPPLLTDEMIAQYTSALLAGTITSGWWFGAGAALQIPFAMQMAYRFNGIGVTQNVLYENQKLIANQFNSAIGKIQDSLSSTASALGKLQDVVNQNAQALNTLVKQLSSNFGAISSVLNDILSRLDPPEAEVQIDRLITGRLQSLQTYVTQQLIRAAEIRWSANLAATKMSECVLGQSKRVDFCGKGYHLMSFPQSAPHGVVFLHVTYVPAQEKNFTTAPAICHDGKAHFPREGVFVSNGTHWFVTQRNFYEPQIITTDNTFVSGNCDVVIGIVNNTVYDPLQPELDSGGSGYIPEAPRDGQAYVRKDGEWVLLSTFL

SEQ ID NO: 9801 - protein, 1177 aa, Artificial Sequence
  SARS-CoV-2/Sweden/01/2020__EPI_ISL_411951 spike protein (1-1147)(K986P_V987P_T887W_A1020W) Foldon construct
MFVFLVLLPLVSSQCVNLTTRTQLPPAYTNSFTRGVYYPDKVFRSSVLHSTQDLFLPFFSNVTWFHAIHVSGTNGTKRFDNPVLPFNDGVYFASTEKSNIIRGWIFGTTLDSKTQSLLIVNNATNVVIKVCEFQFCNDPFLGVYYHKNNKSWMESEFRVYSSANNCTFEYVSQPFLMDLEGKQGNFKNLREFVFKNIDGYFKIYSKHTPINLVRDLPQGFSALEPLVDLPIGINITRFQTLLALHRSYLTPGDSSSGWTAGAAAYYVGYLQPRTFLLKYNENGTITDAVDCALDPLSETKCTLKSFTVEKGIYQTSNFRVQPTESIVRFPNITNLCPFGEVFNATRFASVYAWNRKRISNCVADYSVLYNSASFSTFKCYGVSPTKLNDLCFTNVYADSFVIRGDEVRQIAPGQTGKIADYNYKLPDDFTGCVIAWNSNNLDSKVGGNYNYLYRLFRKSNLKPFERDISTEIYQAGSTPCNGVEGFNCYFPLQSYGFQPTNGVGYQPYRVVVLSFELLHAPATVCGPKKSTNLVKNKCVNFNFNGLTGTGVLTESNKKFLPFQQFGRDIADTTDAVRDPQTLEILDITPCSFGGVSVITPGTNTSNQVAVLYQDVNCTEVPVAIHADQLTPTWRVYSTGSNVFQTRAGCLIGAEHVNNSYECDIPIGAGICASYQTQTNSPRRARSVASQSIIAYTMSLGAENSVAYSNNSIAIPTNFTISVTTEILPVSMTKTSVDCTMYICGDSTECSNLLLQYGSFCTQLNRALTGIAVEQDKNTQEVFAQVKQIYKTPPIKDCGGFNFSQILPDPSKPSKRSFIEDLLFNKVTLADAGFIKQYGDCLGDIAARDLICAQKFNGLTVLPPLLTDEMIAQYTSALLAGTITSGWWFGAGAALQIPFAMQMAYRFNGIGVTQNVLYENQKLIANQFNSAIGKIQDSLSSTASALGKLQDVVNQNAQALNTLVKQLSSNFGAISSVLNDILSRLDPPEAEVQIDRLITGRLQSLQTYVTQQLIRAAEIRWSANLAATKMSECVLGQSKRVDFCGKGYHLMSFPQSAPHGVVFLHVTYVPAQEKNFTTAPAICHDGKAHFPREGVFVSNGTHWFVTQRNFYEPQIITTDNTFVSGNCDVVIGIVNNTVYDPLQPELDSGGSGYIPEAPRDGQAYVRKDGEWVLLSTFL

SEQ ID NO: 9802 - protein, 1177 aa, Artificial Sequence
  SARS-CoV-2/Tianmen/HBCDC-HB-07/2020__EPI_ISL_412983 spike protein (1-1147)(K986P_V987P_T887W_A1020W) Foldon construct
MFVFLVLLPLVSSQCVNLTTRTQLPPAYTNSFTRGVYYPDKVFRSSVLHSTQDLFLPFFSNVTWFHAIHVSGTNGTKRFDNPVLPFNDGVYFASTEKSNIIRGWIFGTTLDSKTQSLLIVNNATNVVIKVCEFQFCNDPFLGVYYHKNNKSWMESEFRVYSSANNCTFEYVSQPFLMDLEGKQGNFKNLREFVFKNIDGYFKIYSKHTPINLVRDLPQGFSALEPLVDLPIGINITRFQTLLALHRSYLTPGDSSSGWTAGAAAYYVGYLQPRTFLLKYNENGTITDAVDCALDPLSETKCTLKSFTVEKGIYQTSNFRVQPTESIVRFPNITNLCPFGEVFNATRFASVYAWNRKRISNCVADYSVLYNSASFSTFKCYGVSPTKLNDLCFTNVYADSFVIRGDEVRQIAPGQTGKIADYNYKLPDDFTGCVIAWNSNNLDSKVGGNYNYLYRLFRKSNLKPFERDISTEIYQAGSTPCNGVEGFNCYFPLQSYGFQPTNGVGYQPYRVVVLSFELLHAPATVCGPKKSTNLVKNKCVNFNFNGLTGTGVLTESNKKFLPFQQFGRDIADTTDAVRDPQTLEILDITPCSFGGVSVITPGTNTSNQVAVLYQDLNCTEVPVAIHADQLTPTWRVYSTGSNVFQTRAGCLIGAEHVNNSYECDIPIGAGICASYQTQTNSPRRARSVASQSIIAYTMSLGAENSVAYSNNSIAIPTNFTISVTTEILPVSMTKTSVDCTMYICGDSTECSNLLLQYGSFCTQLNRALTGIAVEQDKNTQEVFAQVKQIYKTPPIKDFGGFNFSQILPDPSKPSKRSFIEDLLFNKVTLADAGFIKQYGDCLGDIAARDLICAQKFNGLTVLPPLLTDEMIAQYTSALLAGTITSGWWFGAGAALQIPFAMQMAYRFNGIGVTQNVLYENQKLIANQFNSAIGKIQDSLSSTASALGKLQDVVNQNAQALNTLVKQLSSNFGAISSVLNDILSRLDPPEAEVQIDRLITGRLQSLQTYVTQQLIRAAEIRWSANLAATKMSECVLGQSKRVDFCGKGYHLMSFPQSAPHGVVFLHVTYVPAQEKNFTTAPAICHDGKAHFPREGVFVSNGTHWFVTQRNFYEPQIITTDNTFVSGNCDVVIGIVNNTVYDPLQPELDSGGSGYIPEAPRDGQAYVRKDGEWVLLSTFL

SEQ ID NO: 9803 - protein, 1177 aa, Artificial Sequence
  SARS-CoV-2/Hong Kong/case42_VM20002493/2020__EPI_ISL_414527 spike protein (1-1147)(K986P_V987P_T887W_A1020W) Foldon construct
MFVFLVLLPLVSSQCVNLTTRTQLPPAYTNSFTRGVYYPDKVFRSSVLHSTQDLFLPFFSNVTWFHAIHVSGTNGTKRFDNPVLPFNDGVYFASTEKSNIIRGWIFGTTLDSKTQSLLIVNNATNVVIKVCEFQFCNDPFLGVYYHKNNKSWMESEFRVYSSANNCTFEYVSQPFLMDLEGKQGNFKNLREFVFKNIDGYFKIYSKHTPINLVRDLPQGFSALEPLVDLPIGINITRFQTLLALHRSYLTPGDSSSGWTAGAAAYYVGYLQPRTFLLKYNENGTITDAVDCALDPLSETKCTLKSFTVEKGIYQTSNFRVQPTESIVRFPNITNLCPFGEVFNATRFASVYAWNRKRISNCVADYSVLYNSASFSTFKCYGVSPTKLNDLCFTNVYADSFVIRGDEVRQIAPGQTGKIADYNYKLPDDFTGCVIAWNSNNLDSKVGGNYNYLYRLFRKSNLKPFERDISTEIYQAGSTPCNGVEGFNCYFPLQSYGFQPTNGVGYQPYRVVVLSFELLHAPATVCGPKKSTNLVKNKCVNFNFNGLTGTGVLTESNKKFLPFQQFGRDIADTTDAVRDPQTLEILDITPCSFGGVSVITPGTNTSNQVAVLYQDVNCTEVPVAIHADQLTPTWRVYSTGSNVFQTRAGCLIGAEHVNNSYECDIPIGAGICASYQTQTNSPRRARSVASQSIIAYTMSLGAENSVAYSNNSIAIPTNFAISVTTEILPVSMTKTSVDCTMYICGDSTECSNLLLQYGSFCTQLNRALTGIAVEQDKNTQEVFAQVKQIYKTPPIKDFGGFNFSQILPDPSKPSKRSFIEDLLFNKVTLADAGFIKQYGDCLGDIAARDLICAQKFNGLTVLPPLLTDEMIAQYTSALLAGTITSGWWFGAGAALQIPFAMQMAYRFNGIGVTQNVLYENQKLIANQFNSAIGKIQDSLSSTASALGKLQDVVNQNAQALNTLVKQLSSNFGAISSVLNDILSRLDPPEAEVQIDRLITGRLQSLQTYVTQQLIRAAEIRWSANLAATKMSECVLGQSKRVDFCGKGYHLMSFPQSAPHGVVFLHVTYVPAQEKNFTTAPAICHDGKAHFPREGVFVSNGTHWFVTQRNFYEPQIITTDNTFVSGNCDVVIGIVNNTVYDPLQPELDSGGSGYIPEAPRDGQAYVRKDGEWVLLSTFL

SEQ ID NO: 9804 - protein, 1177 aa, Artificial Sequence
  SARS-CoV-2/USA/CruiseA-23/2020__EPI_ISL_414482 spike protein (1-1147)(K986P_V987P_T887W_A1020W) Foldon construct
MFVFLVLLPLVSSQCVNLTTRTQLPPAYTNSFTRGVYYPDKVFRSSVLHSTQDLFLPFFSNVTWFHAIHVSGTNGTKRFDNPVLPFNDGVYFASTEKSNIIRGWIFGTTLDSKTQSLLIVNNATNVVIKVCEFQFCNDPFLGVYYHKNNKSWMESEFRVYSSANNCTFEYVSQPFLMDLEVKQGNFKNLREFVFKNIDGYFKIYSKHTPINLVRDLPQGFSALEPLVDLPIGINITRFQTLLALHRSYLTPGDSSSGWTAGAAAYYVGYLQPRTFLLKYNENGTITDAVDCALDPLSETKCTLKSFTVEKGIYQTSNFRVQPTESIVRFPNITNLCPFGEVFNATRFASVYAWNRKRISNCVADYSVLYNSASFSTFKCYGVSPTKLNDLCFTNVYADSFVIRGDEVRQIAPGQTGKIADYNYKLPDDFTGCVIAWNSNNLDSKVGGNYNYLYRLFRKSNLKPFERDISTEIYQAGSTPCNGVEGFNCYFPLQSYGFQPTNGVGYQPYRVVVLSFELLHAPATVCGPKKSTNLVKNKCVNFNFNGLTGTGVLTESNKKFLPFQQFGRDIADTTDAVRDPQTLEILDITPCSFGGVSVITPGTNTSNQVAVLYQDVNCTEVPVAIHADQLTPTWRVYSTGSNVFQTRAGCLIGAEHVNNSYECDIPIGAGICASYQTQTNSPRRARSVASQSIIAYTMSLGAENSVAYSNNSIAIPTNFTISVTTEILPVSMTKTSVDCTMYICGDSTECSNLLLQYGSFCTQLNRALTGIAVEQDKNTQEVFAQVKQIYKTPPIKDFGGFNFSQILPDPSKPSKRSFIEDLLFNKVTLADAGFIKQYGDCLGDIAARDLICAQKFNGLTVLPPLLTDEMIAQYTSALLAGTITSGWWFGAGAALQIPFAMQMAYRFNGIGVTQNVLYENQKLIANQFNSAIGKIQDSLSSTASALGKLQDVVNQNAQALNTLVKQLSSNFGAISSVLNDILSRLDPPEAEVQIDRLITGRLQSLQTYVTQQLIRAAEIRWSANLAATKMSECVLGQSKRVDFCGKGYHLMSFPQSAPHGVVFLHVTYVPAQEKNFTTAPAICHDGKAHFPREGVFVSNGTHWFVTQRNFYEPQIITTDNTFVSGNCDVVIGIVNNTVYDPLQPELDSGGSGYIPEAPRDGQAYVRKDGEWVLLSTFL

SEQ ID NO: 9805 - protein, 1177 aa, Artificial Sequence
  SARS-CoV-2/Hong Kong/case85_VM20002868/2020__EPI_ISL_414519 spike protein (1-1147)(K986P_V987P_T887W_A1020W) Foldon construct
MFVFLVLVPLVSSQCVNLTTRTQLPPAYTNSFTRGVYYPDKVFRSSVLHSTQDLFLPFFSNVTWFHAIHVSGTNGTKRFDNPVLPFNDGVYFASTEKSNIIRGWIFGTTLDSKTQSLLIVNNATNVVIKVCEFQFCNDPFLGVYYHKNNKSWMESEFRVYSSANNCTFEYVSQPFLMDLEGKQGNFKNLREFVFKNIDGYFKIYSKHTPINLVRDLPQGFSALEPLVDLPIGINITRFQTLLALHRSYLTPGDSSSGWTAGAAAYYVGYLQPRTFLLKYNENGTITDAVDCALDPLSETKCTLKSFTVEKGIYQTSNFRVQPTESIVRFPNITNLCPFGEVFNATRFASVYAWNRKRISNCVADYSVLYNSASFSTFKCYGVSPTKLNDLCFTNVYADSFVIRGDEVRQIAPGQTGKIADYNYKLPDDFTGCVIAWNSNNLDSKVGGNYNYLYRLFRKSNLKPFERDISTEIYQAGSTPCNGVEGFNCYFPLQSYGFQPTNGVGYQPYRVVVLSFELLHAPATVCGPKKSTNLVKNKCVNFNFNGLTGTGVLTESNKKFLPFQQFGRDIADTTDAVRDPQTLEILDITPCSFGGVSVITPGTNTSNQVAVLYQDVNCTEVPVAIHADQLTPTWRVYSTGSNVFQTRAGCLIGAEHVNNSYECDIPIGAGICASYQTQTNSPRRARSVASQSIIAYTMSLGAENSVAYSNNSIAIPTNFTISVTTEILPVSMTKTSVDCTMYICGDSTECSNLLLQYGSFCTQLNRALTGIAVEQDKNTQEVFAQVKQIYKTPPIKDFGGFNFSQILPDPSKPSKRSFIEDLLFNKVTLADAGFIKQYGDCLGDIAARDLICAQKFNGLTVLPPLLTDEMIAQYTSALLAGTITSGWWFGAGAALQIPFAMQMAYRFNGIGVTQNVLYENQKLIANQFNSAIGKIQDSLSSTASALGKLQDVVNQNAQALNTLVKQLSSNFGAISSVLNDILSRLDPPEAEVQIDRLITGRLQSLQTYVTQQLIRAAEIRWSANLAATKMSECVLGQSKRVDFCGKGYHLMSFPQSAPHGVVFLHVTYVPAQEKNFTTAPAICHDGKAHFPREGVFVSNGTHWFVTQRNFYEPQIITTDNTFVSGNCDVVIGIVNNTVYDPLQPELDSGGSGYIPEAPRDGQAYVRKDGEWVLLSTFL

SEQ ID NO: 9806 - protein, 1177 aa, Artificial Sequence; identical to SEQ ID NO: 9796
  SARS-CoV-2/England/200990660/2020__EPI_ISL_414523 spike protein (1-1147)(K986P_V987P_T887W_A1020W) Foldon construct

SEQ ID NO: 9807 - protein, 1177 aa, Artificial Sequence
  SARS-CoV-2/Australia/NSW09/2020__EPI_ISL_413595 spike protein (1-1147)(K986P_V987P_T887W_A1020W) Foldon construct
MFVFLVLLPLVSSQCVNLTTRTQLPPAYTNSFTRGVYYPDKVFRSSVLHSTQDLFLPFFSNVTWFHAIHVSGTNGTKRFDNPVLPFNDGVYFASTEKSNIIRGWIFGTTLDSKTQSLLIVNNATNVVIKVCEFQFCNDPFLGVYYHKNNKSWMESEFRVYSSANNCTFEYVSQPFLMDLEGKQGNFKNLREFVFKNIDGYFKIYSKHTPINLVRDLPQGFSALEPLVDLPIGINITRFQTLLALHRSYLTPGDSSSGWTAGAAAYYVGYLQPRTFLLKYNENGTITDAVDCALDPLSETKCTLKSFTVEKGIYQTSNFRVQPTESIVRFPNITNLCPFGEVFNATRFASVYAWNRKRISNCVADYSVLYNSASFSTFKCYGVSPTKLNDLCFTNVYADSFVIRGDEVRQIAPGQTGKIADYNYKLPDDFTGCVIAWNSNNLDSKVGGNYNYLYRLFRKSNLKPFERDISTEIYQAGSTPCNGVEGFNCYFPLQSYGFQPTNGVGYQPYRVVVLSFELLHAPATVCGPKKSTNLVKNKCVNFNFNGLTGTGVLTESNKKFLPFQQFGRDIADTTDAVRDPQTLEILDITPCSFGGVSVITPGTNTSNQVAVLYQDVNCTEVPVAIHADQLTPTWRVYSTGSNVFQTRAGCLIGAEHVNNSYECDIPIGAGICASYQTQTNSPRRARSVASQSIIAYTMSLGAENSVAYSNNSIAIPTNFTISVTTEILPVSMTKTSVDCTMYICGDSTECSNLLLQYGSFCTQLNRALTGIAVEQDKNTQEVFAQVKQIYKTPPIKDFGGFNFSQILPDPSKPSKRSFIEDLLFNKVTLADAGFIKQYGDCLGDIAARDLICAQKFNGLTVLPPLLTDEMIAQYTSALLAGTITSGWWFGAGAALQIPFAMQMAYRFNGIGVTQNVLYENQKLIANQFNSAIGKIQDSLSFTASALGKLQDVVNQNAQALNTLVKQLSSNFGAISSVLNDILSRLDPPEAEVQIDRLITGRLQSLQTYVTQQLIRAAEIRWSANLAATKMSECVLGQSKRVDFCGKGYHLMSFPQSAPHGVVFLHVTYVPAQEKNFTTAPAICHDGKAHFPREGVFVSNGTHWFVTQRNFYEPQIITTDNTFVSGNCDVVIGIVNNTVYDPLQPELDSGGSGYIPEAPRDGQAYVRKDGEWVLLSTFL

SEQ ID NO: 9808 - protein, 1177 aa, Artificial Sequence; identical to SEQ ID NO: 9788
  SARS-CoV-2/Australia/NSW10/2020__EPI_ISL_413596 spike protein (1-1147)(K986P_V987P_T887W_A1020W) Foldon construct

SEQ ID NO: 9809 - protein, 1177 aa, Artificial Sequence
  SARS-CoV-2/Switzerland/1000477797/2020__EPI_ISL_413023 spike protein (1-1147)(K986P_V987P_T887W_A1020W) Foldon construct
MFVFLVLLPLVSSQCVNLTTRTQLPPAYTNSFTRGVYYPDKVFRSSVLHSTQDLFLPFFSNVTWFHAIHVSGTNGTKRFDNPVLPFNDGVYFASTEKSNIIRGWIFGTTLDSKTQSLLIVNNATNVVIKVCEFQFCNDPFLGVYYHKNNKSWMESEFRVYSSANNCTFEYVSQPFLMDLEGKQGNFKNLREFVFKNIDGYFNIYSKHTPINLVRDLPQGFSALEPLVDLPIGINITRFQTLLALHRSYLTPGDSSSGWTAGAAAYYVGYLQPRTFLLKYNENGTITDAVDCALDPLSETKCTLKSFTVEKGIYQTSNFRVQPTESIVRFPNITNLCPFGEVFNATRFASVYAWNRKRISNCVADYSVLYNSASFSTFKCYGVSPTKLNDLCFTNVYADSFVIRGDEVRQIAPGQTGKIADYNYKLPDDFTGCVIAWNSNNLDSKVGGNYNYLYRLFRKSNLKPFERDISTEIYQAGSTPCNGVEGFNCYFPLQSYGFQPTNGVGYQPYRVVVLSFELLHAPATVCGPKKSTNLVKNKCVNFNFNGLTGTGVLTESNKKFLPFQQFGRDIADTTDAVRDPQTLEILDITPCSFGGVSVITPGTNTSNQVAVLYQGVNCTEVPVAIHADQLTPTWRVYSTGSNVFQTRAGCLIGAEHVNNSYECDIPIGAGICASYQTQTNSPRRARSVASQSIIAYTMSLGAENSVAYSNNSIAIPTNFTISVTTEILPVSMTKTSVDCTMYICGDSTECSNLLLQYGSFCTQLNRALTGIAVEQDKNTQEVFAQVKQIYKTPPIKDFGGFNFSQILPDPSKPSKRSFIEDLLFNKVTLADAGFIKQYGDCLGDIAARDLICAQKFNGLTVLPPLLTDEMIAQYTSALLAGTITSGWWFGAGAALQIPFAMQMAYRFNGIGVTQNVLYENQKLIANQFNSAIGKIQDSLSSTASALGKLQDVVNQNAQALNTLVKQLSSNFGAISSVLNDILSRLDPPEAEVQIDRLITGRLQSLQTYVTQQLIRAAEIRWSANLAATKMSECVLGQSKRVDFCGKGYHLMSFPQSAPHGVVFLHVTYVPAQEKNFTTAPAICHDGKAHFPREGVFVSNGTHWFVTQRNFYEPQIITTDNTFVSGNCDVVIGIVNNTVYDPLQPELDSGGSGYIPEAPRDGQAYVRKDGEWVLLSTFL

SEQ ID NO: 9810 - protein, 1177 aa, Artificial Sequence
  SARS-CoV-2/Belgium/BA-02291/2020__EPI_ISL_415159 spike protein (1-1147)(K986P_V987P_T887W_A1020W) Foldon construct
MFVFLVLLPLVSSQCVNLTTRTQLPPAYTNSFTRGVYYPDKVFRSSVLHSTQDLFLPFFSNVTWFHAIHVSGTNGTKRFDNPVLPFNDGVYFASTEKSNIIRGWIFGTTLDSKTQSLLIVNNATNVVIKVCEFQFCNDPFLGVYYHKNNKSWMESEFRVYSSANNCTFEYVSQPFLMDLEGKQGNFKNLREFVFKNIDGYFKIYSKHTPINLVRDLPQGFSALEPLVDLPIGINITRFQTLLALHRSYLTPGDSSSGWTAGAAAYYVGYLQPRTFLLKYNENGTITDAVDCALDPLSETKCTLKSFTVEKGIYQTSNFRVQPTESIVRFPNITNLCPFGEVFNATRFASVYAWNRKRISNCVADYSVLYNSASFSTFKCYGVSPTKLNDLCFTNVYADSFVIRGDEVRQIAPGQTGKIADYNYKLPDDFTGCVIAWNSNNLDSKVGGNYNYLYRLFRRSNLKPFERDISTEIYQAGSTPCNGVEGFNCYFPLQSYGFQPTNGVGYQPYRVVVLSFELLPAPATVCGPKKSTNLVKNKCVNFNFNGLTGTGVLTESNKKFLPFQQFGRDIADTTDAVRDPQTLEILDITPCSFGGVSVITPGTNTSNQVAVLYQGVNCTEVPVAIHADQLTPTWRVYSTGSNVFQTRAGCLIGAEHVNNSYECDIPIGAGICASYQTQTNSPRRARSVASQSIIAYTMSLGAENSVAYSNNSIAIPTNFTISVTTEILPVSMTKTSVDCTMYICGDSTECSNLLLQYGSFCTQLNRALTGIAVEQDKNTQEVFAQVKQIYKTPPIKDFGGFNFSQILPDPSKPSKRSFIEDLLFNKVTLADAGFIKQYGDCLGDIAARDLICAQKFNGLTVLPPLLTDEMIAQYTSALLAGTITSGWWFGAGAALQIPFAMQMAYRFNGIGVTQNVLYENQKLIANQFNSAIGKIQDSLSSAAPALGKLQDVVNQNAQALNTLVKQLSSNFGAISSVLNDILSRLDPPEAEVQIDRLITGRLQSLQTYVTQQLIRAAEIRWSANLAATKMSECVLGQSKRVDFCGKGYHLMSFPQSAPHGVVFLHVTYVPAQEKNFTTAPAICHDGKAHFPREGVFVSNGTHWFVTQRNFYEPQIITTDNTFVSGNCDVVIGIVNNTVYDPLQPELDSGGSGYIPEAPRDGQAYVRKDGEWVLLSTFL

SEQ ID NO: 9811 - protein, 1177 aa, Artificial Sequence
  SARS-CoV-2/USA/WA8-UW5/2020__EPI_ISL_413486 spike protein (1-1147)(K986P_V987P_T887W_A1020W) Foldon construct
MFVFLVLLPLVSSQCVNLTTRTQLPPAYTNSFTRGVYYPDKVFRSSVLHSTQDLFLPFFSNVTWFHAIHVSGTNGTKRFDNPVLPFNDGVYFASTEKSNIIRGWIFGTTLDSKTQSLLIVNNATNVVIKVCEFQFCNDPFLGVYYHKNNKSWMESEFRVYSSANNCTFEYVSQPFLMDLEGKQGNFKNLREFVFKNIDGYFKIYSKHTPINLVRDLPQGFSALEPLVDLPIGINITRFQTLLALHRSYLTPGDSSSGWTAGAAAYYVGYLQPRTFLLKYNENGTITDAVDCALDPLSETKCTLKSFTVEKGIYQTSNFRVQPTESIVRFPNITNLCPFGEVFNATRFASVYAWNRKRISNCVADYSVLYNSASFSTFKCYGVSPTKLNDLCFTNVYADSFVIRGDEVRQIAPGQTGKIADYNYKLPDDFTGCVIAWNSNNLDSKVGGNYNYLYRLFRKSNLKPFERDISTEIYQAGSTPCNGVEGFNCYFPLQSYGFQPTNGVGYQPYRVVVLSFELLHAPATVCGPKKSTNLVKNKCVNFNFNGLTGTGVLTESNKKFLPFQQFGRDIADTTDAVRDPQTLEILDITPCSFGGVSVITPGTNTSNQVAVLYQDVNCTEVPVAIHADQLTPTWRVYSTGSNVFQTRAGCLIGAEYVNNSYECDIPIGAGICASYQTQTNSPRRARSVASQSIIAYTMSLGAENSVAYSNNSIAIPTNFTISVTTEILPVSMTKTSVDCTMYICGDSTECSNLLLQYGSFCTQLNRALTGIAVEQDKNTQEVFAQVKQIYKTPPIKDFGGFNFSQILPDPSKPSKRSFIEDLLFNKVTLADAGFIKQYGDCLGDIAARDLICAQKFNGLTVLPPLLTDEMIAQYTSALLAGTITSGWWFGAGAALQIPFAMQMAYRFNGIGVTQNVLYENQKLIANQFNSAIGKIQDSLSSTASALGKLQDVVNQNAQALNTLVKQLSSNFGAISSVLNDILSRLDPPEAEVQIDRLITGRLQSLQTYVTQQLIRAAEIRWSANLAATKMSECVLGQSKRVDFCGKGYHLMSFPQSAPHGVVFLHVTYVPAQEKNFTTAPAICHDGKAHFPREGVFVSNGTHWFVTQRNFYEPQIITTDNTFVSGNCDVVIGIVNNTVYDPLQPELDSGGSGYIPEAPRDGQAYVRKDGEWVLLSTFL

SEQ ID NO: 9812 - protein, 1177 aa, Artificial Sequence
  SARS-CoV-2/England/20102000506/2020__EPI_ISL_415147 spike protein (1-1147)(K986P_V987P_T887W_A1020W) Foldon construct
MFVFLVLLPLVSSQCVNLTTRTQLPPAYTNSFTRGVYYPDKVFRSSVLHSTQDLFLPFFSNVTWFHAIHVSGTNGTKRFDNPVLPFNDGVYFASTEKSNIIRGWIFGTTLDSKTQSLLIVNNATNVVIKVCEFQFCNDPFLGVYYHKNNKSWMESEFRVYSSANNCTFEYVSQPFLMDLEGKQGNFKNLREFVFKNIDGYFKIYSKHTPINLVRDLPQGFSALEPLVDLPIGINITRFQTLLALHRSYLTPGDSSSGWTAGAAAYYVGYLQPRTFLLKYNENGTITDAVDCALDPLSETKCTLKSFTVEKGIYQTSNFRVQPTESIVRFPNITNLCPFGEVFNATRFASVYAWNRKRISNCVADYSVLYNSASFSTFKCYGVSPTKLNDLCFTNVYADSFVIRGDEVRQIAPGQTGKIADYNYKLPDDFTGCVIAWNSNNLDSKVGGNYNYLYRLFRKSNLKPFERDISTEIYQAGSTPCNGVEGFNCYFPLQSYGFQPTNGVGYQPYRVVVLSFELLHAPATVCGPKKSTNLVKNKCVNFNFNGLTGTGVLTESNKKFLPFQQFGRDIADTTDAVRDPQTLEILDITPCSFGGVSVITPGTNTSNQVAVLYQGVNCTEVPVAIHADQLTPTWRVYSTGSNVFQTRAGCLIGAEHVNNSYECDIPIGAGICASYQTQTNSPRRARSVASQSIIAYTMSLGAENSVAYSNNSIAIPTNFTISVTTEILPVSMTKTSVDCTMYICGDSTECSNLLLQYGSFCTQLNRALTGIAVEQDKNTQEVFAQVKQIYKTPPIKDFGGFNFSQILPDPSKPSKRSFIEDLLFNKVTLADAGFIKQYGYCLGDIAARDLICAQKFNGLTVLPPLLTDEMIAQYTSALLAGTITSGWWFGAGAALQIPFAMQMAYRFNGIGVTQNVLYENQKLIANQFNSAIGKIQDSLSSTASALGKLQDVVNQNAQALNTLVKQLSSNFGAISSVLNDILSRLDPPEAEVQIDRLITGRLQSLQTYVTQQLIRAAEIRWSANLAATKMSECVLGQSKRVDFCGKGYHLMSFPQSAPHGVVFLHVTYVPAQEKNFTTAPAICHDGKAHFPREGVFVSNGTHWFVTQRNFYEPQIITTDNTFVSGNCDVVIGIVNNTVYDPLQPELDSGGSGYIPEAPRDGQAYVRKDGEWVLLSTFL

SEQ ID NO: 9813 - protein, 1177 aa, Artificial Sequence
  SARS-CoV-2/Belgium/VAG-03013/2020__EPI_ISL_415155 spike protein (1-1147)(K986P_V987P_T887W_A1020W) Foldon construct
MFVFLVLLPLVSSQCVNLTTRTQLPPAYTNSFTRGVYYPDKVFRSSVLHSTQDLFLPFFSNVTWFHAIHVSGTNGTKRFDNPVLPFNDGVYFASTEKSNIIRGWIFGTTLDSKTQSLLIVNNATNVVIKVCEFQFCNDPFLGVYYHKNNKSWMESEFRVYSSANNCTFEYVSQPFLMDLEGKQGNFKNLREFVFKNIDGYFKIYSKHTPINLVRDLPQGFSALEPLVDLPIGINITRFQTLLALHRSYLTPGDSSSGWTAGAAAYYVGYLQPRTFLLKYNENGTITDAVDCALDPLSETKCTLKSFTVEKGIYQTSNFRVQPTESIVRFPNITNLCPFGEVFNATRFASVYAWNRKRISNCVADYSVLYNSASFSTFKCYGVSPTKLNDLCFTNVYADSFVIRGDEVRQIAPGQTGKIADYNYKLPDDFTGCVIAWNSNNLDSKVGGNYNYLYRLFRKSNLKPFERDISTEIYQAGSTPCNGVEGFNCYFPLQSYGFQPTNGVGYQPYRVVVLSFELLHAPATVCGPKKSTNLVKNKCVNFNFNGLTGTGVLTESNKKFLPFQQFGRDIADTTDAVRDPQTLEILDITPCSFGGVSVITPGTNTSNQVAVLYQGVNCTEVPVAIHADQLTPTWRVYSTGSNVFQTRAGCLIGAEHVNNSYECDIPIGAGICASYQTQTNSPRRARSVASQSIIAYTMSLGAENSVAYSNNSIAIPTNFTISVTTEILPVSMTKTSVDCTMYICGDSTECSNLLLQYGSFCTQLNRALTGIAVEQDKNTQEVFAQVKQIYKTPPIKDFGGFNFSQILPDPSKPSKRSFIEDLLFNKVTLADAGFIKQYGDCLGDIAARDLICAQKFNGLTVLPPLLTDEMIAQYTSALLAGTITSGWWFGAGAALQIPFAMQMAYRFNGIGVTQNVLYENQKLIANQFNSAIGKIQDSLSSTATALGKLQDVVNQNAQALNTLVKQLSSNFGAISSVLNDILSRLDPPEAEVQIDRLITGRLQSLQTYVTQQLIRAAEIRWSANLAATKMSECVLGQSKRVDFCGKGYHLMSFPQSAPHGVVFLHVTYVPAQEKNFTTAPAICHDGKAHFPREGVFVSNGTHWFVTQRNFYEPQIITTDNTFVSGNCDVVIGIVNNTVYDPLQPELDSGGSGYIPEAPRDGQAYVRKDGEWVLLSTFL

SEQ ID NO: 9814 - protein, 1177 aa, Artificial Sequence
  SARS-CoV-2/Belgium/BC-03016/2020__EPI_ISL_415157 spike protein (1-1147)(K986P_V987P_T887W_A1020W) Foldon construct
MFVFLVLLPLVSSQCVNLTTRTQLPPAYTNSFTRGVYYPDKVFRSSVLHSTQDLFLPFFSNVTWFHAIHVSGTNGTKRFDNPVLPFNDGVYFASTEKSNIIRGWIFGTTLDSKTQSLLIVNNATNVVIKVCEFQFCNDPFLGVYYHKNNKSWMESEFRVYSSANNCTFEYVSQPFLMDLEGKQGNFKNLREFVFKNIDGYFKIYSKHTPINLVRDLPQGFSALEPLVDLPIGINITRFQTLLALHRSYLTPGDSSSGWTAGAAAYYVGYLQPRTFLLKYNENGTITDAVDCALDPLSETKCTLKSFTVEKGIYQTSNFRVQPTESIVRFPNITNLCPFGEVFNATRFASVYAWNRKRISNCVADYSVLYNSASFSTFKCYGVSPTKLNDLCFTNVYADSFVIRGDEVRQIAPGQTGKIADYNYKLPDDFTGCVIAWNSNNLDSKVGGNYNYLYRLFRKSNLKPFERDISTEIYQAGSTPCNGVEGFNCYFPLQSYGFQPTNGVGYQPYRVVVLSFELLHAPATVCGPKKSTNLVKNKCVNFNFNGLTGTGVLTESNKKFLPFQQFGRDIADTTDAVRDPQTLEILDITPCSFGGVSVITPGTNTSNQVAVLYQGVNCTEVPVAIHADQLTPTWRVYSTGSNVFQTRAGCLIGAEHVNNSYECDIPIGAGICASYQTQTNSPRRARSVASQSIIAYTMSLGAENSVAYSNNSIAIPTNFTISVTTEILPVSMTKTSVDCTMYICGDSTECSNLLLQYGSFCTQLNRALTGIAVEQDKNTQEVFAQVKQIYKTPPIKDFGGFNFSQILPDPSKPSKRSFIEDLLFNKVTLADAGFIKQYGDCLGDIAARDLICAQKFNGLTVLPPLLTDEMIAQYTSALLAGTITSGWWFGAGAALQIPFAMQMAYRFNGIGVTQNVLYENQKLIANQFNSAIGKIQDSLSSTAPALGKLQDVVNQNAQALNTLVKQLSSNFGAISSVLNDILSRLDPPEAEVQIDRLITGRLQSLQTYVTQQLIRAAEIRWSANLAATKMSECVLGQSKRVDFCGKGYHLMSFPQSAPHGVVFLHVTYVPAQEKNFTTAPAICHDGKAHFPREGVFVSNGTHWFVTQRNFYEPQIITTDNTFVSGNCDVVIGIVNNTVYDPLQPELDSGGSGYIPEAPRDGQAYVRKDGEWVLLSTFL

SEQ ID NO: 9815 - protein, 1177 aa, Artificial Sequence
  SARS-CoV-2/Germany/BavPat3/2020__EPI_ISL_414521 spike protein (1-1147)(K986P_V987P_T887W_A1020W) Foldon construct
MFVFLVLLPLVSSQCVNLTTRTQLPPAYTNSFTRGVYYPDKVFRSSVLHSTQDLFLPFFSNVTWFHAIHVSGTNGTKRFDNPVLPFNDGVYFASTEKSNIIRGWIFGTTLDSKTQSLLIVNNATNVVIKVCEFQFCNDPFLGVYYHKNNKSWMESEFRVYSSANNCTFEYVSQPFLMDLEGKQGNFKNLREFVFKNIDGYFKIYSKHTPINLVRDLPQGFSALEPLVDLPIGINITRFQTLLALHRSYLTPGDSSSGWTAGAAAYYVGYLQPRTFLLKYNENGTITDAVDCALDPLSETKCTLKSFTVEKGIYQTSNFRVQPTESIVRFPNITNLCPFGEVFNATRFASVYAWNRKRISNCVADYSVLYNSASFSTFKCYGVSPTKLNDLCFTNVYADSFVIRGDEVRQIAPGQTGKIADYNYKLPDDFTGCVIAWNSNNLDSKVGGNYNYLYRLFRKSNLKPFERDISTEIYQAGSTPCNGVEGFNCYFPLQSYGFQPTNGVGYQPYRVVVLSFELLHAPATVCGPKKSTNLVKNKCVNFNFNGLTGTGVLTESNKKFLPFQQFGRDIADTTDAVRDPQTLEILDITPCSFGGVSVITPGTNTSNQVAVLYQDVNCTEVPVAIHADQLTPTWRVYSTGSNVFQTRAGCLIGAEHVNNSYECDIPIGAGICASYQTQTNSPRRARSVASQSIIAYTMSLGAENSVAYSNNSIAIPTNFTISVTTEILPVSMTKTSVDCTMYICGDSTECSNLLLQYGSFCTQLNRALTGIAVEQDKNTQQVFAQVKQIYKTPPIKDFGGFNFSQILPDPSKPSKRSFIEDLLFNKVTLADAGFIKQYGDCLGDIAARDLICAQKFNGLTVLPPLLTDEMIAQYTSALLAGTITSGWWFGAGAALQIPFAMQMAYRFNGIGVTQNVLYENQKLIANQFNSAIGKIQDSLSSTASALGKLQDVVNQNAQALNTLVKQLSSNFGAISSVLNDILSRLDPPEAEVQIDRLITGRLQSLQTYVTQQLIRAAEIRWSANLAATKMSECVLGQSKRVDFCGKGYHLMSFPQSAPHGVVFLHVTYVPAQEKNFTTAPAICHDGKAHFPREGVFVSNGTHWFVTQRNFYEPQIITTDNTFVSGNCDVVIGIVNNTVYDPLQPELDSGGSGYIPEAPRDGQAYVRKDGEWVLLSTFL

SEQ ID NO: 9816 - protein, 1177 aa, Artificial Sequence
  SARS-CoV-2/France/HF1805/2020__EPI_ISL_414628 spike protein (1-1147)(K986P_V987P_T887W_A1020W) Foldon construct
MFVFLVLLPLVSSQCVNLTTRTQLPPAYTNSFTRGVYYPDKVFRSSVLHSTQDLFLPFFSNVTWFHAIHVSGTNGTKRFDNPVLPFNDGVYFASTEKSNIIRGWIFGTTLDSKTQSLLIVNNATNVVIKVCEFQFCNDPFLGVYYHKNNKSWMESEFRVYSSANNCTFEYVSQPFLMDLEGKQGNFKNLREFVFKNIDGYFKIYSKHTPINLVRDLPQGFSALEPLVDLPIGINITRFQTLLALHRSYLTPGDSSSGWTAGAAAYYVGYLQPRTFLLKYNENGTITDAVDCALDPLSETKCTLKSFTVEKGIYQTSNFRVQPTESIVRFPNITNLCPFGEVFNATRFASVYAWNRKRISNCVADYSVLYNSASFSTFKCYGVSPTKLNDLCFTNVYADSFVIRGDEVRQIAPGQTGKIADYNYKLPDDFTGCVIAWNSNNLDSKVGGNYNYLYRLFRKSNLKPFERDISTEIYQAGSTPCNGVEGFNCYFPLQSYGFQPTNGVGYQPYRVVVLSFELLHAPATVCGPKKSTNLVKNKCVNFNFNGLTGTGVLTESNKKFLPFQQFGRDIADTTDAVRDPQTLEILDITPCSFGGVSVITPGTNTSNQVAVLYQGVNCTEVPVAIHADQLTPTWRVYSTGSNVFQTRAGCLIGAEHVNNSYECDIPIGAGICASYQTQTNSPRRARSVASQSIIAYTMSLGAENSVAYSNNSIAIPTNFTISVTTEILPVSMTKTSVDCTMYICGDSTECSNLLLQYGSFCTQLNRALTGIAVEQDKNTQEVFAQVKQIYKTPPIKDFGGFNFSQILPDPSKPSKRSFIEDLLFNKVTLADAGFIKQYGDCLGDIAARDLICAQKFNGLTVLPPLLTDEMIAQYTSALLAGTITSGWWFGAGAALQIPFAMQMAYRFNGIGVTQNVLYENQKLIANQFNSAIGKIQDSLSSTASALGKLQDVVNQNAQALNTLVKQLSSNFGAISSVLNDILSRLDPPEAEVQIDRLITGRLQSLQTYVTQQLIRAAEIRWSANLAATKMSECVLGQSKRVDFCGKGYHLMSFPQSAPHGVVFLHVTYVPAQEKNFTTAPAICHDGKAHFPREGVFVSNGTHWFVTQRNFYEPQIITTDNTFVSGNCDVVIGVVNNTVYDPLQPELDSGGSGYIPEAPRDGQAYVRKDGEWVLLSTFL

SEQ ID NO: 9817 - protein, 1177 aa, Artificial Sequence
  SARS-CoV-2/Netherlands/ZuidHolland_9/2020__EPI_ISL_414445 spike protein (1-1147)(K986P_V987P_T887W_A1020W) Foldon construct
MFVFLVLLPLVSSQCVNLTTRTQLPPAYTNSFTRGVYYPDKVFRSSVLHSTQDLFLPFFSNVTWFHAIHVSGTNGTKRFDNPVLPFNDGVYFASTEKSNIIRGWIFGTTLDSKTQSLLIVNNATNVVIKVCEFQFCNDPFLGVYYHKNNKSWMESEFRVYSSANNCTFEYVSQPFLMDLEGKQGNFKNLREFVFKNIDGYFKIYSKHTPINLVRDLPQGFSALEPLVDLPIGINITRFQTLLALHRSYLTPGDSSSGWTAGAAAYYVGYLQPRTFLLKYNENGTITDAVDCALDPLSETKCTLKSFTVEKGIYQTSNFRVQPTESIVRFPNITNLCPFGEVFNATRFASVYAWNRKRISNCVADYSVLYNSASFSTFKCYGVSPTKLNDLCFTNVYADSFVIRGDEVRQIAPGQTGKIADYNYKLPDDFTGCVIAWNSNNLDSKVGGNYNYLYRLFRKSNLKPFERDISTEIYQAGSTPCNGVEGFNCYFPLQSYGFQPTNGVGYQPYRVVVLSFELLHAPATVCGPKKSTNLVKNKCVNFNFNGLTGTGVLTESNKKFLPFQQFGRDIADTTDAVRDPQTLEILDITPCSFGGVSVITPGTNTSNQVAVLYQGVNCTEVPVAIHADQLTPTWRVYSTGSNVFQTRAGCLIGAEHVNNSYECDIPIGAGICASYQTQTNSPRRARSVASQSIIAYTMSLGAENSVAYSNNSIAIPTNFTISVTTEILPVSMTKTSVDCTMYICGDSTECSNLLLQYGSFCTQLNRALTGIAVEQDKNTQEVFAQVKQIYKTPPIKDFGGFNFSQILPDPSKPSKRSFIEDLLFNKVTLADAGFIKQYGDCLGDIAARDLICVQKFNGLTVLPPLLTDEMIAQYTSALLAGTITSGWWFGAGAALQIPFAMQMAYRFNGIGVTQNVLYENQKLIANQFNSAIGKIQDSLSSTASALGKLQDVVNQNAQALNTLVKQLSSNFGAISSVLNDILSRLDPPEAEVQIDRLITGRLQSLQTYVTQQLIRAAEIRWSANLAATKMSECVLGQSKRVDFCGKGYHLMSFPQSAPHGVVFLHVTYVPAQEKNFTTAPAICHDGKAHFPREGVFVSNGTHWFVTQRNFYEPQIITTDNTFVSGNCDVVIGIVNNTVYDPLQPELDSGGSGYIPEAPRDGQAYVRKDGEWVLLSTFL

SEQ ID NO: 9818 - protein, 1177 aa, Artificial Sequence
  SARS-CoV-2/Finland/FIN03032020A/2020__EPI_ISL_413602 spike protein (1-1147)(K986P_V987P_T887W_A1020W) Foldon construct
MFVFLVLLPLVSSQCVNLTTRTQLPPAYTNSFTRGVYYPDKVFRSSVLHSTQDLFLPFFSNVTWFHAIHVSGTNGTKRFDNPVLPFNDGVYFASTEKSNIIRGWIFGTTLDSKTQSLLIVNNATNVVIKVCEFQFCNDPFLGVYYHKNNKSWMESEFRVYSSANNCTFEYVSQPFLMDLEGKQGNFKNLREFVFKNIDGYFKIYSKHTPINLVRDLPQGFSALEPLVDLPIGINITRFQTLLALHRSYLTPGDSSSGWTAGAAAYYVGYLQPRTFLLKYNENGTITDAVDCALDPLSETKCTLKSFTVEKGIYQTSNFRVQPTESIVRFPNITNLCPFGEVFNATRFASVYAWNRKRISNCVADYSVLYNSASFSTFKCYGVSPTKLNDLCFTNVYADSFVIRGDEVRQIAPGQTGKIADYNYKLPDDFTGCVISWNSNNLDSKVGGNYNYLYRLFRKSNLKPFERDISTEIYQAGSTPCNGVEGFNCYFPLQSYGFQPTNGVGYQPYRVVVLSFELLHAPATVCGPKKSTNLVKNKCVNFNFNGLTGTGVLTESNKKFLPFQQFGRDIADTTDAVRDPQTLEILDITPCSFGGVSVITPGTNTSNQVAVLYQGVNCTEVPVAIHADQLTPTWRVYSTGSNVFQTRAGCLIGAEHVNNSYECDIPIGAGICASYQTQTNSPRRARSVASQSIIAYTMSLGAENSVAYSNNSIAIPTNFTISVTTEILPVSMTKTSVDCTMYICGDSTECSNLLLQYGSFCTQLNRALTGIAVEQDKNTQEVFAQVKQIYKTPPIKDFGGFNFSQILPDPSKPSKRSFIEDLLFNKVTLADAGFIKQYGDCLGDIAARDLICAQKFNGLTVLPPLLTDEMIAQYTSALLAGTITSGWWFGAGAALQIPFAMQMAYRFNGIGVTQNVLYENQKLIANQFNSAIGKIQDSLSSTASALGKLQDVVNQNAQALNTLVKQLSSNFGAISSVLNDILSRLDPPEAEVQIDRLITGRLQSLQTYVTQQLIRAAEIRWSANLAATKMSECVLGQSKRVDFCGKGYHLMSFPQSAPHGVVFLHVTYVPAQEKNFTTAPAICHDGKAHFPREGVFVSNGTHWFVTQRNFYEPQIITTDNTFVSGNCDVVIGIVNNTVYDPLQPELDSGGSGYIPEAPRDGQAYVRKDGEWVLLSTFL

SEQ ID NO: 9819 - protein, 1177 aa, Artificial Sequence
  SARS-CoV-2/France/GE1977/2020__EPI_ISL_414632 spike protein (1-1147)(K986P_V987P_T887W_A1020W) Foldon construct
MFVFLVLLPLVSSQCVNLTTRTQLPPAYTNSFTRGVYYPDKVFRSSVLHSTQDLFLPFFSNVTWFHAIHVSGTNGTKRFDNPVLPFNDGVYFASTEKSNIIRGWIFGTTLDSKTQSLLIVNNATNVVIKVCEFQFCNDPFLGVYYHKNNKSWMESEFRVYSSANNCTFEYVSQPFLMDLEGKQGNFKNLREFVFKNIDGYFKIYSKHTPINLVRDLPQGFSALEPLVDLPIGINITRFQTLLALHRSYLTPGDSSSGWTAGAAAYYVGYLQPRTFLLKYNENGTITDAVDCALDPLSETKCTLKSFTVEKGIYQTSNFRVQPTESIVRFPNITNLCPFGEVFNATRFASVYAWNRKRISNCVADYSVLYNSASFSTFKCYGVSPTKLNDLCFTNVYADSFVIRGDEVRQIAPGQTGKIADYNYKLPDDFTGCVIAWNSNNLDSKVGGNYNYLYRLFRKSNLKPFERDISTEIYQAGSTPCNGVEGFNCYFPLQSYGFQPTNGVGYQPYRVVVLSFELLHAPATVCGPKKSTNLVKNKCVNFNFNGLTGTGVLTESNKKFLPFQQFGRDIADTTDAVRDPQTLEILDITPCSFGGVSVITPGTNTSNQVAVLYQGVNCTEVPVAIHADQLTPTWRVYSTGSNVFQTRAGCLIGAEHVNNSYECDIPIGAGICASYQTQTNSPRRARSVASQSIIAYTMSLGAENSVAYSNNSIAIPTNFTISVTTEILPVSMTKTSVDCTMYICGDSTECSNLLLQYGSFCTQLNRALTGIAVEQDKNTQEVFAQVKQIYKTPPIKDFGGFNFSQILPDPSKPSKRSFIEDLLFNKVTLADAGFIKQYGDCLGDIAARDLICAQKFNGLTVLPPLLTDEMIAQYTSALLAGTITSGWWFGAGAALQIPFAMQMAYRFNGIGVTQNVLYENQKLIANQFNSAIGKIQDSLFSTASALGKLQDVVNQNAQALNTLVKQLSSNFGAISSVLNDILSRLDPPEAEVQIDRLITGRLQSLQTYVTQQLIRAAEIRWSANLAATKMSECVLGQSKRVDFCGKGYHLMSFPQSAPHGVVFLHVTYVPAQEKNFTTAPAICHDGKAHFPREGVFVSNGTHWFVTQRNFYEPQIITTDNTFVSGNCDVVIGIVNNTVYDPLQPELDSGGSGYIPEAPRDGQAYVRKDGEWVLLSTFL

SEQ ID NO: 9820 - protein, 1177 aa, Artificial Sequence
  SARS-CoV-2/Finland/FIN-313/2020__EPI_ISL_414641 spike protein (1-1147)(K986P_V987P_T887W_A1020W) Foldon construct
MFVFLVLLPLVSSQCVNLTTRTQLPPAYTNSFTRGVYYPDKVFRSSVLHSTQDLFLPFFSNVTWFHAIHVSGTNGTKRFDNPVLPFNDGVYFASTEKSNIIRGWIFGTTLDSKTQSLLIVNNATNVVIKVCEFQFCNDPFLGVYYHKNNKSWMESEFRVYSSANNCTFEYVSQPFLMDLEGKQGNFKNLREFVFKNIDGYFKIYSKHTPINLVRDLPQGFSALEPLVDLPIGINITRFKTLLALHRSYLTPGDSSSGWTAGAAAYYVGYLQPRTFLLKYNENGTITDAVDCALDPLSETKCTLKSFTVEKGIYQTSNFRVQPTESIVRFPNITNLCPFGEVFNATRFASVYAWNRKRISNCVADYSVLYNSASFSTFKCYGVSPTKLNDLCFTNVYADSFVIRGDEVRQIAPGQTGKIADYNYKLPDDFTGCVIAWNSNNLDSKVGGNYNYLYRLFRKSNLKPFERDISTEIYQAGSTPCNGVEGFNCYFPLQSYGFQPTNGVGYQPYRVVVLSFELLHAPATVCGPKKSTNLVKNKCVNFNFNGLTGTGVLTESNKKFLPFQQFGRDIADTTDAVRDPQTLEILDITPCSFGGVSVITPGTNTSNQVAVLYQGVNCTEVPVAIHADQLTPTWRVYSTGSNVFQTRAGCLIGAEHVNNSYECDIPIGAGICASYQTQTNSPRRARSVASQSIIAYTMSLGAENSVAYSNNSIAIPTNFTISVTTEILPVSMTKTSVDCTMYICGDSTECSNLLLQYGSFCTQLNRALTGIAVEQDKNTQEVFAQVKQIYKTPPIKDFGGFNFSQILPDPSKPSKRSFIEDLLFNKVTLADAGFIKQYGDCLGDIAARDLICAQKFNGLTVLPPLLTDEMIAQYTSALLAGTITSGWWFGAGAALQIPFAMQMAYRFNGIGVTQNVLYENQKLIANQFNSAIGKIQDSLSSTASALGKLQDVVNQNAQALNTLVKQLSSNFGAISSVLNDILSRLDPPEAEVQIDRLITGRLQSLQTYVTQQLIRAAEIRWSANLAATKMSECVLGQSKRVDFCGKGYHLMSFPQSAPHGVVFLHVTYVPAQEKNFTTAPAICHDGKAHFPREGVFVSNGTHWFVTQRNFYEPQIITTDNTFVSGNCDVVIGIVNNTVYDPLQPELDSGGSGYIPEAPRDGQAYVRKDGEWVLLSTFL

SEQ ID NO: 9821 - protein, 1177 aa, Artificial Sequence
  SARS-CoV-2/Netherlands/ZuidHolland_2/2020__EPI_ISL_414556 spike protein (1-1147)(K986P_V987P_T887W_A1020W) Foldon construct
MFVFLVLLPLVSSQCVNLTTRTQLPPAYTNSFTRGVYYPDKVFRSSVLHSTQDLFLPFFSNVTWFHAIHVSGTNGTKRFDNPVLPFNDGVYFASTEKSNIIRGWIFGTTLDSKTQSLLIVNNATNVVIKVCEFQFCNDPFLGVYYHKNNKSWMESEFRVYSSANNCTFEYVSQPFLMDLEGKQGNFKNLREFVFKNIDGYFKIYSKHTPINLVRDLPQGFSALEPLVDLPIGINITRFQTLLALHRSYLTPGDSSSGWTAGAAAYYVGYLQPRTFLLKYNENGTITDAVDCALDPLSETKCTLKSFTVEKGIYQTSNFRVQPTESIVRFPNITNLCPFGEVFNATRFASVYAWNRKRISNCVADYSVLYNSASFSTFKCYGVSPTKLNDLCFTNVYADSFVIRGDEVRQIAPGQTGKIADYNYKLPDDFTGCVIAWNSNNLDSKVGGNYNYLYRLFRKSNLKPFERDISTEIYQAGSTPCNGVEGFNCYFPLQSYGFQPTNGVGYQPYRVVVLSFELLHAPATVCGPKKSTNLVKNKCVNFNFNGLTGTGVLTESNKKFLPFQQFGRDIADTTDAVRDPQTLEILDITPCSFGGVSVITPGTNTSNQVAVLYQGVNCTEVPVAIHADQLTPTWRVYSTGSNVFQTRAGCLIGAEHVNNSYECDIPIGAGICASYQTQTNSPRRARSVASQSIIAYTMSLGAENSVAYSNNSIAIPTNFTISVTTEILPVSMTKTSVDCTMYICGDSTECSNLLLQYGSFCTQLNRALTGIALEQDKNTQEVFAQVKQIYKTPPIKDFGGFNFSQILPDPSKPSKRSFIEDLLFNKVTLADAGFIKQYGDCLGDIAARDLICAQKFNGLTVLPPLLTDEMIAQYTSALLAGTITSGWWFGAGAALQIPFAMQMAYRFNGIGVTQNVLYENQKLIANQFNSAIGKIQDSLSSTASALGKLQDVVNQNAQALNTLVKQLSSNFGAISSVLNDILSRLDPPEAEVQIDRLITGRLQSLQTYVTQQLIRAAEIRWSANLAATKMSECVLGQSKRVDFCGKGYHLMSFPQSAPHGVVFLHVTYVPAQEKNFTTAPAICHDGKAHFPREGVFVSNGTHWFVTQRNFYEPQIITTDNTFVSGNCDVVIGIVNNTVYDPLQPELDSGGSGYIPEAPRDGQAYVRKDGEWVLLSTFL

SEQ ID NO: 9822 - protein, 1177 aa, Artificial Sequence
  SARS-CoV-2/USA/WA-UW31/2020__EPI_ISL_414618 spike protein (1-1147)(K986P_V987P_T887W_A1020W) Foldon construct
MFVFLVLLPLVSSQCVNLTTRTQLPPAYTNSFTRGVYYPDKVFRSSVLHSTQDLFLPFFSNVTWFHAIHVSGTNGTKRFDNPVLPFNDGVYFASTEKSNIIRGWIFGTTLDSKTQSLLIVNNATNVVIKVCEFQFCNDPFLGVYYHKNNKSWMESEFRVYSSANNCTFEYVSQPFLMDLEGKQGNFKNLREFVFKNIDGYFKIYSKHTPINLVRDLPQGFSALEPLVDLPIGINITRFQTLLALHRSYLTPGDSSSGWTAGAAAYYVGYLQPRTFLLKYNENGTITDAVDCALDPLSETKCTLKSFTVEKGIYQTSNFRVQPTESIVRFPNITNLCPFGEVFNATRFASVYAWNRKRISNCVADYSVLYNSASFSTFKCYGVSPTKLNDLCFTNVYADSFVIRGDEVRQIAPGQTGKIADYNYKLPDDFTGCVIAWNSNNLDSKVGGNYNYLYRLFRKSNLKPFERDISTEIYQAGSTPCNGAEGFNCYFPLQSYGFQPTNGVGYQPYRVVVLSFELLHAPATVCGPKKSTNLVKNKCVNFNFNGLTGTGVLTESNKKFLPFQQFGRDIADTTDAVRDPQTLEILDITPCSFGGVSVITPGTNTSNQVAVLYQDVNCTEVPVAIHADQLTPTWRVYSTGSNVFQTRAGCLIGAEHVNNSYECDIPIGAGICASYQTQTNSPRRARSVASQSIIAYTMSLGAENSVAYSNNSIAIPTNFTISVTTEILPVSMTKTSVDCTMYICGDSTECSNLLLQYGSFCTQLNRALTGIAVEQDKNTQEVFAQVKQIYKTPPIKDFGGFNFSQILPDPSKPSKRSFIEDLLFNKVTLADAGFIKQYGDCLGDIAARDLICAQKFNGLTVLPPLLTDEMIAQYTSALLAGTITSGWWFGAGAALQIPFAMQMAYRFNGIGVTQNVLYENQKLIANQFNSAIGKIQDSLSSTASALGKLQDVVNQNAQALNTLVKQLSSNFGAISSVLNDILSRLDPPEAEVQIDRLITGRLQSLQTYVTQQLIRAAEIRWSANLAATKMSECVLGQSKRVDFCGKGYHLMSFPQSAPHGVVFLHVTYVPAQEKNFTTAPAICHDGKAHFPREGVFVSNGTHWFVTQRNFYEPQIITTDNTFVSGNCDVVIGIVNNTVYDPLQPELDSGGSGYIPEAPRDGQAYVRKDGEWVLLSTFL

SEQ ID NO: 9823 - protein, 1177 aa, Artificial Sequence
  SARS-CoV-2/South Korea/SNU01/2020__EPI_ISL_411929 spike protein (1-1147)(K986P_V987P_T887W_A1020W) Foldon construct
MFVFLVLLPLVSSQCVNLTTRTQLPPAYTNSFTRGVYYPDKVFRSSVLHSTQDLFLPFFSNVTWFHAIHVSGTNGTKRFDNPVLPFNDGVYFASTEKSNIIRGWIFGTTLDSKTQSLLIVNNATNVVIKVCEFQFCNDPFLGVYYHKNNKSWMESEFRVYSSANNCTFEYVSQPFLMDLEGKQGNFKNLREFVFKNIDGYFKIYSKHTPINLVRDLPQGFWALEPLVDLPIGINITRFQTLLALHRSYLTPGDSSSGWTAGAAAYYVGYLQPRTFLLKYNENGTITDAVDCALDPLSETKCTLKSFTVEKGIYQTSNFRVQPTESIVRFPNITNLCPFGEVFNATRFASVYAWNRKRISNCVADYSVLYNSASFSTFKCYGVSPTKLNDLCFTNVYADSFVIRGDEVRQIAPGQTGKIADYNYKLPDDFTGCVIAWNSNNLDSKVGGNYNYLYRLFRKSNLKPFERDISTEIYQAGSTPCNGVEGFNCYFPLQSYGFQPTNGVGYQPYRVVVLSFELLHAPATVCGPKKSTNLVKNKCVNFNFNGLTGTGVLTESNKKFLPFQQFGRDIADTTDAVRDPQTLEILDITPCSFGGVSVITPGTNTSNQVAVLYQDVNCTEVPVAIHADQLTPTWRVYSTGSNVFQTRAGCLIGAEHVNNSYECDIPIGAGICASYQTQTNSPRRARSVASQSIIAYTMSLGAENSVAYSNNSIAIPTNFTISVTTEILPVSMTKTSVDCTMYICGDSTECSNLLLQYGSFCTQLNRALTGIAVEQDKNTQEVFAQVKQIYKTPPIKDFGGFNFSQILPDPSKPSKRSFIEDLLFNKVTLADAGFIKQYGDCLGDIAARDLICAQKFNGLTVLPPLLTDEMIAQYTSALLAGTITSGWWFGAGAALQIPFAMQMAYRFNGIGVTQNVLYENQKLIANQFNSAIGKIQDSLSSTASALGKLQDVVNQNAQALNTLVKQLSSNFGAISSVLNDILSRLDPPEAEVQIDRLITGRLQSLQTYVTQQLIRAAEIRWSANLAATKMSECVLGQSKRVDFCGKGYHLMSFPQSAPHGVVFLHVTYVPAQEKNFTTAPAICHDGKAHFPREGVFVSNGTHWFVTQRNFYEPQIITTDNTFVSGNCDVVIGIVNNTVYDPLQPELDSGGSGYIPEAPRDGQAYVRKDGEWVLLSTFL

SEQ ID NO: 9824 - protein, 1177 aa, Artificial Sequence
  SARS-CoV-2/China/WF0004/2020__EPI_ISL_413694 spike protein (1-1147)(K986P_V987P_T887W_A1020W) Foldon construct
MFVFLVLLPLVSSQCVNLTTRTQLPPAYTNSFTRGVYYPDKVFRSSVLHSTQDLFLPFFSNVTWFHAIHVSGTNGTKRFDNPVLPFNDGVYFASTEKSNIIRGWIFGTTLDSKTQSLLIVNNATNVVIKVCEFQFCNDPFLGVYYHKNNKSWTESEFRVYSSANNCTFEYVSQPFLMDLEGKQGNFKNLREFVFKNIDGYFKIYSKHTPINLVRDLPQGFSALEPLVDLPIGINITRFQTLLALHRSYLTPGDSSSGWTAGAAAYYVGYLQPRTFLLKYNENGTITDAVDCALDPLSETKCTLKSFTVEKGIYQTSNFRVQPTESIVRFPNITNLCPFGEVFNATRFASVYAWNRKRISNCVADYSVLYNSASFSTFKCYGVSPTKLNDLCFTNVYADSFVIRGDEVRQIAPGQTGKIADYNYKLPDDFTGCVIAWNSNNLDSKVGGNYNYLYRLFRKSNLKPFERDISTEIYQAGSTPCNGVEGFNCYFPLQSYGFQPTNGVGYQPYRVVVLSFELLHAPATVCGPKKSTNLVKNKCVNFNFNGLTGTGVLTESNKKFLPFQQFGRDIADTTDAVRDPQTLEILDITPCSFGGVSVITPGTNTSNQVAVLYQDVNCTEVPVAIHADQLTPTWRVYSTGSNVFQTRAGCLIGAEHVNNSYECDIPIGAGICASYQTQTNSPRRARSVASQSIIAYTMSLGAENSVAYSNNSIAIPTNFTISVTTEILPVSMTKTSVDCTMYICGDSTECSNLLLQYGSFCTQLNRALTGIAVEQDKNTQEVFAQVKQIYKTPPIKDFGGFNFSQILPDPSKPSKRSFIEDLLFNKVTLADAGFIKQYGDCLGDIAARDLICAQKFNGLTVLPPLLTDEMIAQYTSALLAGTITSGWWFGAGAALQIPFAMQMAYRFNGIGVTQNVLYENQKLIANQFNSAIGKIQDSLSSTASALGKLQDVVNQNAQALNTLVKQLSSNFGAISSVLNDILSRLDPPEAEVQIDRLITGRLQSLQTYVTQQLIRAAEIRWSANLAATKMSECVLGQSKRFDFCGKGYHLMSFPQSAPHGVVFLHVTYVPAQEKNFTTAPAICHDGKAHFPREGVFVSNGTHWFVTQRNFYEPQIITTDNTFVSGNCDVVIGIVNNTVYDPLQPELDSGGSGYIPEAPRDGQAYVRKDGEWVLLSTFL

SEQ ID NO: 9825 - protein, 1177 aa, Artificial Sequence
  SARS-CoV-2/China/WF0028/2020__EPI_ISL_413791 spike protein (1-1147)(K986P_V987P_T887W_A1020W) Foldon construct
MFVFLVLLPLVSSQCVNLTTRTQLPPAYTNSFTRGVYYPDKVFRSSVLHSTQDLFLPFFSNVTWFHAIHVSGTNGTKRFDNPVLPFNDGVYFASTEKSNIIRGWIFGTTLDSKTQSLLIVNNATNVVIKVCEFQFCNDPFLGVYYHKNNKSWMESEFRVYSSANNCTFEYVSQPFLMDLEGKQGNFKNLREFVFKNIDGYFKIYSKHTPINLVRDLPQGFSALEPLVDLPIGINITRFQTLLALHRSYLTPGDSSSGWTAGAAAYYVGYLQPRTFLLKYNENGTITDAVDCALDPLSETKCTLKSFTVEKGIYQTSNFRVQPTESIVRFPNITNLCPFGEVFNATRFASVYAWNRKRISNCVADYSVLYNSASFSTFKCYGVSPTKLNDLCFTNVYADSFVIRGDEVRQIAPGQTGKIADYNYKLPDDFTGCVIAWNSNNLDSKVGGNYNYLYRLFRKSNLKPFERDISTEIYQAGSTPCNGVEGFNCYFPLQSYGFQPTNGVGYQPYRVVVLSFELLHAPATVCGPKKSTNLVKNKCVNFNFNGLTGTGVLTESNKKFLPFQQFGRDIADTTDAVRDPQTLEILDITPCSFGGVSVITPGTNTSNQVAVLYQDVNCTEVPVAIHADQLTPTWRVYSTGSNVFQTRAGCLIGAEHVNNSYECDIPIGAGICASYQTQTNSPRRARSVASQSIIAYTMSLGAENSVAYSNNSIAIPTNFTISVTTEILPVSMTKTSVDCTMYICGDSTECSNLLLQYGSFCTQLNRALTGIAVEQDKNTQEVFAQVKQIYKTPPIKDFGGFNFSQILPDPSKPSKRSFIEDLLFNKVTLADAGFIKQYGDCLGDIAARDLICAQKFNGLTVLPPLLTDEMIAQYTSALLAGTITSGWWFGAGAALQIPFAMQMAYRFNGIGVTQNVLYENQKLIANQFNSAIGKIQDSLSSTASALGKLQDVVNQNAQALNTLVKQLSSNFGAISSVLNDILSRLDPPEAEVQIDRLITGRLQSLQTYVTQQLIRAAEIRWSANLAATKMSECVLGQSKRVDFCGKGYHLMSFPQSAPHGVVFLHVTYVPAQEKNFTTAPAICHDGKAHFPREGVFVSNGTHWFVTQRNFYEPQIITTDNTFVSGNCDVVIGIVNNTVYDPLQPELESGGSGYIPEAPRDGQAYVRKDGEWVLLSTFL

SEQ ID NO: 9826 - protein, 1177 aa, Artificial Sequence
  SARS-CoV-2/2019-nCoV/USA-CruiseA-18/2020__MT159716.1 spike protein (1-1147)(K986P_V987P_T887W_A1020W) Foldon construct
MFVFLVLLPLVSSQCVNLTTRTQLPPAYTNSFTRGVYYPDKVFRSSVLHSTQDLFLPFFSNVTWFHAIHVSGTNGTKRFDNPVLPFNDGVYFASTEKSNIIRGWIFGTTLDSKTQSLLIVNNATNVVIKVCEFQFCNDPFLGVYYHKNNKSWMESELRVYSSANNCTFEYVSQPFLMDLEGKQGNFKNLREFVFKNIDGYFKIYSKHTPINLVRDLPQGFSALEPLVDLPIGINITRFQTLLALHRSYLTPGDSSSGWTAGAAAYYVGYLQPRTFLLKYNENGTITDAVDCALDPLSETKCTLKSFTVEKGIYQTSNFRVQPTESIVRFPNITNLCPFGEVFNATRFASVYAWNRKRISNCVADYSVLYNSASFSTFKCYGVSPTKLNDLCFTNVYADSFVIRGDEVRQIAPGQTGKIADYNYKLPDDFTGCVIAWNSNNLDSKVGGNYNYLYRLFRKSNLKPFERDISTEIYQAGSTPCNGVEGFNCYFPLQSYGFQPTNGVGYQPYRVVVLSFELLHAPATVCGPKKSTNLVKNKCVNFNFNGLTGTGVLTESNKKFLPFQQFGRDIADTTDAVRDPQTLEILDITPCSFGGVSVITPGTNTSNQVAVLYQDVNCTEVPVAIHADQLTPTWRVYSTGSNVFQTRAGCLIGAEHVNNSYECDIPIGAGICASYQTQTNSPRRARSVASQSIIAYTMSLGAENSVAYSNNSIAIPTNFTISVTTEILPVSMTKTSVDCTMYICGDSTECSNLLLQYGSFCTQLNRALTGIAVEQDKNTQEVFAQVKQIYKTPPIKDFGGFNFSQILPDPSKPSKRSFIEDLLFNKVTLADAGFIKQYGDCLGDIAARDLICAQKFNGLTVLPPLLTDEMIAQYTSALLAGTITSGWWFGAGAALQIPFAMQMAYRFNGIGVTQNVLYENQKLIANQFNSAIGKIQDSLSSTASALGKLQDVVNQNAQALNTLVKQLSSNFGAISSVLNDILSRLDPPEAEVQIDRLITGRLQSLQTYVTQQLIRAAEIRWSANLAATKMSECVLGQSKRVDFCGKGYHLMSFPQSAPHGVVFLHVTYVPAQEKNFTTAPAICHDGKAHFPREGVFVSNGTHWFVTQRNFYEPQIITTDNTFVSGNCDVVIGIVNNTVYDPLQPELDSGGSGYIPEAPRDGQAYVRKDGEWVLLSTFL

SEQ ID NO: 9827 - protein, 1177 aa, Artificial Sequence
  SARS-CoV-2/SARS-CoV-2/Yunnan-01/human/2020/CHN__MT049951.1 spike protein (1-1147)(K986P_V987P_T887W_A1020W) Foldon construct
MFVFLVLLPLVSSQCVNLTTRTQLPPANTNSFTRGVYYPDKVFRSSVLHSTQDLFLPFFSNVTWFHAIHVSGTNGTKRFDNPVLPFNDGVYFASTEKSNIIRGWIFGTTLDSKTQSLLIVNNATNVVIKVCEFQFCNDPFLGVYYHKNNKSWMESEFRVYSSANNCTFEYVSQPFLMDLEGKQGNFKNLREFVFKNIDGYFKIYSKHTPINLVRDLPQGFSALEPLVDLPIGINITRFQTLLALHRSYLTPGDSSSGWTAGAAAYYVGYLQPRTFLLKYNENGTITDAVDCALDPLSETKCTLKSFTVEKGIYQTSNFRVQPTESIVRFPNITNLCPFGEVFNATRFASVYAWNRKRISNCVADYSVLYNSASFSTFKCYGVSPTKLNDLCFTNVYADSFVIRGDEVRQIAPGQTGKIADYNYKLPDDFTGCVIAWNSNNLDSKVGGNYNYLYRLFRKSNLKPFERDISTEIYQAGSTPCNGVEGFNCYFPLQSYGFQPTNGVGYQPYRVVVLSFELLHAPATVCGPKKSTNLVKNKCVNFNFNGLTGTGVLTESNKKFLPFQQFGRDIADTTDAVRDPQTLEILDITPCSFGGVSVITPGTNTSNQVAVLYQDVNCTEVPVAIHADQLTPTWRVYSTGSNVFQTRAGCLIGAEHVNNSYECDIPIGAGICASYQTQTNSPRRARSVASQSIIAYTMSLGAENSVAYSNNSIAIPTNFTISVTTEILPVSMTKTSVDCTMYICGDSTECSNLLLQYGSFCTQLNRALTGIAVEQDKNTQEVFAQVKQIYKTPPIKDFGGFNFSQILPDPSKPSKRSFIEDLLFNKVTLADAGFIKQYGDCLGDIAARDLICAQKFNGLTVLPPLLTDEMIAQYTSALLAGTITSGWWFGAGAALQIPFAMQMAYRFNGIGVTQNVLYENQKLIANQFNSAIGKIQDSLSSTASALGKLQDVVNQNAQALNTLVKQLSSNFGAISSVLNDILSRLDPPEAEVQIDRLITGRLQSLQTYVTQQLIRAAEIRWSANLAATKMSECVLGQSKRVDFCGKGYHLMSFPQSAPHGVVFLHVTYVPAQEKNFTTAPAICHDGKAHFPREGVFVSNGTHWFVTQRNFYEPQIITTDNTFVSGNCDVVIGIVNNTVYDPLQPELDSGGSGYIPEAPRDGQAYVRKDGEWVLLSTFL

SEQ ID NO: 9828 - protein, 1177 aa, Artificial Sequence
  SARS-CoV-2/USA/WA-UW292/2020__EPI_ISL_418077 spike protein (1-1147)(K986P_V987P_T887W_A1020W) Foldon construct
MFVFLVLLPLVSSQCVNLTTRTQLPPAYTNSFTRGVYYPDKVFRSSVLHSTQDLFLPFFSNVTWFHAIHVSGTNGTKRFDNPVLPFNDGVYFASTEKSNIIRGWIFGTTLDSKTQSLLIVNNATNVVIKVCEFQFCNDPFLGVYYHKNNKSWMESEFRVYSSANNCTFEYVSQPFLMDLEGKQGNFKNLREFVFKNIDGYFKIYSKHTPINLVRDLPQGFSALEPLVDLPIGINITRFQTLLALHRSYLTPGDSSSGWTAGAAAYYVGYLQPRTFLLKYNENGTITDAVDCALDPLSETKCTLKSFTVEKGIYQTSNFRVQPTESIVRFPNITNLCPFGEVFNATRFASVYAWNRKRISNCVADYSVLYNSASFSTFKCYGVSPTKLNDLCFTNVYADSFVIRGDEVRQIAPGQTGKIADYNYKLPDDFTGCVIAWNSNNLDSKVGGNYNYLYRLFRKSNLKPFERDISTEIYQASSTPCNGVEGFNCYFPLQSYGFQPTNGVGYQPYRVVVLSFELLHAPATVCGPKKSTNLVKNKCVNFNFNGLTGTGVLTESNKKFLPFQQFGRDIADTTDAVRDPQTLEILDITPCSFGGVSVITPGTNTSNQVAVLYQDVNCTEVPVAIHADQLTPTWRVYSTGSNVFQTRAGCLIGAEHVNNSYECDIPIGAGICASYQTQTNSPRRARSVASQSIIAYTMSLGAENSVAYSNNSIAIPTNFTISVTTEILPVSMTKTSVDCTMYICGDSTECSNLLLQYGSFCTQLNRALTGIAVEQDKNTQEVFAQVKQIYKTPPIKDFGGFNFSQILPDPSKPSKRSFIEDLLFNKVTLADAGFIKQYGDCLGDIAARDLICAQKFNGLTVLPPLLTDEMIAQYTSALLAGTITSGWWFGAGAALQIPFAMQMAYRFNGIGVTQNVLYENQKLIANQFNSAIGKIQDSLSSTASALGKLQDVVNQNAQALNTLVKQLSSNFGAISSVLNDILSRLDPPEAEVQIDRLITGRLQSLQTYVTQQLIRAAEIRWSANLAATKMSECVLGQSKRVDFCGKGYHLMSFPQSAPHGVVFLHVTYVPAQEKNFTTAPAICHDGKAHFPREGVFVSNGTHWFVTQRNFYEPQIITTDNTFVSGNCDVVIGIVNNTVYDPLQPELDSGGSGYIPEAPRDGQAYVRKDGEWVLLSTFL

SEQ ID NO: 9829 - protein, 1177 aa, Artificial Sequence
  SARS-CoV-2/Iceland/192/2020__EPI_ISL_417819 spike protein (1-1147)(K986P_V987P_T887W_A1020W) Foldon construct
MFVFFVLLPLVSSQCVNLTTRTQLPPAYTNSFTRGVYYPDKVFRSSVLHSTQDLFLPFFSNVTWFHAIHVSGTNGTKRFDNPVLPFNDGVYFASTEKSNIIRGWIFGTTLDSKTQSLLIVNNATNVVIKVCEFQFCNDPFLGVYYHKNNKSWMESEFRVYSSANNCTFEYVSQPFLMDLEGKQGNFKNLREFVFKNIDGYFKIYSKHTPINLVRDLPQGFSALEPLVDLPIGINITRFQTLLALHRSYLTPGDSSSGWTAGAAAYYVGYLQPRTFLLKYNENGTITDAVDCALDPLSETKCTLKSFTVEKGIYQTSNFRVQPTESIVRFPNITNLCPFGEVFNATRFASVYAWNRKRISNCVADYSVLYNSASFSTFKCYGVSPTKLNDLCFTNVYADSFVIRGDEVRQIAPGQTGKIADYNYKLPDDFTGCVIAWNSNNLDSKVGGNYNYLYRLFRKSNLKPFERDISTEIYQAGSTPCNGVEGFNCYFPLQSYGFQPTNGVGYQPYRVVVLSFELLHAPATVCGPKKSTNLVKNKCVNFNFNGLTGTGVLTESNKKFLPFQQFGRDIADTTDAVRDPQTLEILDITPCSFGGVSVITPGTNTSNQVAVLYQGVNCTEVPVAIHADQLTPTWRVYSTGSNVFQTRAGCLIGAEHVNNSYECDIPIGAGICASYQTQTNSPRRARSVASQSIIAYTMSLGAENSVAYSNNSIAIPTNFTISVTTEILPVSMTKTSVDCTMYICGDSTECSNLLLQYGSFCTQLNRALTGIAVEQDKNTQEVFAQVKQIYKTPPIKDFGGFNFSQILPDPSKPSKRSFIEDLLFNKVTLADAGFIKQYGDCLGDIAARDLICAQKFNGLTVLPPLLTDEMIAQYTSALLAGTITSGWWFGAGAALQIPFAMQMAYRFNGIGVTQNVLYENQKLIANQFNSAIGKIQDSLSSTASALGKLQDVVNQNAQALNTLVKQLSSNFGAISSVLNDILSRLDPPEAEVQIDRLITGRLQSLQTYVTQQLIRAAEIRWSANLAATKMSECVLGQSKRVDFCGKGYHLMSFPQSAPHGVVFLHVTYVPAQEKNFTTAPAICHDGKAHFPREGVFVSNGTHWFVTQRNFYEPQIITTDNTFVSGNCDVVIGIVNNTVYDPLQPELDSGGSGYIPEAPRDGQAYVRKDGEWVLLSTFL

SEQ ID NO: 9830 - protein, 1177 aa, Artificial Sequence
  SARS-CoV-2/Belgium/ULG-6939/2020__EPI_ISL_417020 spike protein (1-1147)(K986P_V987P_T887W_A1020W) Foldon construct
MFVFLVLLPLVSSQCVNLTTRTQLPPAYTNSFTRGVYYPDKVFRSSVLHSTQDLFLPFFSNVTWFHAIHVSGTNGTKRFDNPVLPFNDGVYFASTEKSNIIRGWIFGTTLDSKTQSLLIVNNATNVVIKVCEFQFCNDPFLGVYYHKNNKSWMESEFRVYSSANNCTFEYVSQPFLMDLEGKQGNFKNLREFVFKNIDGYFKIYSKHTPINLVRDLPQGFSALEPLVDLPIGINITRFQTLLALHRSYLTPGDSSSGWTAGAAAYYVGYLQPRTFLLKYNENGTITDAVDCALDPLSETKCTLKSFTVEKGIYQTSNFRVQPTESIVRFPNITNLCPFGEVFNATRFASVYAWNRKRISNCVADYSVLYNSASFSTFKCYGVSPTKLNDLCFTNVYADSFVIRGDEVRQIAPGQTGKIADYNYKLPDDFTGCVIAWNSNNLDSKVGGNYNYLYRLFRKSNLKPFERDISTEIYQAGSTPCNGVEGFNCYFPLQSYGFQPTNGVGYQPYRVVVLSFELLHAPATVCGPKKSTNLVKNKCVNFNFNGLTGTGVLTESNKKFLPFQQFGRDIADTTDAVRDPQTLEILDITPCSFGGVSVITPGTNTSNQVAVLYQGVNCTEVPVAIHADQLTPTWRVYSTGSNVFQTRAGCLIGAEHVNNSYECDIPIGAGICASYQTQTNSPRRARSVASQSIIAYTMSLGAENSVVYSNNSIAIPTNFTISVTTEILPVSMTKTSVDCTMYICGDSTECSNLLLQYGSFCTQLNRALTGIAVEQDKNTQEVFAQVKQIYKTPPIKDFGGFNFSQILPDPSKPSKRSFIEDLLFNKVTLADAGFIKQYGDCLGDIAARDLICAQKFNGLTVLPPLLTDEMIAQYTSALLAGTITSGWWFGAGAALQIPFAMQMAYRFNGIGVTQNVLYENQKLIANQFNSAIGKIQDSLSSTASALGKLQDVVNQNAQALNTLVKQLSSNFGAISSVLNDILSRLDPPEAEVQIDRLITGRLQSLQTYVTQQLIRAAEIRWSANLAATKMSECVLGQSKRVDFCGKGYHLMSFPQSAPHGVVFLHVTYVPAQEKNFTTAPAICHDGKAHFPREGVFVSNGTHWFVTQRNFYEPQIITTDNTFVSGNCDVVIGIVNNTVYDPLQPELDSGGSGYIPEAPRDGQAYVRKDGEWVLLSTFL

SEQ ID NO: 9831 - protein, 1177 aa, Artificial Sequence
  SARS-CoV-2/France/HF2496/2020__EPI_ISL_418231 spike protein (1-1147)(K986P_V987P_T887W_A1020W) Foldon construct
MFVFLVLLPLVSSQCVNLTTRTQLPPAYTNSFTRGVYYPDKVFRSSVLHSTQDLFLPFFSNVTWFHAIHVSGTNGTKRFDNPVLPFNDGVYFASTEKSNIIRGWIFGTTLDSKTQSLLIVNNATNVVIKVCEFQFCNDPFLGVYYHKNNKSWMESEFRVYSSANNCTFEYVSQPFLMDLEGKQGNFKNLREFVFKNIDGYFKIYSKHTPINLVRDLPQGFSALEPLVDLPIGINITRFQTLLALHRSYLTPGDSSSGWTAGAAAYYVGYLQPRTFLLKYNENGTITDAVDCALDPLSETKCTLKSFTVEKGIYQTSNFRVQPTESIVRFPNITNLCPFGEVFNATRFASVYAWNRKRISNCVADYSVLYNSASFSTFKCYGVSPTKLNDLCFTNVYADSFVIRGDEVRQIAPGQTGKIADYNYKLPDDFTGCVIAWNSNNLDSKVGGNYNYLYRLFRKSNLKPFERDISTEIYQAGSTPCNGVEGFNCYFPLQSYGFQPTNGVGYQPYRVVVLSFELLHAPATVCGPKKSTNLVKNKCVNFNFNGLTGTGVLTESNKKFLPFQQFGRDIADTTDAVRDPQTLEILDITPCSFGGVSVITPGTNTSNQVAVLYQGVNCTEVPVAIHADQLTPTWRVYSTGSNVFQTRAGCLIGAEHVNNSYECDIPIGAGICASYQTQTNSPRRARSVASQSIIAYTMSLGAENSVAYSNNSIAIPTNFTISVTTEILPVSMTKTSVDCTMYICGDSTECSNLLLQYGSFCTQLNRALTGIAVEQDKNTQEVFAQVKQIYKTPPIKDFGGFNFSQILPDPSKPSKRSFIEDLLFNKVTLADAGFIKQYGDCLGDIVARDLICAQKFNGLTVLPPLLTDEMIAQYTSALLAGTITSGWWFGAGAALQIPFAMQMAYRFNGIGVTQNVLYENQKLIANQFNSAIGKIQDSLSSTASALGKLQDVVNQNAQALNTLVKQLSSNFGAISSVLNDILSRLDPPEAEVQIDRLITGRLQSLQTYVTQQLIRAAEIRWSANLAATKMSECVLGQSKRVDFCGKGYHLMSFPQSAPHGVVFLHVTYVPAQEKNFTTAPAICHDGKAHFPREGVFVSNGTHWFVTQRNFYEPQIITTDNTFVSGNCDVVIGIVNNTVYDPLQPELDSGGSGYIPEAPRDGQAYVRKDGEWVLLSTFL

SEQ ID NO: 9832 - protein, 1177 aa, Artificial Sequence
  SARS-CoV-2/USA/WA-UW291/2020__EPI_ISL_418076 spike protein (1-1147)(K986P_V987P_T887W_A1020W) Foldon construct
MFVFLVLLPLVSSQCVNLTTRTQLPPAYTNSFTRGVYYPDKVFRSSVLHSTQDLFLPFFSNVTWFHAIHVSGTNGTKRFDNPVLPFNDGVYFASTEKSNIIRGWIFGTTLDSKTQSLLIVNNATNVVIKVCEFQFCNDPFLGVYYHKNNKSWMESEFRVYSSANNCTFEYVSQPFLMDLEGKQGNFKNLREFVFKNIDGYFKIYSKHTPINLVRDLPQGFSALEPLVDLPIGINITRFQTLLALHRSYLTPGDSSSGWTAGAAAYYVGYLQPRTFLLKYNENGTITDAVDCALDPLSETKCTLKSFTVEKGIYQTSNFRVQPTESIVRFPNITNLCPFGEVFNATRFASVYAWNRKRISNCVADYSVLYNSASFSTFKCYGVSPTKLNDLCFTNVYADSFVIRGDEVRQIAPGQTGKIADYNYKLPDDFTGCVIAWNSNNLDSKVGGNYNYLYRLFRKSNLKPFERDISTEIYQAGSTPCNGVEGFNCYFPLQSYGFQPTNGVGYQPYRVVVLSFELLHAPATVCGPKKSTNLVKNKCVNFNFNGLTGTGVLTESNKKFLPFQQFGRDIADTTDAVRDPQTLEILDITPCSFGGVSVITPGTNTSNQVAVLYQGVNCTEVPVAIHADQLTPTWRVYSTGSNVFQTRAGCLIGAEHVNNSYECDIPIGAGICASYQTQTNSPRRARSVASQSIIAYTMSLGAENSVAYSNNSIAIPTNFTISVTTEILPVSMTKTSVDCTMYICGDSTECSNLLLQYGSFCTQLNRALTGIAVEQDKNTQEVFAQVKQIYKTPPIKDFGGFNFSQILPDPSKPSKRSFIEDLLFNKVTLADAGFIKQYGDCLGDIAARDLICAQKFNGLTVLPPLLTDEMIAQYTSALLAGTITSGWWFGAGAALQIPFAMQMAYRFNGIGVTQNVLYENQKLIANQFNSAIGKIQYSLSSTASALGKLQDVVNQNAQALNTLVKQLSSNFGAISSVLNDILSRLDPPEAEVQIDRLITGRLQSLQTYVTQQLIRAAEIRWSANLAATKMSECVLGQSKRVDFCGKGYHLMSFPQSAPHGVVFLHVTYVPAQEKNFTTAPAICHDGKAHFPREGVFVSNGTHWFVTQRNFYEPQIITTDNTFVSGNCDVVIGIVNNTVYDPLQPELDSGGSGYIPEAPRDGQAYVRKDGEWVLLSTFL

SEQ ID NO: 9833 - protein, 1177 aa, Artificial Sequence; identical to SEQ ID NO: 9796
  SARS-CoV-2/Portugal/PT0034/2020__EPI_ISL_418019 spike protein (1-1147)(K986P_V987P_T887W_A1020W) Foldon construct

SEQ ID NO: 9834 - protein, 1177 aa, Artificial Sequence; identical to SEQ ID NO: 9788
  SARS-CoV-2/Iceland/202/2020__EPI_ISL_417750 spike protein (1-1147)(K986P_V987P_T887W_A1020W) Foldon construct

SEQ ID NO: 9835 - protein, 1177 aa, Artificial Sequence
  SARS-CoV-2/USA/WA-UW261/2020__EPI_ISL_418046 spike protein (1-1147)(K986P_V987P_T887W_A1020W) Foldon construct
MFVFLVLLPLVSSQCVNLTTRTQLPPAYTNSFTRGVYYPDKVFRSSVLHSTQDLFLPFFSNVTWFHAIHVSGTNGTKRFDNPVLPFNDGVYFASTEKSNIIRGWIFGTTLDSKTQSLLIVNNATNVVIKVCEFQFCNDPFLGVYYHKNNKSWMESEFRVYSSANNCTFEYVSQPFLMDLEGKQGNFKNLREFVFKNIDGYFKIYSKHTPINLVRDLPQGFSALEPLVDLPIGINITRFQTLLALHRSYLTPGDSSSGWTAGAAAYYVGYLQPRTFLLKYNENGTITDAVDCALDPLSETKCTLKSFTVEKGIYQTSNFRVQPTESIVRFPNITNLCPFGEVFNATRFTSVYAWNRKRISNCVADYSVLYNSASFSTFKCYGVSPTKLNDLCFTNVYADSFVIRGDEVRQIAPGQTGKIADYNYKLPDDFTGCVIAWNSNNLDSKVGGNYNYLYRLFRKSNLKPFERDISTEIYQAGSTPCNGVEGFNCYFPLQSYGFQPTNGVGYQPYRVVVLSFELLHAPATVCGPKKSTNLVKNKCVNFNFNGLTGTGVLTESNKKFLPFQQFGRDIADTTDAVRDPQTLEILDITPCSFGGVSVITPGTNTSNQVAVLYQDVNCTEVPVAIHADQLTPTWRVYSTGSNVFQTRAGCLIGAEHVNNSYECDIPIGAGICASYQTQTNSPRRARSVASQSIIAYTMSLGAENSVAYSNNSIAIPTNFTISVTTEILPVSMTKTSVDCTMYICGDSTECSNLLLQYGSFCTQLNRALTGIAVEQDKNTQEVFAQVKQIYKTPPIKDFGGFNFSQILPDPSKPSKRSFIEDLLFNKVTLADAGFIKQYGDCLGDIAARDLICAQKFNGLTVLPPLLTDEMIAQYTSALLAGTITSGWWFGAGAALQIPFAMQMAYRFNGIGVTQNVLYENQKLIANQFNSAIGKIQDSLSSTASALGKLQDVVNQNAQALNTLVKQLSSNFGAISSVLNDILSRLDPPEAEVQIDRLITGRLQSLQTYVTQQLIRAAEIRWSANLAATKMSECVLGQSKRVDFCGKGYHLMSFPQSAPHGVVFLHVTYVPAQEKNFTTAPAICHDGKAHFPREGVFVSNGTHWFVTQRNFYEPQIITTDNTFVSGNCDVVIGIVNNTVYDPLQPELDSGGSGYIPEAPRDGQAYVRKDGEWVLLSTFL

SEQ ID NO: 9836 - protein, 1177 aa, Artificial Sequence
  SARS-CoV-2/Portugal/PT0035/2020__EPI_ISL_418020 spike protein (1-1147)(K986P_V987P_T887W_A1020W) Foldon construct
MFVFLVLLPLVSSQCVNLTTRTQLPPAYTNSFTRGVYYPDKVFRSSVLHSTQDLFLPFFSNVTWFHAIHVSGTNGTKRFDNPVLPFNDGVYFASTEKSNIIRGWIFGTTLDSKTQSLLIVNNATNVVIKVCEFQFCNDPFLGVYYHKNNKSWMESEFRVYSSANNCTFEYVSQPFLMDLEGKQGNFKNLREFVFKNIDGYFKIYSKHTPINLVRDLPQGFSALEPLVDLPIGINITRFQTLLALHRSYLTPGDSSSGWTAGAAAYYVGYLQPRTFLLKYNENGTITDAVDCALDPLSETKCTLKSFTVEKGIYQTSNFRVQPTESIVRFPNITNLCPFGEVFNATRFASVYAWNRKRISNCVADYSVLYNSASFSTFKCYGVSPTKLNDLCFTNVYADSFVIRGDEVRQIAPGQTGKIADYNYKLPDDFTGCVIAWNSNNLDSKVGGNYNYLYRLFRKSNLKPFERDISTEIYQAGSTPCNGVEGFNCYFPLQSYGFQPTNGVGYQPYRVVVLSFELLHAPATVCGPKKSTNLVKNKCVNFNFNGLTGTGVLTESNKKFLPFQQFGRDIADTTDAVRDPQTLEILDITPCSFGGVSVITPGTNTSNQVAVLYQDVNCTEVPVAIHADQLTPTWRVYSTGSNVFQTRAGCLIGAEHVNNSYECDIPIGAGICASYQTQTNSPRRARSVASQSIIAYTMSLGAENSVAYSNNSIAIPTNFTISVTTEILPVSMTKTSVDCTMYICGDSTECSNLLLQYGSFCTQLNRALTGIAVEQDKNTQEVFAQVKQIYKTPPIKDFGGFNFSQILPDPSKPSKRSFIEDLLFNKVTLADAGFIKQYGDCLGDISARDLICAQKFNGLTVLPPLLTDEMIAQYTSALLAGTITSGWWFGAGAALQIPFAMQMAYRFNGIGVTQNVLYENQKLIANQFNSAIGKIQDSLSSTASALGKLQDVVNQNAQALNTLVKQLSSNFGAISSVLNDILSRLDPPEAEVQIDRLITGRLQSLQTYVTQQLIRAAEIRWSANLAATKMSECVLGQSKRVDFCGKGYHLMSFPQSAPHGVVFLHVTYVPAQEKNFTTAPAICHDGKAHFPREGVFVSNGTHWFVTQRNFYEPQIITTDNTFVSGNCDVVIGIVNNTVYDPLQPELDSGGSGYIPEAPRDGQAYVRKDGEWVLLSTFL

SEQ ID NO: 9837 - protein, 1177 aa, Artificial Sequence
  SARS-CoV-2/USA/NY-NYUMC7/2020__EPI_ISL_418192 spike protein (1-1147)(K986P_V987P_T887W_A1020W) Foldon construct
MFVFLVLLPLVSSQCVNLTTRTQLPPAYTNSFTRGVYYPDKVFRSSVLHSTQDLFLPFFSNVTWFHAIHVSGTNGTKRFDNPVLPFNDGVYFASTEKSNIIRGWIFGTTLDSKTQSLLIVNNATNVVIKVCEFQFCNDPFLGVYHHKNNKSWMESEFRVYSSANNCTFEYVSQPFLMDLEGKQGNFKNLREFVFKNIDGYFKIYSKHTPINLVRDLPQGFSALEPLVDLPIGINITRFQTLLALHRSYLTPGDSSSGWTAGAAAYYVGYLQPRTFLLKYNENGTITDAVDCALDPLSETKCTLKSFTVEKGIYQTSNFRVQPTESIVRFPNITNLCPFGEVFNATRFASVYAWNRKRISNCVADYSVLYNSASFSTFKCYGVSPTKLNDLCFTNVYADSFVIRGDEVRQIAPGQTGKIADYNYKLPDDFTGCVIAWNSNNLDSKVGGNYNYLYRLFRKSNLKPFERDISTEIYQAGSTPCNGVEGFNCYFPLQSYGFQPTNGVGYQPYRVVVLSFELLHAPATVCGPKKSTNLVKNKCVNFNFNGLTGTGVLTESNKKFLPFQQFGRDIADTTDAVRDPQTLEILDITPCSFGGVSVITPGTNTSNQVAVLYQGVNCTEVPVAIHADQLTPTWRVYSTGSNVFQTRAGCLIGAEHVNNSYECDIPIGAGICASYQTQTNSPRRARSVASQSIIAYTMSLGAENSVAYSNNSIAIPTNFTISVTTEILPVSMTKTSVDCTMYICGDSTECSNLLLQYGSFCTQLNRALTGIAVEQDKNTQEVFAQVKQIYKTPPIKDFGGFNFSQILPDPSKPSKRSFIEDLLFNKVTLADAGFIKQYGDCLGDIAARDLICAQKFNGLTVLPPLLTDEMIAQYTSALLAGTITSGWWFGAGAALQIPFAMQMAYRFNGIGVTQNVLYENQKLIANQFNSAIGKIQDSLSSTASALGKLQDVVNQNAQALNTLVKQLSSNFGAISSVLNDILSRLDPPEAEVQIDRLITGRLQSLQTYVTQQLIRAAEIRWSANLAATKMSECVLGQSKRVDFCGKGYHLMSFPQSAPHGVVFLHVTYVPAQEKNFTTAPAICHDGKAHFPREGVFVSNGTHWFVTQRNFYEPQIITTDNTFVSGNCDVVIGIVNNTVYDPLQPELDSGGSGYIPEAPRDGQAYVRKDGEWVLLSTFL

SEQ ID NO: 9838 - protein, 1177 aa, Artificial Sequence
  SARS-CoV-2/Iceland/189/2020__EPI_ISL_417709 spike protein (1-1147)(K986P_V987P_T887W_A1020W) Foldon construct
MFVFLVLLPLVSSQCVNLTTRTQLPPAYTNSFTRGVYYPDKVFRSSVLHSTQDLFLPFFSNVTWFHAIHVSGTNGTKRFDNPVLPFNDGVYFASTEKSNIIRGWIFGTTLDSKTQSLLIVNNATNVVIKVCEFQFCNDPFLGVYYHKNNKSWMESEFRVYSSANNCTFEYVSQPFLMDLEGKQGNFKNLREFVFKNIDGYFKIYSKHTPINLVRDLPQGFSALEPLVDLPIGINITRFQTLLALHRSYLTPGDSSSGWTAGAAAYYVGYLQPRTFLLKYNENGTITDAVDCALDPLSETKCTLKSFTVEKGIYQTSNFRVQPTESIVRFPNITNLCPFGEVFNATRFASVYAWNRKRISNCVADYSVLYNSASFSTFKCYGVSPTKLNDLCFTNVYADSFVIRGDEVRQIAPGQTGKIADYNYKLPDDFTGCVIAWNSNNLDSKVGGNYNYLYRLFRKSNLKPFERDISTEIYQAGSTPCNGVEGFNCYFPLQSYGFQPTNGVGYQPYRVVVLSFELLHAPATVCGPKKSTNLVKNKCVNFNFNGLTGTGVLTESNKKFLPFQQFGRDIADTTDAVRDPQTLEILDITPCSFGGVSVITPGTNTSNQVAVLYQGVNCTEVPVAIHADQLTPTWRVYSTGSNVFQTRAGCLIGAEHVNNSYECDIPIGAGICASYQTQTNSPRRARSVASQSIIAYTMSLGAENSVAYSNNSIAIPTNFTISVTTEILPVSMTKTSVDCTMYICGDSTECSNLLLQYGSFCTQLNRALTGIAVEQDKNTQEVFAQVKQIYKTPPIKDFGGFNFSQILPDPSKPSKRSFIEDLLFNKVTLADAGFTKQYGDCLGDIAARDLICAQKFNGLTVLPPLLTDEMIAQYTSALLAGTITSGWWFGAGAALQIPFAMQMAYRFNGIGVTQNVLYENQKLIANQFNSAIGKIQDSLSSTASALGKLQDVVNQNAQALNTLVKQLSSNFGAISSVLNDILSRLDPPEAEVQIDRLITGRLQSLQTYVTQQLIRAAEIRWSANLAATKMSECVLGQSKRVDFCGKGYHLMSFPQSAPHGVVFLHVTYVPAQEKNFTTAPAICHDGKAHFPREGVFVSNGTHWFVTQRNFYEPQIITTDNTFVSGNCDVVIGIVNNTVYDPLQPELDSGGSGYIPEAPRDGQAYVRKDGEWVLLSTFL

SEQ ID NO: 9839 - protein, 1177 aa, Artificial Sequence
  SARS-CoV-2/Australia/NSW56/2020__EPI_ISL_417408 spike protein (1-1147)(K986P_V987P_T887W_A1020W) Foldon construct
MFVFLVLLPLVSSQCVNLTTRTQLPPAYTNSFTRGVYYPDKVFRSSVLHSTQDLFLPFFSNVTWFHAIHVSGTNGTKRFDNPVLPFNDGVYFASTEKSNIIRGWIFGTTLDSKTQSLLIVNNATNVVIKVCEFQFCNDPFLGVYYHKNNKSWMESEFRVYSSANNCTFEYVSQPFLMDLEGKQGNFKNLREFVFKNIDGYFKIYSKHTPINLVRDLPQGFSALEPLVDLPIGINITRFQTLLALHRSYLTPGDSSSGWTAGAAAYYVGYLQPRTFLLKYNENGTITDAVDCALDPLSETKCTLKSFTVEKGIYQTSNFRVQPTESIVRFPNITNLCPFGEVFNATRFASVYAWNRKRISNCVADYSVLYNSASFSTFKCYGVSPTKLNDLCFTNVYADSFVIRGDEVRQIAPGQTGKIADYNYKLPDDFTGCVIAWNSNNLDSKVGGNYNYLYRLFRKSNLKPFERDISTEIYQAGSTPCNGVEGFNCYFPLQSYGFQPTNGVGYQPYRVVVLSFELLHAPATVCGPKKSTNLVKNKCVNFNFNGLTGTGVLTESNKKFLPFQQFGRDIADTTDAVRDPQTLEILDITPCSFGGVSVITPGTNTSNQVAVLYQDVNCTEVPVAIHADQLTPTWRVYSTGSNVFQTRAGCLIGAEHVNNSYECDIPIGAGICASYQTQTNSPRRARSVASQSIIAYTMSLGAENSVAYSNNSIAIPTNFTISVTTEILPVSMTKTSVDCTMYICGDSTECSNLLLQYGSFCTQLNRALTGIAVEQDKNTQEVFAQVKQIYKTPPIKDFGGFNFSQILPDSSKPSKRSFIEDLLFNKVTLADAGFIKQYGDCLGDIAARDLICAQKFNGLTVLPPLLTDEMIAQYTSALLAGTITSGWWFGAGAALQIPFAMQMAYRFNGIGVTQNVLYENQKLIANQFNSAIGKIQDSLSSTASALGKLQDVVNQNAQALNTLVKQLSSNFGAISSVLNDILSRLDPPEAEVQIDRLITGRLQSLQTYVTQQLIRAAEIRWSANLAATKMSECVLGQSKRVDFCGKGYHLMSFPQSAPHGVVFLHVTYVPAQEKNFTTAPAICHDGKAHFPREGVFVSNGTHWFVTQRNFYEPQIITTDNTFVSGNCDVVIGIVNNTVYDPLQPELDSGGSGYIPEAPRDGQAYVRKDGEWVLLSTFL

SEQ ID NO: 9840 - protein, 1177 aa, Artificial Sequence
  SARS-CoV-2/Iceland/280/2020__EPI_ISL_417608 spike protein (1-1147)(K986P_V987P_T887W_A1020W) Foldon construct
MFVFLVLLPLVSSQCVNLTTRTQLPPAYTNSFTRGVYYPDKVFRSSVLHSTQDLFLPFFSNVTWFHAIHVSGTNGTKRFDNPVLPFNDGVYFASTEKSNIIRGWIFGTTLDSKTQSLLIVNNATNVVIKVCEFQFCNDPFLGVYYHKNNKSWMESEFRVYSSANNCTFEYVSQPFLMDLEGKQGNFKNLREFVFKNIDGYFKIYSKHTPINLVRDLPQGFSALEPLVDLPIGINITRFQTLLALHRSYLTPGDSSSGWTAGAAAYYVGYLQPRTFLLKYNENGTITDAVDCALDPLSETKCTLKSFTVEKGIYQTSNFRVQPTESIVRFPNITNLCPFGEVFNATRFASVYAWNRKRISNCVADYSVLYNSASFSTFKCYGVSPTKLNDLCFTNVYADSFVIRGDEVRQIAPGQTGKIADYNYKLPDDFTGCVIAWNSNNLDSKVGGNYNYLYRLFRKSNLKPFERDISTEIYQAGSTPCNGVEGFNCYFPLQSYGFQPTNGVGYQPYRVVVLSFELLHAPATVCGPKKSTNLVKNKCVNFNFNGLTGTGVLTESNKKFLPFQQFGRDIADTTDAVRDPQTLEILDITPCSFGGVSVITPGTNTSNQVAVLYQGVNCTEVPVAIHADQLTPTWRVYSTGSNVFQTRAGCLIGAEHVNNSYECDIPIGAGICASYHTQTNSPRRARSVASQSIIAYTMSLGAENSVAYSNNSIAIPTNFTISVTTEILPVSMTKTSVDCTMYICGDSTECSNLLLQYGSFCTQLNRALTGIAVEQDKNTQEVFAQVKQIYKTPPIKDFGGFNFSQILPDPSKPSKRSFIEDLLFNKVTLADAGFIKQYGDCLGDIAARDLICAQKFNGLTVLPPLLTDEMIAQYTSALLAGTITSGWWFGAGAALQIPFAMQMAYRFNGIGVTQNVLYENQKLIANQFNSAIGKIQDSLSSTASALGKLQDVVNQNAQALNTLVKQLSSNFGAISSVLNDILSRLDPPEAEVQIDRLITGRLQSLQTYVTQQLIRAAEIRWSANLAATKMSECVLGQSKRVDFCGKGYHLMSFPQSAPHGVVFLHVTYVPAQEKNFTTAPAICHDGKAHFPREGVFVSNGTHWFVTQRNFYEPQIITTDNTFVSGNCDVVIGIVNNTVYDPLQPELDSGGSGYIPEAPRDGQAYVRKDGEWVLLSTFL

SEQ ID NO: 9841 - protein, 1177 aa, Artificial Sequence; identical to SEQ ID NO: 9796
  SARS-CoV-2/Iceland/247/2020__EPI_ISL_417575 spike protein (1-1147)(K986P_V987P_T887W_A1020W) Foldon construct

SEQ ID NO: 9842 - protein, 1177 aa, Artificial Sequence
  SARS-CoV-2/Iceland/238/2020__EPI_ISL_417566 spike protein (1-1147)(K986P_V987P_T887W_A1020W) Foldon construct
MFVFLVLLPLVSSQCVNLTTRTQLPPAYTNSFTRGVYYPDKVFRSSVLHSTQDLFLPFFSNVTWFHAIHVSGTNGTKRFDNPVLPFNDGVYFASTEKSNIIRGWIFGTTLDSKTQSLLIVNNATNVVIKVCEFQFCNDPFLGVYYHKNNKSWMESEFRVYSSANNCTFEYVSQPFLMDLEGKQGNFKNLREFVFKNIDGYFKIYSKHTPINLVRDLPQGFSALEPLVDLPIGINITRFQTLLALHRSYLTPGDSSSGWTAGAAAYYVGYLQPRTFLLKYNENGTITDAVDCALDPLSETKCTLKSFTVEKGIYQTSNFRVQPTESIVRFPNITNLCPFGEVFNATRFASVYAWNRKRISNCVADYSVLYNSASFSTFKCYGVSPTKLNDLCFTNVYADSFVIRGDEVRQIAPGQTGKIADYNYKLPDDFTGCVIAWNSNNLDSKVGGNYNYLYRLFRKSNLKPFERDISTEIYQAGSTPCNGVEGFNCYFPLQSYGFQPTNGVGYQPYRVVVLSFELLHAPATVCGPKKSTNLVKNKCVNFNFNGLTGTGVLTESNKKFLPFQQFGRDIADTTDAVRDPQTLEILDITPCSFGGVSVITPGTNTSNQVAVLYQGVNCTEVPVAIHADQLTPTWRVYSTGSNVFQTRAGCLIGAEHVNNSYECDIPIGAGICASYQTQTNSPRRARSVASQSIIAYTMSLGAENSVAYSNNSIAIPTNFTISVTTEILPVSMTKTSVDCTMYICGDSTECSNLLLQYGSFCTQLNRALTGIAVEQDKNTQEVFAQVKQIYKTPPIKDFGGFNFSQILPDPSKPSKRSFIEDLLFNKVTLADVGFIKQYGDCLGDIAARDLICAQKFNGLTVLPPLLTDEMIAQYTSALLAGTITSGWWFGAGAALQIPFAMQMAYRFNGIGVTQNVLYENQKLIANQFNSAIGKIQDSLSSTASALGKLQDVVNQNAQALNTLVKQLSSNFGAISSVLNDILSRLDPPEAEVQIDRLITGRLQSLQTYVTQQLIRAAEIRWSANLAATKMSECVLGQSKRVDFCGKGYHLMSFPQSAPHGVVFLHVTYVPAQEKNFTTAPAICHDGKAHFPREGVFVSNGTHWFVTQRNFYEPQIITTDNTFVSGNCDVVIGIVNNTVYDPLQPELDSGGSGYIPEAPRDGQAYVRKDGEWVLLSTFL

SEQ ID NO: 9843 - protein, 1177 aa, Artificial Sequence
  SARS-CoV-2/Greece/16/2020__EPI_ISL_418265 spike protein (1-1147)(K986P_V987P_T887W_A1020W) Foldon construct
MFVFLVLLPLVSSQCVNLTTRTQLPPAYTNSFTRGVYYPDKVFRSSVLHSTQDLFLPFFSNVTWFHAIHVSGTNGTKRFDNPVLPFNDGVYFASTEKSNIIRGWIFGTTLDSKTQSLLIVNNATNVVIKVCEFQFCNDPFLGVYYHKNNKSWMESEFRVYSSANNCTFEYVSQPFLMDLEGKQGNFKNLREFVFKNVDGYFKIYSKHTPINLVRDLPQGFSALEPLVDLPIGINITRFQTLLALHRSYLTPGDSSSGWTAGAAAYYVGYLQPRTFLLKYNENGTITDAVDCALDPLSETKCTLKSFTVEKGIYQTSNFRVQPTESIVRFPNITNLCPFGEVFNATRFASVYAWNRKRISNCVADYSVLYNSASFSTFKCYGVSPTKLNDLCFTNVYADSFVIRGDEVRQIAPGQTGKIADYNYKLPDDFTGCVIAWNSNNLDSKVGGNYNYLYRLFRKSNLKPFERDISTEIYQAGSTPCNGVEGFNCYFPLQSYGFQPTNGVGYQPYRVVVLSFELLHAPATVCGPKKSTNLVKNKCVNFNFNGLTGTGVLTESNKKFLPFQQFGRDIADTTDAVRDPQTLEILDITPCSFGGVSVITPGTNTSNQVAVLYQDVNCTEVPVAIHADQLTPTWRVYSTGSNVFQTRAGCLIGAEHVNNSYECDIPIGAGICASYQTQTNSPRRARSVASQSIIAYTMSLGAENSVAYSNNSIAIPTNFTISVTTEILPVSMTKTSVDCTMYICGDSTECSNLLLQYGSFCTQLNRALTGIAVEQDKNTQEVFAQVKQIYKTPPIKDFGGFNFSQILPDPSKPSKRSFIEDLLFNKVTLADAGFIKQYGDCLGDIAARDLICAQKFNGLTVLPPLLTDEMIAQYTSALLAGTITSGWWFGAGAALQIPFAMQMAYRFNGIGVTQNVLYENQKLIANQFNSAIGKIQDSLSSTASALGKLQDVVNQNAQALNTLVKQLSSNFGAISSVLNDILSRLDPPEAEVQIDRLITGRLQSLQTYVTQQLIRAAEIRWSANLAATKMSECVLGQSKRVDFCGKGYHLMSFPQSAPHGVVFLHVTYVPAQEKNFTTAPAICHDGKAHFPREGVFVSNGTHWFVTQRNFYEPQIITTDNTFVSGNCDVVIGIVNNTVYDPLQPELDSGGSGYIPEAPRDGQAYVRKDGEWVLLSTFL

SEQ ID NO: 9844 - protein, 1177 aa, Artificial Sequence
  SARS-CoV-2/Iceland/319/2020__EPI_ISL_417648 spike protein (1-1147)(K986P_V987P_T887W_A1020W) Foldon construct
MFVFLVLLPLVSSQCVNLTTRTQLPPAYTNSFTRGVYYPDKVFRSSVLHSTQDLFLPFFSNVTWFHAIHVSGTNGTKRFDNPVLPFNDGVYFASTEKSNIIRGWIFGTTLDSKTQSLLIVNNATNVVIKVCEFQFCNDPFLGVYYHKNNKSWMESEFRVYSSANNCTFEYVSQPFLIDLEGKQGNFKNLREFVFKNIDGYFKIYSKHTPINLVRDLPQGFSALEPLVDLPIGINITRFQTLLALHRSYLTPGDSSSGWTAGAAAYYVGYLQPRTFLLKYNENGTITDAVDCALDPLSETKCTLKSFTVEKGIYQTSNFRVQPTESIVRFPNITNLCPFGEVFNATRFASVYAWNRKRISNCVADYSVLYNSASFSTFKCYGVSPTKLNDLCFTNVYADSFVIRGDEVRQIAPGQTGKIADYNYKLPDDFTGCVIAWNSNNLDSKVGGNYNYLYRLFRKSNLKPFERDISTEIYQAGSTPCNGVEGFNCYFPLQSYGFQPTNGVGYQPYRVVVLSFELLHAPATVCGPKKSTNLVKNKCVNFNFNGLTGTGVLTESNKKFLPFQQFGRDIADTTDAVRDPQTLEILDITPCSFGGVSVITPGTNTSNQVAVLYQGVNCTEVPVAIHADQLTPTWRVYSTGSNVFQTRAGCLIGAEHVNNSYECDIPIGAGICASYQTQTNSPRRARSVASQSIIAYTMSLGAENSVAYSNNSIAIPTNFTISVTTEILPVSMTKTSVDCTMYICGDSTECSNLLLQYGSFCTQLNRALTGIAVEQDKNTQEVFAQVKQIYKTPPIKDFGGFNFSQILPDPSKPSKRSFIEDLLFNKVTLADAGFIKQYGDCLGDIAARDLICAQKFNGLTVLPPLLTDEMIAQYTSALLAGTITSGWWFGAGAALQIPFAMQMAYRFNGIGVTQNVLYENQKLIANQFNSAIGKIQDSLSSTASALGKLQDVVNQNAQALNTLVKQLSSNFGAISSVLNDILSRLDPPEAEVQIDRLITGRLQSLQTYVTQQLIRAAEIRWSANLAATKMSECVLGQSKRVDFCGKGYHLMSFPQSAPHGVVFLHVTYVPAQEKNFTTAPAICHDGKAHFPREGVFVSNGTHWFVTQRNFYEPQIITTDNTFVSGNCDVVIGIVNNTVYDPLQPELDSGGSGYIPEAPRDGQAYVRKDGEWVLLSTFL

SEQ ID NO: 9845 - protein, 1177 aa, Artificial Sequence
  SARS-CoV-2/Congo/94/2020__EPI_ISL_417947 spike protein (1-1147)(K986P_V987P_T887W_A1020W) Foldon construct
MFVFLVLLPLVSSQCVNLTTRTQLPPAYTNSFTRGVYYPDKVFRSSVLHSTQDLFLPFFSNVTWFHAIHVSGTNGTKRFDNPVLPFNDGVYFASTEKSNIIRGWIFGTTLDSKTQSLLIVNNATNVVIKVCEFQFCNDPFLGVYYHKNNKSWMESEFRVYSSANNCTFEYVSQPFLMDLEGKQGNFKNLREFVFKNIDGYFKIYSKHTPINLVRDLPQGFSALEPLVDLPIGINITRFQTLLALHRSYLTPGDSSSGWTAGAAAYYVGYLQPRTFLLKYNENGTITDAVDCALDPLSETKCTLKSFTVEKGIYQTSNFRVQPTESIVRFPNITNLCPFGEVFNATRFASVYAWNRKRISNCVADYSVLYNSASFSTFKCYGVSPTKLNDLCFTNVYADSFVIRGDEVRQIAPGQTGKIADYNYKLPDDFTGCVIAWNSNNLDSKVGGNYNYLYRLFRKSNLKPFERDISTEIYQAGSTPCNGVEGFNCYFPLQSYGFQPTNGVGYQPYRVVVLSFELLHAPATVCGPKKSTNLVKNKCVNFNFNGLTGTGVLTESNKKFLPFQQFGRDIADTTDAVRDPQTLEILDITPCSFGGVSVITPGTNTSNQVAVLYQGVNCTEVPVAIHADQLTPTWRVYSTGSNVFQTRAGCLIGAEHVNNSYECDIPIGAGICASYQTQTNSPRRARSVASQSIIAYTMSLGAENSVAYSNNSIAIPTNFTISVTTEILPVSMTKTSVDCTMYICGDSTECSNLLLQYGSFCTQLNRALTGIAVEQDKNTQEVFAQVKQIYKTPPIKDFGGFNFSQILPDPSKPSKRSFIEDILFNKVTLADAGFIKQYGDCLGDIAARDLICAQKFNGLTVLPPLLTDEMIAQYTSALLAGTITSGWWFGAGAALQIPFAMQMAYRFNGIGVTQNVLYENQKLIANQFNSAIGKIQDSLSSTASALGKLQDVVNQNAQALNTLVKQLSSNFGAISSVLNDILSRLDPPEAEVQIDRLITGRLQSLQTYVTQQLIRAAEIRWSANLAATKMSECVLGQSKRVDFCGKGYHLMSFPQSAPHGVVFLHVTYVPAQEKNFTTAPAICHDGKAHFPREGVFVSNGTHWFVTQRNFYEPQIITTDNTFVSGNCDVVIGIVNNTVYDPLQPELDSGGSGYIPEAPRDGQAYVRKDGEWVLLSTFL

SEQ ID NO: 9846 - protein, 1177 aa, Artificial Sequence
  SARS-CoV-2/Congo/158/2020__EPI_ISL_417950 spike protein (1-1147)(K986P_V987P_T887W_A1020W) Foldon construct
MFVFLVLLPLVSSQCVNLTTRTQLPPAYTNSFTRGVYYPDKVFRSSVLHSTQDLFLPFFSNVTWFHAIHVSGTNGTKRFDNPVLPFNDGVYFASTEKSNIIRGWIFGTTLDSKTQSLLIVNNATNVVIKVCEFQFCNDPFLGVYYHKNNKSWMESEFRVYSSANNCTFEYVSQPFLMDLEGKQGNFKNLREFVFKNIDGYFKIYSKHTPINLVRDLPQGFSALEPLVDLPIGINITRFQTLLALHRSYLTPGDSSSGWTAGAAAYYVGYLQPRTFLLKYNENGTITDAVDCALDPLSETKCTLKSFTVEKGIYQTSNFRVQPTESIVRFPNITNLCPFGEVFNATRFASVYAWNRKRISNCVADYSVLYNSASFSTFKCYGVSPTKLNDLCFTNVYADSFVIRGDEVRQIAPGQTGKIADYNYKLPDDFTGCVIAWNSNNLDSKVGGNYNYLYRLFRKSNLKPFERDISTEIYQAGSTPCNGVEGFNCYFPLQSYGFQPTNGVGYQPYRVVVLSFELLHAPATVCGPKKSTNLVKNKCVNFNFNGLTGTGVLTESNKKFLPFQQFGRDIADTTDAVRDPQTLEILDITPCSFGGVSVITPGTNTSNQVAVLYQDVNCTEVPVAIHADQLTPTWRVYSTGSNVFQTRAGCLIGAEHVNNSYECDIPIGAGICASYQTQTNSPRRARSVASQSIIAYTMSLGAENSVAYSNNSIAIPTNFTISVTTEILPVSMTKTSVDCTMYICGDSTECSNLLLQYGSFCTQLNRALTGIAVEQDKNTQEVFAQVKQIYKTPPIKDFGGFNFSQILPDPSKPSKRSFIEDLLFNKVTLADAGFIKQYGDCLGDIAARDLICAQKFNGLTVLPPLLTDEMIAQYTSALLAGTITSGWWFGAGAALQIPFAMQMAYRFNGIGVTQNVLYENQKLIANQFNSAIGKIQDSLSSTASALGKLQDVVNQNAQALNTLVKQLSSNFGAISSVLNDILSRLDPPEAEVQIDRLITGRLQSLQTYVTQQLIRAAEIRWSANLAATKMSECVLGQSKRVDFCGKGYHLMSFPQSAPHGVVFLHVTYVPAQEKNFTTAPAICHDGKAHFPREGVFVSNGTHWFVTQRNFYEPQIITTDNTFLSGNCDVVIGIVNNTVYDPLQPELDSGGSGYIPEAPRDGQAYVRKDGEWVLLSTFL

SEQ ID NO: 9847 - protein, 1177 aa, Artificial Sequence
  SARS-CoV-2/USA/UT-00034/2020__EPI_ISL_417977 spike protein (1-1147)(K986P_V987P_T887W_A1020W) Foldon construct
MFVFLVLLPLVSSQCVNLTTRTQLPPAYTNSFTRGVYYPDKVFRSSVLHSTQDLFLPFFSNVTWFHAIHVSGTNGTKRFDNPVLPFNDGVYFASTEKSNIIRGWIFGTTLDSKTQSLLIVNNATNVVIKVCEFQFCNDPFLGVYYYKNNKSWMESEFRVYSSANNCTFEYVSQPFLMDLEGKQGNFKNLREFVFKNIDGYFKIYSKHTPINLVRDLPQGFSALEPLVDLPIGINITRFQTLLALHRSYLTPGDSSSGWTAGAAAYYVGYLQPRTFLLKYNENGTITDAVDCALDPLSETKCTLKSFTVEKGIYQTSNFRVQPTESIVRFPNITNLCPFGEVFNATRFASVYAWNRKRISNCVADYSVLYNSASFSTFKCYGVSPTKLNDLCFTNVYADSFVIRGDEVRQIAPGQTGKIADYNYKLPDDFTGCVIAWNSNNLDSKVGGNYNYLYRLFRKSNLKPFERDISTEIYQAGSTPCNGVEGFNCYFPLQSYGFQPTNGVGYQPYRVVVLSFELLHAPATVCGPKKSTNLVKNKCVNFNFNGLTGTGVLTESNKKFLPFQQFGRDIADTTDAVRDPQTLEILDITPCSFGGVSVITPGTNTSNQVAVLYQGVNCTEVPVAIHADQLTPTWRVYSTGSNVFQTRAGCLIGAEHVNNSYECDIPIGAGICASYQTQTNSPRRARSVASQSIIAYTMSLGAENSVAYSNNSIAIPTNFTISVTTEILPVSMTKTSVDCTMYICGDSTECSNLLLQYGSFCTQLNRALTGIAVEQDKNTQEVFAQVKQIYKTPPIKDFGGFNFSQILPDPSKPSKRSFIEDLLFNKVTLADAGFIKQYGDCLGDIAARDLICAQKFNGLTVLPPLLTDEMIAQYTSALLAGTITSGWWFGAGAALQIPFAMQMAYRFNGIGVTQNVLYENQKLIANQFNSAIGKIQDSLSSTASALGKLQDVVNQNAQALNTLVKQLSSNFGAISSVLNDILSRLDPPEAEVQIDRLITGRLQSLQTYVTQQLIRAAEIRWSANLAATKMSECVLGQSKRVDFCGKGYHLMSFPQSAPHGVVFLHVTYVPAQEKNFTTAPAICHDGKAHFPREGVFVSNGTHWFVTQRNFYEPQIITTDNTFVSGNCDVVIGIVNNTVYDPLQPELDSGGSGYIPEAPRDGQAYVRKDGEWVLLSTFL

SEQ ID NO: 9848 - protein, 1177 aa, Artificial Sequence
  SARS-CoV-2/USA/UT-00033/2020__EPI_ISL_417976 spike protein (1-1147)(K986P_V987P_T887W_A1020W) Foldon construct
MFVFLVLLPLVSSQCVNLTTRTQLPPAYTNSFTRGVYYPDKVFRSSVLHSTQDLFLPFFSNVTWFHAIHVSGTNGTKRFDNPVLPFNDGVYFASTEKSNIIRGWIFGTTLDSKTQSLLIVNNATNVVIKVCEFQFCNDPFLGVYYHKNNKSWMESEFRVYSSANNCTFEYVSQPFLMDLEGKQGNFKNLREFVFKNIDGYFKIYSKHTPINLVRDLPQGFSALEPLVDLPIGINITRFQTLLALHRSYLTPGDSSSGLTAGAAAYYVGYLQPRTFLLKYNENGTITDAVDCALDPLSETKCTLKSFTVEKGIYQTSNFRVQPTESIVRFPNITNLCPFGEVFNATRFASVYAWNRKRISNCVADYSVLYNSASFSTFKCYGVSPTKLNDLCFTNVYADSFVIRGDEVRQIAPGQTGKIADYNYKLPDDFTGCVIAWNSNNLDSKVGGNYNYLYRLFRKSNLKPFERDISTEIYQAGSTPCNGVEGFNCYFPLQSYGFQPTNGVGYQPYRVVVLSFELLHAPATVCGPKKSTNLVKNKCVNFNFNGLTGTGVLTESNKKFLPFQQFGRDIADTTDAVRDPQTLEILDITPCSFGGVSVITPGTNTSNQVAVLYQGVNCTEVPVAIHADQLTPTWRVYSTGSNVFQTRAGCLIGAEHVNNSYECDIPIGAGICASYQTQTNSPRRARSVASQSIIAYTMSLGAENSVAYSNNSIAIPTNFTISVTTEILPVSMTKTSVDCTMYICGDSTECSNLLLQYGSFCTQLNRALTGIAVEQDKNTQEVFAQVKQIYKTPPIKDFGGFNFSQILPDPSKPSKRSFIEDLLFNKVTLADAGFIKQYGDCLGDIAARDLICAQKFNGLTVLPPLLTDEMIAQYTSALLAGTITSGWWFGAGAALQIPFAMQMAYRFNGIGVTQNVLYENQKLIANQFNSAIGKIQDSLSSTASALGKLQDVVNQNAQALNTLVKQLSSNFGAISSVLNDILSRLDPPEAEVQIDRLITGRLQSLQTYVTQQLIRAAEIRWSANLAATKMSECVLGQSKRVDFCGKGYHLMSFPQSAPHGVVFLHVTYVPAQEKNFTTAPAICHDGKAHFPREGVFVSNGTHWFVTQRNFYEPQIITTDNTFVSGNCDVVIGIVNNTVYDPLQPELDSGGSGYIPEAPRDGQAYVRKDGEWVLLSTFL

SEQ ID NO: 9849 - protein, 1177 aa, Artificial Sequence
  SARS-CoV-2/USA/WI-13/2020__EPI_ISL_417516 spike protein (1-1147)(K986P_V987P_T887W_A1020W) Foldon construct
MFVFLVLLPLVSSQCVNLTTRTQLPPAYTNSFTRGVYYPDKVFRSSVLHSTQDLFLPFFSNVTWFHAIHVSGTNGTKRFDNPVLPFNDGVYFASTEKSNIIRGWIFGTTLDSKTQSLLIVNNATNVVIKVCEFQFCNDPFLGVYYHKNNKSWMESEFRVYSSANNCTFEYVSQPFLMDLEGKQGNFKNLREFVFKNIDGYFKIYSKHTPINLVRDLPQGFSALEPLVDLPIGINITRFQTLLALHRSYLTPGDSSSGWTAGAAAYYVGYLQPRTFLLKYNENGTITDAVDCALDPLSETKCTLKSFTVEKGIYQTSNFRVLPTESIVRFPNITNLCPFGEVFNATRFASVYAWNRKRISNCVADYSVLYNSASFSTFKCYGVSPTKLNDLCFTNVYADSFVIRGDEVRQIAPGQTGKIADYNYKLPDDFTGCVIAWNSNNLDSKVGGNYNYLYRLFRKSNLKPFERDISTEIYQAGSTPCNGVEGFNCYFPLQSYGFQPTNGVGYQPYRVVVLSFELLHAPATVCGPKKSTNLVKNKCVNFNFNGLTGTGVLTESNKKFLPFQQFGRDIADTTDAVRDPQTLEILDITPCSFGGVSVITPGTNTSNQVAVLYQGVNCTEVPVAIHADQLTPTWRVYSTGSNVFQTRAGCLIGAEHVNNSYECDIPIGAGICASYQTQTNSPRRARSVASQSIIAYTMSLGAENSVAYSNNSIAIPTNFTISVTTEILPVSMTKTSVDCTMYICGDSTECSNLLLQYGSFCTQLNRALTGIAVEQDKNTQEVFAQVKQIYKTPPIKDFGGFNFSQILPDPSKPSKRSFIEDLLFNKVTLADAGFIKQYGDCLGDIAARDLICAQKFNGLTVLPPLLTDEMIAQYTSALLAGTITSGWWFGAGAALQIPFAMQMAYRFNGIGVTQNVLYENQKLIANQFNSAIGKIQDSLSSTASALGKLQDVVNQNAQALNTLVKQLSSNFGAISSVLNDILSRLDPPEAEVQIDRLITGRLQSLQTYVTQQLIRAAEIRWSANLAATKMSECVLGQSKRVDFCGKGYHLMSFPQSAPHGVVFLHVTYVPAQEKNFTTAPAICHDGKAHFPREGVFVSNGTHWFVTQRNFYEPQIITTDNTFVSGNCDVVIGIVNNTVYDPLQPELDSGGSGYIPEAPRDGQAYVRKDGEWVLLSTFL

SEQ ID NO: 9850 - protein, 1176 aa, Artificial Sequence
  SARS-CoV-2/India/1-27/2020__EPI_ISL_413522 spike protein (1-1146)(K985P_V986P_T886W_A1019W) Foldon construct
MFVFLVLLPLVSSQCVNLTTRTQLPPAYTNSFTRGVYYPDKVFRSSVLHSTQDLFLPFFSNVTWFHAIHVSGTNGTKRFDNPVLPFNDGVYFASTEKSNIIRGWIFGTTLDSKTQSLLIVNNATNVVIKVCEFQFCNDPFLGVYHKNNKSWMESEFRVYSSANNCTFEYVSQPFLMDLEGKQGNFKNLREFVFKNIDGYFKIYSKHTPINLVRDLPQGFSALEPLVDLPIGINITRFQTLLALHRSYLTPGDSSSGWTAGAAAYYVGYLQPRTFLLKYNENGTITDAVDCALDPLSETKCTLKSFTVEKGIYQTSNFRVQPTESIVRFPNITNLCPFGEVFNATRFASVYAWNRKRISNCVADYSVLYNSASFSTFKCYGVSPTKLNDLCFTNVYADSFVIRGDEVIQIAPGQTGKIADYNYKLPDDFTGCVIAWNSNNLDSKVGGNYNYLYRLFRKSNLKPFERDISTEIYQAGSTPCNGVEGFNCYFPLQSYGFQPTNGVGYQPYRVVVLSFELLHAPATVCGPKKSTNLVKNKCVNFNFNGLTGTGVLTESNKKFLPFQQFGRDIADTTDAVRDPQTLEILDITPCSFGGVSVITPGTNTSNQVAVLYQDVNCTEVPVAIHADQLTPTWRVYSTGSNVFQTRAGCLIGAEHVNNSYECDIPIGAGICASYQTQTNSPRRARSVASQSIIAYTMSLGAENSVAYSNNSIAIPTNFTISVTTEILPVSMTKTSVDCTMYICGDSTECSNLLLQYGSFCTQLNRALTGIAVEQDKNTQEVFAQVKQIYKTPPIKDFGGFNFSQILPDPSKPSKRSFIEDLLFNKVTLADAGFIKQYGDCLGDIAARDLICAQKFNGLTVLPPLLTDEMIAQYTSALLAGTITSGWWFGAGAALQIPFAMQMAYRFNGIGVTQNVLYENQKLIANQFNSAIGKIQDSLSSTASALGKLQDVVNQNAQALNTLVKQLSSNFGAISSVLNDILSRLDPPEAEVQIDRLITGRLQSLQTYVTQQLIRAAEIRWSANLAATKMSECVLGQSKRVDFCGKGYHLMSFPQSAPHGVVFLHVTYVPAQEKNFTTAPAICHDGKAHFPREGVFVSNGTHWFVTQRNFYEPQIITTDNTFVSGNCDVVIGIVNNTVYDPLQPELDSGGSGYIPEAPRDGQAYVRKDGEWVLLSTFL

SEQ ID NO: 9851 - protein, 1171 aa, Artificial Sequence
  SARS-CoV-2/pangolin/Guangxi/P4L/2017__EPI_ISL_410538 spike protein (1-1141)(K980P_V981P_T881W_A1014W) Foldon construct
MFVFLFVLPLVSSQCVNLTTRTGIPPGYTNSSTRGVYYPDKVFRSSILHLTQDLFLPFFSNVTWFNTINYQGGFKKFDNPVLPFNDGVYFASTEKSNIIRGWIFGTTLDARTQSLLIVNNATNVVIKVCEFQFCTDPFLGVYYHNNNKTWVENEFRVYSSANNCTFEYISQPFLMDLEGKQGNFKNLREFVFKNVDGYFKIYSKHTPIDLVRDLPRGFAALEPLVDLPIGINITRFQTLLALHRSYLTPGNLESGWTTGAAAYYVGYLQQRTFLLSYNQNGTITDAVDCSLDPLSETKCTLKSLTVEKGIYQTSNFRVQPTISIVRFPNITNLCPFGEVFNASKFASVYAWNRKRISNCVADYSVLYNSTSFSTFKCYGVSPTKLNDLCFTNVYADSFVVKGDEVRQIAPGQTGVIADYNYKLPDDFTGCVIAWNSVKQDALTGGNYGYLYRLFRKSKLKPFERDISTEIYQAGSTPCNGQVGLNCYYPLERYGFHPTTGVNYQPFRVVVLSFELLNGPATVCGPKLSTTLVKDKCVNFNFNGLTGTGVLTTSKKQFLPFQQFGRDISDTTDAVRDPQTLEILDITPCSFGGVSVITPGTNTSNQVAVLYQDVNCTEVPMAIHAEQLTPAWRVYSAGANVFQTRAGCLVGAEHVNNSYECDIPVGAGICASYHSMSSLRSVNQRSIIAYTMSLGAENSVAYSNNSIAIPTNFTISVTTEILPVSMTKTSVDCTMYICGDSIECSNLLLQYGSFCTQLNRALTGIAVEQDKNTQEVFAQVKQIYKTPPIKDFGGFNFSQILPDPSKPSKRSFIEDLLFNKVTLADAGFIKQYGDCLGDIAARDLICAQKFNGLTVLPPLLTDEMIAQYTSALLAGTITSGWWFGAGAALQIPFAMQMAYRFNGIGVTQNVLYENQKLIANQFNSAIGKIQDSLSSTASALGKLQDVVNQNAQALNTLVKQLSSNFGAISSVLNDILSRLDPPEAEVQIDRLITGRLQSLQTYVTQQLIRAAEIRWSANLAATKMSECVLGQSKRVDFCGKGYHLMSFPQSAPHGVVFLHVTYVPAQEKNFTTAPAICHEGKAHFPREGVFVSNGTHWFITQRNFYEPQIITTDNTFVSGSCDVVIGIVNNTVYDPLQPELDSGGSGYIPEAPRDGQAYVRKDGEWVLLSTFL

SEQ ID NO: 9852 - protein, 1171 aa, Artificial Sequence
  SARS-CoV-2/pangolin/Guangxi/P5L/2017__EPI_ISL_410540 spike protein (1-1141)(K980P_V981P_T881W_A1014W) Foldon construct
MFVFLFVLPLVSSQCVNLTTRTGIPPGYTNSSTRGVYYPDKVFRSSILHLTQDLFLPFFSNVTWFNTINYQGGFKKFDNPVLPFNDGVYFASTEKSNIIRGWIFGTTLDARTQSLLIVNNATNVVIKVCEFQFCTDPFLGVYYHNNNKTWVENEFRVYSSANNCTFEYISQPFLMDLEGKQGNFKNLREFVFKNVDGYFKIYSKHTPIDLVRDLPRGFAALEPLVDLPIGINITRFQTLLALHRSYLTPGKLESGWTTGAAAYYVGYLQQRTFLLSYNQNGTITDAVDCSLDPLSETKCTLKSLTVEKGIYQTSNFRVQPTISIVRFPNITNLCPFGEVFNASKFASVYAWNRKRISNCVADYSVLYNSTSFSTFKCYGVSPTKLNDLCFTNVYADSFVVKGDEVRQIAPGQTGVIADYNYKLPDDFTGCVIAWNSVKQDALTGGNYGYLYRLFRKSKLKPFERDISTEIYQAGSTPCNGQVGLNCYYPLERYGFHPTTGVNYQPFRVVVLSFELLNGPATVCGPKLSTTLVKDKCVNFNFNGLTGTGVLTTSKKQFLPFQQFGRDISDTTDAVRDPQTLEILDITPCSFGGVSVITPGTNTSNQVAVLYQDVNCTEVPMAIHAEQLTPAWRVYSAGANVFQTRAGCLVGAEHVNNSYECDIPVGAGICASYHSMSSFRSVNQRSIIAYTMSLGAENSVAYSNNSIAIPTNFTISVTTEILPVSMTKTSVDCTMYICGDSIECSNLLLQYGSFCTQLNRALTGIAVEQDKNTQEVFAQVKQIYKTPPIKDFGGFNFSQILPDPSKPSKRSFIEDLLFNKVTLADAGFIKQYGDCLGDIAARDLICAQKFNGLTVLPPLLTDEMIAQYTSALLAGTITSGWWFGAGAALQIPFAMQMAYRFNGIGVTQNVLYENQKLIANQFNSAIGKIQDSLSSTASALGKLQDVVNQNAQALNTLVKQLSSNFGAISSVLNDILSRLDPPEAEVQIDRLITGRLQSLQTYVTQQLIRAAEIRWSANLAATKMSECVLGQSKRVDFCGKGYHLMSFPQSAPHGVVFLHVTYVPAQEKNFTTAPAICHEGKAHFPREGVFVSNGTHWFITQRNFYEPQIITTDNTFVSGSCDVVIGIVNNTVYDPLQPELDSGGSGYIPEAPRDGQAYVRKDGEWVLLSTFL

SEQ ID NO: 9853 - protein, 1171 aa, Artificial Sequence
  SARS-CoV-2/pangolin/Guangxi/P5E/2017__EPI_ISL_410541 spike protein (1-1141)(K980P_V981P_T881W_A1014W) Foldon construct
MFVFLFVLPLVSSQCVNLTTRTGIPPGYTNSSTRGVYYPDKVFRSSILHLTQDLFLPFFSNVTWFNTITYQGGSKKFDNPVLPFNDGVYFASTEKSNIIRGWIFGTTLDARTQSLLIVNNATNVVIKVCEFQFCTDPFLGVYYHNNNKTWVENEFRVYSSANNCTFEYISQPFLMDLEGKQGNFKNLREFVFKNVDGYFKIYSKHTPIDLVRDLPRGFAALEPLVDLPIGINITRFQTLLALHRSYLTPGKLESGWTTGAAAYYVGYLQQRTFLLSYNQNGTITDAVDCSLDPLSETKCTLKSLTVEKGIYQTSNFRVQPTISIVRFPNITNLCPFGEVFNASKFASVYAWNRKRISNCVADYSVLYNSTSFSTFKCYGVSPTKLNDLCFTNVYADSFVVKGDEVRQIAPGQTGVIADYNYKLPDDFTGCVIAWNSVKQDALTGDNYGYLYRLFRKSKLKPFERDISTEIYQAGSTPCNGQVGLNCYYPLERYGFHPTTGVNYQPFRVVVLSFELLNGPATVCGPKLSTTLVKDKCVNFNFNGLTGTGVLTTSKKQFLPFQQFGRDISDTTDAVRDPQTLEILDITPCSFGGVSVITPGTNTSNQVAVLYQDVNCTEVPMAIHAEQLTPAWRVYSAGANVFQTRAGCLVGAEHVNNSYECDIPVGAGICASYHSMSSFRSVNQRSIIAYTMSLGAENSVAYSNNSIAIPTNFTISVTTEILPVSMTKTSVDCTMYICGDSIECSNLLLQYGSFCTQLNRALTGIAVEQDKNTQEVFAQVKQIYKTPPIKDFGGFNFSQILPDPSKPSKRSFIEDLLFNKVTLADAGFIKQYGDCLGDIAARDLICAQKFNGLTVLPPLLTDEMIAQYTSALLAGTITSGWWFGAGAALQIPFAMQMAYRFNGIGVTQNVLYENQKLIANQFNSAIGKIQDSLSSTASALGKLQDVVNQNAQALNTLVKQLSSNFGAISSVLNDILSRLDPPEAEVQIDRLITGRLQSLQTYVTQQLIRAAEIRWSANLAATKMSECVLGQSKRVDFCGKGYHLMSFPQSAPHGVVFLHVTYVPAQEKNFTTAPAICHEGKAHFPREGVFVSNGTHWFITQRNFYEPQIITTDNTFVSGSCDVVIGIVNNTVYDPLQPELDSGGSGYIPEAPRDGQAYVRKDGEWVLLSTFL

SEQ ID NO: 9854 - protein, 1169 aa, Artificial Sequence
  SARS-CoV-2/pangolin/Guangxi/P1E/2017__EPI_ISL_410539 spike protein (1-1139)(K978P_V979P_T879W_A1012W) Foldon construct
MFVFLFVLPLVSSQCVNLTTRTGIQPGYTNSSTRGVYYPDKVFRSSILHLTQDLFLPFFSNVTWFNTINYQGGFKKFDNPVLPFNDGVYFASTEKSNIIRGWIFGTTLDARTQSLLIVNNATNVVIKVCEFQFCTDPFLGVYYHNNNKTWVENEFRVYSSANNCTFEYISQPFLMDLEGKQGNFKNLREFVFKNVDGYFKIYSKHTPIDLVRDLPRGFAALEPLVDLPIGINITRFQTLLALHRSYLTPGKLESGWTTGAAAYYVGYLQQRTFLLSYNQNGTITDAVDCSLDPLSETKCTLKSLTVEKGIYQTSNFRVQPTISIVRFPNITNLCPFGEVFNASKFASVYAWNRKRISNCVADYSVLYNSTSFSTFKCYGVSPTKLNDLCFTNVYADSFVVKGDEVRQIAPGQTGVIADYNYKLPDDFTGCVIAWNSVKQDALTGGNYLYRLFRKSKLKPFERDISTEIYQAGSTPCNGQVGLNCYYPLERYGFHPTTGVNYQPFRVVVLSFELLNGPATVCGPKLSTTLVKDKCVNFNFNGLTGTGVLTTSKKQFLPFQQFGRDISDTTDAVRDPQTLEILDITPCSFGGVSVITPGTNTSNQVAVLYQDVNCTEVPMAIHAEQLTPAWRVYSAGANVFQTRAGCLVGAEHVNNSYECDIPVGAGICASYHSMSSLRSVNQRSIIAYTMSLGAENSVAYSNNSIAIPTNFTISVTTEILPVSMTKTSVDCTMYICGDSIECSNLLLQYGSFCTQLNRALTGIAVEQDKNTQEVFAQVKQIYKTPPIKDFGGFNFSQILPDPSKPSKRSFIEDLLFNKVTLADAGFIKQYGDCLGDIAARDLICAQKFNGLTVLPPLLTDEMIAQYTSALLAGTITSGWWFGAGAALQIPFAMQMAYRFNGIGVTQNVLYENQKLIANQFNSAIGKIQDSLSSTASALGKLQDVVNQNAQALNTLVKQLSSNFGAISSVLNDILSRLDPPEAEVQIDRLITGRLQSLQTYVTQQLIRAAEIRWSANLAATKMSECVLGQSKRVDFCGKGYHLMSFPQSAPHGVVFLHVTYVPAQEKNFTTAPAICHEGKAHFPREGVFVSNGTHWFITQRNFYEPQIITTDNTFVSGSCDVVIGIVNNTVYDPLQPELDSGGSGYIPEAPRDGQAYVRKDGEWVLLSTFL

SEQ ID NO: 9855 - protein, 1177 aa, Artificial Sequence
  SARS-CoV-2/Wuhan/WIV05/2019__EPI_ISL_402128 spike protein (1-1147)(K986P_V987P_P1069F) Foldon construct
MFVFLVLLPLVSSQCVNLTTRTQLPPAYTNSFTRGVYYPDKVFRSSVLHSTQDLFLPFFSNVTWFHAIHVSGTNGTKRFDNPVLPFNDGVYFASTEKSNIIRGWIFGTTLDSKTQSLLIVNNATNVVIKVCEFQFCNDPFLGVYYHKNNKSWMESEFRVYSSANNCTFEYVSQPFLMDLEGKQGNFKNLREFVFKNIDGYFKIYSKHTPINLVRDLPQGFSALEPLVDLPIGINITRFQTLLALHRSYLTPGDSSSGWTAGAAAYYVGYLQPRTFLLKYNENGTITDAVDCALDPLSETKCTLKSFTVEKGIYQTSNFRVQPTESIVRFPNITNLCPFGEVFNATRFASVYAWNRKRISNCVADYSVLYNSASFSTFKCYGVSPTKLNDLCFTNVYADSFVIRGDEVRQIAPGQTGKIADYNYKLPDDFTGCVIAWNSNNLDSKVGGNYNYLYRLFRKSNLKPFERDISTEIYQAGSTPCNGVEGFNCYFPLQSYGFQPTNGVGYQPYRVVVLSFELLHAPATVCGPKKSTNLVKNKCVNFNFNGLTGTGVLTESNKKFLPFQQFGRDIADTTDAVRDPQTLEILDITPCSFGGVSVITPGTNTSNQVAVLYQDVNCTEVPVAIHADQLTPTWRVYSTGSNVFQTRAGCLIGAEHVNNSYECDIPIGAGICASYQTQTNSPRRARSVASQSIIAYTMSLGAENSVAYSNNSIAIPTNFTISVTTEILPVSMTKTSVDCTMYICGDSTECSNLLLQYGSFCTQLNRALTGIAVEQDKNTQEVFAQVKQIYKTPPIKDFGGFNFSQILPDPSKPSKRSFIEDLLFNKVTLADAGFIKQYGDCLGDIAARDLICAQKFNGLTVLPPLLTDEMIAQYTSALLAGTITSGWTFGAGAALQIPFAMQMAYRFNGIGVTQNVLYENQKLIANQFNSAIGKIQDSLSSTASALGKLQDVVNQNAQALNTLVKQLSSNFGAISSVLNDILSRLDPPEAEVQIDRLITGRLQSLQTYVTQQLIRAAEIRASANLAATKMSECVLGQSKRVDFCGKGYHLMSFPQSAPHGVVFLHVTYVFAQEKNFTTAPAICHDGKAHFPREGVFVSNGTHWFVTQRNFYEPQIITTDNTFVSGNCDVVIGIVNNTVYDPLQPELDSGGSGYIPEAPRDGQAYVRKDGEWVLLSTFL

SEQ ID NO: 9856 - protein, 1173 aa, Artificial Sequence
  SARS-CoV-2/bat/Yunnan/RaTG13/2013__EPI_ISL_402131 spike protein (1-1143)(K982P_V983P_P1065F) Foldon construct
MFVFLVLLPLVSSQCVNLTTRTQLPPAYTNSSTRGVYYPDKVFRSSVLHLTQDLFLPFFSNVTWFHAIHVSGTNGIKRFDNPVLPFNDGVYFASTEKSNIIRGWIFGTTLDSKTQSLLIVNNATNVVIKVCEFQFCNDPFLGVYYHKNNKSWMESEFRVYSSANNCTFEYVSQPFLMDLEGKQGNFKNLREFVFKNIDGYFKIYSKHTPINLVRDLPPGFSALEPLVDLPIGINITRFQTLLALHRSYLTPGDSSSGWTAGAAAYYVGYLQPRTFLLKYNENGTITDAVDCALDPLSETKCTLKSFTVEKGIYQTSNFRVQPTDSIVRFPNITNLCPFGEVFNATTFASVYAWNRKRISNCVADYSVLYNSTSFSTFKCYGVSPTKLNDLCFTNVYADSFVITGDEVRQIAPGQTGKIADYNYKLPDDFTGCVIAWNSKHIDAKEGGNFNYLYRLFRKANLKPFERDISTEIYQAGSKPCNGQTGLNCYYPLYRYGFYPTDGVGHQPYRVVVLSFELLNAPATVCGPKKSTNLVKNKCVNFNFNGLTGTGVLTESNKKFLPFQQFGRDIADTTDAVRDPQTLEILDITPCSFGGVSVITPGTNASNQVAVLYQDVNCTEVPVAIHADQLTPTWRVYSTGSNVFQTRAGCLIGAEHVNNSYECDIPIGAGICASYQTQTNSRSVASQSIIAYTMSLGAENSVAYSNNSIAIPTNFTISVTTEILPVSMTKTSVDCTMYICGDSTECSNLLLQYGSFCTQLNRALTGIAVEQDKNTQEVFAQVKQIYKTPPIKDFGGFNFSQILPDPSKPSKRSFIEDLLFNKVTLADAGFIKQYGDCLGDIAARDLICAQKFNGLTVLPPLLTDEMIAQYTSALLAGTITSGWTFGAGAALQIPFAMQMAYRFNGIGVTQNVLYENQKLIANQFNSAIGKIQDSLSSTASALGKLQDVVNQNAQALNTLVKQLSSNFGAISSVLNDILSRLDPPEAEVQIDRLITGRLQSLQTYVTQQLIRAAEIRASANLAATKMSECVLGQSKRVDFCGKGYHLMSFPQSAPHGVVFLHVTYVFAQEKNFTTAPAICHDGKAHFPREGVFVSNGTHWFVTQRNFYEPQIITTDNTFVSGSCDVVIGIVNNTVYDPLQPELDSGGSGYIPEAPRDGQAYVRKDGEWVLLSTFL

SEQ ID NO: 9857 - protein, 1177 aa, Artificial Sequence
  SARS-CoV-2/Wuhan/HBCDC-HB-01/2019__EPI_ISL_402132 spike protein (1-1147)(K986P_V987P_P1069F) Foldon construct
MFVFLVLLPLVSSQCVNLTTRTQLPPAYTNSITRGVYYPDKVFRSSVLHSTQDLFLPFFSNVTWFHAIHVSGTNGTKRFDNPVLPFNDGVYFASTEKSNIIRGWIFGTTLDSKTQSLLIVNNATNVVIKVCEFQFCNDPFLGVYYHKNNKSWMESEFRVYSSANNCTFEYVSQPFLMDLEGKQGNFKNLREFVFKNIDGYFKIYSKHTPINLVRDLPQGFSALEPLVDLPIGINITRFQTLLALHRSYLTPGDSSSGWTAGAAAYYVGYLQPRTFLLKYNENGTITDAVDCALDPLSETKCTLKSFTVEKGIYQTSNFRVQPTESIVRFPNITNLCPFGEVFNATRFASVYAWNRKRISNCVADYSVLYNSASFSTFKCYGVSPTKLNDLCFTNVYADSFVIRGDEVRQIAPGQTGKIADYNYKLPDDFTGCVIAWNSNNLDSKVGGNYNYLYRLFRKSNLKPFERDISTEIYQAGSTPCNGVEGFNCYFPLQSYGFQPTNGVGYQPYRVVVLSFELLHAPATVCGPKKSTNLVKNKCVNFNFNGLTGTGVLTESNKKFLPFQQFGRDIADTTDAVRDPQTLEILDITPCSFGGVSVITPGTNTSNQVAVLYQDVNCTEVPVAIHADQLTPTWRVYSTGSNVFQTRAGCLIGAEHVNNSYECDIPIGAGICASYQTQTNSPRRARSVASQSIIAYTMSLGAENSVAYSNNSIAIPTNFTISVTTEILPVSMTKTSVDCTMYICGDSTECSNLLLQYGSFCTQLNRALTGIAVEQDKNTQEVFAQVKQIYKTPPIKDFGGFNFSQILPDPSKPSKRSFIEDLLFNKVTLADAGFIKQYGDCLGDIAARDLICAQKFNGLTVLPPLLTDEMIAQYTSALLAGTITSGWTFGAGAALQIPFAMQMAYRFNGIGVTQNVLYENQKLIANQFNSAIGKIQDSLSSTASALGKLQDVVNQNAQALNTLVKQLSSNFGAISSVLNDILSRLDPPEAEVQIDRLITGRLQSLQTYVTQQLIRAAEIRASANLAATKMSECVLGQSKRVDFCGKGYHLMSFPQSAPHGVVFLHVTYVFAQEKNFTTAPAICHDGKAHFPREGVFVSNGTHWFVTQRNFYEPQIITTDNTFVSGNCDVVIGIVNNTVYDPLQPELDSGGSGYIPEAPRDGQAYVRKDGEWVLLSTFL

SEQ ID NO: 9858 - protein, 1177 aa, Artificial Sequence
  SARS-CoV-2/Guangdong/20SF028/2020__EPI_ISL_403936 spike protein (1-1147)(K986P_V987P_P1069F) Foldon construct
MFVFLVLLPLVSSQCVNLTTRTQLPPAYTNSFTRGVYYPDKVFRSSVLYSTQDLFLPFFSNVTWFHAIHVSGTNGTKRFDNPVLPFNDGVYFASTEKSNIIRGWIFGTTLDSKTQSLLIVNNATNVVIKVCEFQFCNDPFLGVYYHKNNKSWMESEFRVYSSANNCTFEYVSQPFLMDLEGKQGNFKNLREFVFKNIDGYFKIYSKHTPINLVRDLPQGFSALEPLVDLPIGINITRFQTLLALHRSYLTPGDSSSGWTAGAAAYYVGYLQPRTFLLKYNENGTITDAVDCALDPLSETKCTLKSFTVEKGIYQTSNFRVQPTESIVRFPNITNLCPFGEVFNATRFASVYAWNRKRISNCVADYSVLYNSASFSTFKCYGVSPTKLNDLCFTNVYADSFVIRGDEVRQIAPGQTGKIADYNYKLPDDFTGCVIAWNSNNLDSKVGGNYNYLYRLFRKSNLKPFERDISTEIYQAGSTPCNGVEGFNCYFPLQSYGFQPTNGVGYQPYRVVVLSFELLHAPATVCGPKKSTNLVKNKCVNFNFNGLTGTGVLTESNKKFLPFQQFGRDIADTTDAVRDPQTLEILDITPCSFGGVSVITPGTNTSNQVAVLYQDVNCTEVPVAIHADQLTPTWRVYSTGSNVFQTRAGCLIGAEHVNNSYECDIPIGAGICASYQTQTNSPRRARSVASQSIIAYTMSLGAENSVAYSNNSIAIPTNFTISVTTEILPVSMTKTSVDCTMYICGDSTECSNLLLQYGSFCTQLNRALTGIAVEQDKNTQEVFAQVKQIYKTPPIKDFGGFNFSQILPDPSKPSKRSFIEDLLFNKVTLADAGFIKQYGDCLGDIAARDLICAQKFNGLTVLPPLLTDEMIAQYTSALLAGTITSGWTFGAGAALQIPFAMQMAYRFNGIGVTQNVLYENQKLIANQFNSAIGKIQDSLSSTASALGKLQDVVNQNAQALNTLVKQLSSNFGAISSVLNDILSRLDPPEAEVQIDRLITGRLQSLQTYVTQQLIRAAEIRASANLAATKMSECVLGQSKRVDFCGKGYHLMSFPQSAPHGVVFLHVTYVFAQEKNFTTAPAICHDGKAHFPREGVFVSNGTHWFVTQRNFYEPQIITTDNTFVSGNCDVVIGIVNNTVYDPLQPELDSGGSGYIPEAPRDGQAYVRKDGEWVLLSTFL

SEQ ID NO: 9859 - protein, 1177 aa, Artificial Sequence
  SARS-CoV-2/Shenzhen/SZTH-001/2020__EPI_ISL_406592 spike protein (1-1147)(K986P_V987P_P1069F) Foldon construct
MFVFLVLLPLVSSQCVNLTTRTQLPPAYTNSFTRGVYYPDKVFRSSVLHSTQDLFLPFFSNVTWFHAIHVSGTNGTKRFDNPVLPFNDGVYFASTEKSNIIRGWIFGTTLDSKTQSLLIVNNATNVVIKVCEFQFCNDPFLGVYYHKNNKSWMESEFRVYSSANNCTFEYVSQPFLMDLEGKQGNFKNLREFVFKNIDGYFKIYSKHTPINLVRDLPQGFSALEPLVDLPIGINITRFQTLLALHRSYLTPGDSSSGWTAGAAAYYVGYLQPRTFLLKYNENGTITDAVDCALDPLSETKCTLKSFTVEKGIYQTSNFRVQPTESIVRFPNITNLCPFGEVFNATRFASVYAWNRKRISNCVADYSVLYNSASFSTFKCYGVSPTKLNDLCFTNVYADSFVIRGDEVRQIAPGQTGKIADYNYKLPDDFTGCVIAWNSNNLDSKVGGNYNYLYRLFRKSNLKPFERDISTEIYQAGSTPCNGVEGFNCYFPLQSYGFQPTNGVGYQPYRVVVLSFELLHAPATVCGPKKSTNLVKNKCVNFNFNGLTGTGVLTESNKKFLPFQQFGRDIADTTDAVRDPQTLEILDITPCSFGGVSVITPGTNTSNQVAVLYQDVNCTEVPVAIHADQLTPTWRVYSTGSNVFQTRAGCLIGAEHVNNSYECDIPIGAGICASYQTQTNSPRRARSVASQSIIAYTMSLGAENSVAYSNNSIAIPTNFTISVTTEILPVSMTKTSVDCTMYICGDSTECSNLLLQYGSFCTQLNRALTGIAVEQDKNTQEVFAQVKQIYKTPPIKDFGGFNFSQILPDPSKPSKRSFIEDLLFNKVTLADAGFIKQYGDCLGDIAARDLICAQKFNGLTVLPPLLTDEMIAQYTSALLAGTITSGWTFGAGAALQIPFAMQMAYRFNGIGVTQNVLYENQKLIANQFNSAIGKIQDSLSSTASALGKLQDVVNQNAQALNTLVKQLSSNFGAISSVLNDILSRLDPPEAEVQIDRLITGRLQSLQTYVTQQLIRAAEIRASANLAATKMSECVLGQSKRVDFCGKGYHLMSFPQSAPHGVVFLHVTYVFAQEKNFTTAPAICHDGKAHFPREGVFVSNGTHWFVTQRNFYEPQIITTDNTFVSGNCDVLIGIVNNTVYDPLQPELDSGGSGYIPEAPRDGQAYVRKDGEWVLLSTFL

SEQ ID NO: 9860 - protein, 1177 aa, Artificial Sequence
  SARS-CoV-2/Shenzhen/SZTH-004/2020__EPI_ISL_406595 spike protein (1-1147)(K986P_V987P_P1069F) Foldon construct
MFVFLVLLPLVSSQCVNLTTRTQLPPAYTNSFTRGVYYPDKVFRSSVLHSTQDLFLPFFSNVTWFHAIHVSGTNGTKRFDNPVLPFNDGVYFASTEKSNIIRGWIFGTTLDSKTQSLLIVNNATNVVIKVCEFQFCNDPFLGVYYHKNNKSWMESEFRVYSSANNCTFEYVSQPFLMDLEGKQGNFKNLREFVFKNIDGYFKIYSKHTPINLVRDLPQGFSALEPLVDLPIGINITRFQTLLALHRSYLTPGDSSSGWTAGAAAYYVGYLQPRTFLLKYNENGTITDAVDCALDPLSETKCTLKSFTVEKGIYQTSNFRVQPTESIVRFPNITNLCPFGEVFNATRFASVYAWDRKRISNCVAYYSVLYNSASFSTFKCYGVSPTKLNDLCFTNVYADSFVIRGDEVRQIAPGQTGKIADYNYKLPDDFTGCVIAWNSNNLDSKVGGNYNYLYRLFRKSNLKPFERDISTEIYQAGSTPCNGVEGFNCYFPLQSYGFQPTNGVGYQPYRVVVLSFELLHAPATVCGPKKSTNLVKNKCVNFNFNGLTGTGVLTESNKKFLPFQQFGRDIADTTDAVRDPQTLEILDITPCSFGGVSVITPGTNTSNQVAVLYQDVNCTEVPVAIHADQLTPTWRVYSTGSNVFQTRAGCLIGAEHVNNSYECDIPIGAGICASYQTQTNSPRRARSVASQSIIAYTMSLGAENSVAYSNNSIAIPTNFTISVTTEILPVSMTKTSVDCTMYICGDSTECSNLLLQYGSFCTQLNRALTGIAVEQDKNTQEVFAQVKQIYKTPPIKDFGGFNFSQILPDPSKPSKRSFIEDLLFNKVTLADAGFIKQYGDCLGDIAARDLICAQKFNGLTVLPPLLTDEMIAQYTSALLAGTITSGWTFGAGAALQIPFAMQMAYRFNGIGVTQNVLYENQKLIANQFNSAIGKIQDSLSSTASALGKLQDVVNQNAQALNTLVKQLSSNFGAISSVLNDILSRLDPPEAEVQIDRLITGRLQSLQTYVTQQLIRAAEIRASANLAATKMSECVLGQSKRVDFCGKGYHLMSFPQSAPHGVVFLHVTYVFAQEKNFTTAPAICHDGKAHFPREGVFVSNGTHWFVTQRNFYEPQIITTDNTFVSGNCDVVIGIVNNTVYDPLQPELDSGGSGYIPEAPRDGQAYVRKDGEWVLLSTFL

SEQ ID NO: 9861 - protein, 1177 aa, Artificial Sequence
  SARS-CoV-2/France/IDF0372/2020__EPI_ISL_406596 spike protein (1-1147)(K986P_V987P_P1069F) Foldon construct
MFVFLVLLPLVSSQCVNLTTRTQLPPAYTNSFTRGVYYPDKVFRSSVLHSTQDLFLPFFSNVTWFHAIHVSGTNGTKRFDNPVLPFNDGVYFASTEKSNIIRGWIFGTTLDSKTQSLLIVNNATNVVIKVCEFQFCNDPFLGVYYHKNNKSWMESEFRVYSSANNCTFEYVSQPFLMDLEGKQGNFKNLREFVFKNIDGYFKIYSKHTPINLVRDLPQGFSALEPLVDLPIGINITRFQTLLALHRSYLTPGDSSSGWTAGAAAYYVGYLQPRTFLLKYNENGTITDAVDCALDPLSETKCTLKSFTVEKGIYQTSNFRVQPTESIVRFPNITNLCPFGEVFNATRFASVYAWNRKRISNCVADYSFLYNSASFSTFKCYGVSPTKLNDLCFTNVYADSFVIRGDEVRQIAPGQTGKIADYNYKLPDDFTGCVIAWNSNNLDSKVGGNYNYLYRLFRKSNLKPFERDISTEIYQAGSTPCNGVEGFNCYFPLQSYGFQPTNGVGYQPYRVVVLSFELLHAPATVCGPKKSTNLVKNKCVNFNFNGLTGTGVLTESNKKFLPFQQFGRDIADTTDAVRDPQTLEILDITPCSFGGVSVITPGTNTSNQVAVLYQDVNCTEVPVAIHADQLTPTWRVYSTGSNVFQTRAGCLIGAEHVNNSYECDIPIGAGICASYQTQTNSPRRARSVASQSIIAYTMSLGAENSVAYSNNSIAIPTNFTISVTTEILPVSMTKTSVDCTMYICGDSTECSNLLLQYGSFCTQLNRALTGIAVEQDKNTQEVFAQVKQIYKTPPIKDFGGFNFSQILPDPSKPSKRSFIEDLLFNKVTLADAGFIKQYGDCLGDIAARDLICAQKFNGLTVLPPLLTDEMIAQYTSALLAGTITSGWTFGAGAALQIPFAMQMAYRFNGIGVTQNVLYENQKLIANQFNSAIGKIQDSLSSTASALGKLQDVVNQNAQALNTLVKQLSSNFGAISSVLNDILSRLDPPEAEVQIDRLITGRLQSLQTYVTQQLIRAAEIRASANLAATKMSECVLGQSKRVDFCGKGYHLMSFPQSAPHGVVFLHVTYVFAQEKNFTTAPAICHDGKAHFPREGVFVSNGTHWFVTQRNFYEPQIITTDNTFVSGNCDVVIGIVNNTVYDPLQPELDSGGSGYIPEAPRDGQAYVRKDGEWVLLSTFL

SEQ ID NO: 9862 - protein, 1177 aa, Artificial Sequence
  SARS-CoV-2/Australia/VIC01/2020__EPI_ISL_406844 spike protein (1-1147)(K986P_V987P_P1069F) Foldon construct
MFVFLVLLPLVSSQCVNLTTRTQLPPAYTNSFTRGVYYPDKVFRSSVLHSTQDLFLPFFSNVTWFHAIHVSGTNGTKRFDNPVLPFNDGVYFASTEKSNIIRGWIFGTTLDSKTQSLLIVNNATNVVIKVCEFQFCNDPFLGVYYHKNNKSWMESEFRVYSSANNCTFEYVSQPFLMDLEGKQGNFKNLREFVFKNIDGYFKIYSKHTPINLVRDLPQGFSALEPLVDLPIGINITRFQTLLALHRRYLTPGDSSSGWTAGAAAYYVGYLQPRTFLLKYNENGTITDAVDCALDPLSETKCTLKSFTVEKGIYQTSNFRVQPTESIVRFPNITNLCPFGEVFNATRFASVYAWNRKRISNCVADYSVLYNSASFSTFKCYGVSPTKLNDLCFTNVYADSFVIRGDEVRQIAPGQTGKIADYNYKLPDDFTGCVIAWNSNNLDSKVGGNYNYLYRLFRKSNLKPFERDISTEIYQAGSTPCNGVEGFNCYFPLQSYGFQPTNGVGYQPYRVVVLSFELLHAPATVCGPKKSTNLVKNKCVNFNFNGLTGTGVLTESNKKFLPFQQFGRDIADTTDAVRDPQTLEILDITPCSFGGVSVITPGTNTSNQVAVLYQDVNCTEVPVAIHADQLTPTWRVYSTGSNVFQTRAGCLIGAEHVNNSYECDIPIGAGICASYQTQTNSPRRARSVASQSIIAYTMSLGAENSVAYSNNSIAIPTNFTISVTTEILPVSMTKTSVDCTMYICGDSTECSNLLLQYGSFCTQLNRALTGIAVEQDKNTQEVFAQVKQIYKTPPIKDFGGFNFSQILPDPSKPSKRSFIEDLLFNKVTLADAGFIKQYGDCLGDIAARDLICAQKFNGLTVLPPLLTDEMIAQYTSALLAGTITSGWTFGAGAALQIPFAMQMAYRFNGIGVTQNVLYENQKLIANQFNSAIGKIQDSLSSTASALGKLQDVVNQNAQALNTLVKQLSSNFGAISSVLNDILSRLDPPEAEVQIDRLITGRLQSLQTYVTQQLIRAAEIRASANLAATKMSECVLGQSKRVDFCGKGYHLMSFPQSAPHGVVFLHVTYVFAQEKNFTTAPAICHDGKAHFPREGVFVSNGTHWFVTQRNFYEPQIITTDNTFVSGNCDVVIGIVNNTVYDPLQPELDSGGSGYIPEAPRDGQAYVRKDGEWVLLSTFL

SEQ ID NO: 9863 - protein, 1177 aa, Artificial Sequence
  SARS-CoV-2/Germany/BavPat1/2020__EPI_ISL_406862 spike protein (1-1147)(K986P_V987P_P1069F) Foldon construct
MFVFLVLLPLVSSQCVNLTTRTQLPPAYTNSFTRGVYYPDKVFRSSVLHSTQDLFLPFFSNVTWFHAIHVSGTNGTKRFDNPVLPFNDGVYFASTEKSNIIRGWIFGTTLDSKTQSLLIVNNATNVVIKVCEFQFCNDPFLGVYYHKNNKSWMESEFRVYSSANNCTFEYVSQPFLMDLEGKQGNFKNLREFVFKNIDGYFKIYSKHTPINLVRDLPQGFSALEPLVDLPIGINITRFQTLLALHRSYLTPGDSSSGWTAGAAAYYVGYLQPRTFLLKYNENGTITDAVDCALDPLSETKCTLKSFTVEKGIYQTSNFRVQPTESIVRFPNITNLCPFGEVFNATRFASVYAWNRKRISNCVADYSVLYNSASFSTFKCYGVSPTKLNDLCFTNVYADSFVIRGDEVRQIAPGQTGKIADYNYKLPDDFTGCVIAWNSNNLDSKVGGNYNYLYRLFRKSNLKPFERDISTEIYQAGSTPCNGVEGFNCYFPLQSYGFQPTNGVGYQPYRVVVLSFELLHAPATVCGPKKSTNLVKNKCVNFNFNGLTGTGVLTESNKKFLPFQQFGRDIADTTDAVRDPQTLEILDITPCSFGGVSVITPGTNTSNQVAVLYQGVNCTEVPVAIHADQLTPTWRVYSTGSNVFQTRAGCLIGAEHVNNSYECDIPIGAGICASYQTQTNSPRRARSVASQSIIAYTMSLGAENSVAYSNNSIAIPTNFTISVTTEILPVSMTKTSVDCTMYICGDSTECSNLLLQYGSFCTQLNRALTGIAVEQDKNTQEVFAQVKQIYKTPPIKDFGGFNFSQILPDPSKPSKRSFIEDLLFNKVTLADAGFIKQYGDCLGDIAARDLICAQKFNGLTVLPPLLTDEMIAQYTSALLAGTITSGWTFGAGAALQIPFAMQMAYRFNGIGVTQNVLYENQKLIANQFNSAIGKIQDSLSSTASALGKLQDVVNQNAQALNTLVKQLSSNFGAISSVLNDILSRLDPPEAEVQIDRLITGRLQSLQTYVTQQLIRAAEIRASANLAATKMSECVLGQSKRVDFCGKGYHLMSFPQSAPHGVVFLHVTYVFAQEKNFTTAPAICHDGKAHFPREGVFVSNGTHWFVTQRNFYEPQIITTDNTFVSGNCDVVIGIVNNTVYDPLQPELDSGGSGYIPEAPRDGQAYVRKDGEWVLLSTFL

SEQ ID NO: 9864 - protein, 1177 aa, Artificial Sequence
  SARS-CoV-2/Wuhan/HBCDC-HB-02/2020__EPI_ISL_412978 spike protein (1-1147)(K986P_V987P_P1069F) Foldon construct
MFVFLVLLPLVSSQCVNLTTRTQLPPAYTNSFTRGVYYPDKVFRSSVLHSTQDLFLPFFSNVTWFHAIHVSGTNGTKRFDNPVLPFNDGVYFASTEKSNIIRGWIFGTTLDSKTQSLLIVNNATNVVIKVCEFQFCNDPFLGVYYHKNNKSWMESEFRVYSSANNCTFEYVSQPFLMDLEGKQGNFKNLREFVFKNIDGYFKIYSKHTPINLVRDLPQGFSALEPLVDLPIGINITRFQTLLALHRSYLTPGDSSSGWTAGAAAYYVGYLQPRTFLLKYNENGTITDAVDCALDPLSETKCTLKSFTVEKGIYQTSNFRVQPTESIVRFPNITNLCPFGEVFNATRFASVYAWNRKRISNCVADYSVLYNSASFSTFKCYGVSPTKLNDLCFTNVYADSFVIRGDEVRQIAPGQTGKIADYNYKLPDDFTGCVIAWNSNNLDSKVGGNYNYLYRLFRKSNLKPFERDISTEIYQAGSTPCNGVEGFNCYFPLQSYGFQPTNGVGYQPYRVVVLSFELLHAPATVCGPKKSTNLVKNKCVNFNFNGLTGTGVLTESNKKFLPFQQFGRDIADTTDAVRDPQTLEILDITPCSFGGVSVITPGTNTSNQVAVLYQDVNCTEVPVAIHADQLTPTWRVYSTGSNVFQTRAGCLIGAEHVNNSYECDIPIGAGICASYQTQTNSPRRARSVASQSIIAYTMSLGAENSVAYSNNSIAIPTNFTISVTTEILPVSMTKTSVDCTMYICGDSTECSNFLLQYGSFCTQLNRALTGIAVEQDKNTQEVFAQVKQIYKTPPIKDFGGFNFSQILPDPSKPSKRSFIEDLLFNKVTLADAGFIKQYGDCLGDIAARDLICAQKFNGLTVLPPLLTDEMIAQYTSALLAGTITSGWTFGAGAALQIPFAMQMAYRFNGIGVTQNVLYENQKLIANQFNSAIGKIQDSLSSTASALGKLQDVVNQNAQALNTLVKQLSSNFGAISSVLNDILSRLDPPEAEVQIDRLITGRLQSLQTYVTQQLIRAAEIRASANLAATKMSECVLGQSKRVDFCGKGYHLMSFPQSAPHGVVFLHVTYVFAQEKNFTTAPAICHDGKAHFPREGVFVSNGTHWFVTQRNFYEPQIITTDNTFVSGNCDVVIGIVNNTVYDPLQPELDSGGSGYIPEAPRDGQAYVRKDGEWVLLSTFL

SEQ ID NO: 9865 - protein, 1177 aa, Artificial Sequence
  SARS-CoV-2/Australia/QLD02/2020__EPI_ISL_407896 spike protein (1-1147)(K986P_V987P_P1069F) Foldon construct
MFVFLVLLPLVSSQCVNLTTRTQLPPAYTNSFTRGVYYPDKVFRSSVLHSTQDLFLPFFSNVTWFHAIHVSGTNGTKRFDNPVLPFNDGVYFASTEKSNIIRGWIFGTTLDSKTQSLLIVNNATNVVIKVCEFQFCNDPFLGVYYHKNNKSWMESEFRVYSSANNCTFEYVSQPFLMDLEGKQGNFKNLREFVFKNIDGYFKIYSKHTPINLVRDLPQGFSALEPLVDLPIGINITRFQTLLALHRSYLTPGDSSSGWTAGAAAYYVGYLQPRTFLLKYNENGTITDAVDCALDPLSETKCTLKSFTVEKGIYQTSNFRVQPTESIVRFPNITNLCPFGEVFNATRFASVYAWNRKRISNCVADYSVLYNSASFSTFKCYGVSPTKLNDLCFTNVYADSFVIRGDEVRQIAPGQTGKIADYNYKLPDDFTGCVIAWNSNNLDSKVGGNYNYLYRLFRKSNLKPFERDISTEIYQAGSTPCNGVEGFNCYFPLQSYGFQPTNGVGYQPYRVVVLSFELLHAPATVCGPKKSTNLVKNKCVNFNFNGLTGTGVLTESNKKFLPFQQFGRDIADTTDAVRDPQTLEILDITPCSFGGVSVITPGTNTSNQVAVLYQDVNCTEVPVAIHADQLTPTWRVYSTGSNVFQTRAGCLIGAEHVNNSYECDIPIGAGICASYQTQTNSPRRARSVASQSIIAYTMSLGAENSVAYSNNSIAIPTNFTISVTTEILPVSMTKTSVDCTMYICGDSTECSNLLLQYGSFCTQLNRALTGIAVEQDKNTQEVFAQVKQIYKTPPIKDFGGFNFSQILPDPSKPSKRSFIEDLLFNKVTLADAGFIKQYGDCLGDIAARDLICAQKFNGLTVLPPLLTDEMIAQYTSALLAGTITSGWTFGAGAALQIPFAMQMAYRFNGIGVTQNVLYENQKLIANQFNSAIGKIQDSLSSTASALGKLQDVVNQNAQALNTLVKQLSSNFGAISSVLNDILSRLDPPEAEVQIDRLITGRLQSLQTYVTQQLIRAAEIRASANLAATKMSECVLGQSKRVDFCGKGYHLMSFPQSAPHGVVFLHVTYVFAQEKNFTTAPAICHDGKAHFPREGVFVSNGTHWFVTQRNFYEPQIITTDNTFVSGNCDVVIGIVNNTVYDPLQLELDSGGSGYIPEAPRDGQAYVRKDGEWVLLSTFL

SEQ ID NO: 9866 - protein, 1177 aa, Artificial Sequence
  SARS-CoV-2/India/1-31/2020__EPI_ISL_413523 spike protein (1-1147)(K986P_V987P_P1069F) Foldon construct
MFVFLVLLPLVSSQCVNLTTRTQLPPAYTNSFTRGVYYPDKVFRSSVLHSTQDLFLPFFSNVTWFHAIHVSGTNGTKRFDNPVLPFNDGVYFASTEKSNIIRGWIFGTTLDSKTQSLLIVNNATNVVIKVCEFQFCNDPFLGVYYHKNNKSWMESEFRVYSSANNCTFEYVSQPFLMDLEGKQGNFKNLREFVFKNIDGYFKIYSKHTPINLVRDLPQGFSALEPLVDLPIGINITRFQTLLALHRSYLTPGDSSSGWTAGAAAYYVGYLQPRTFLLKYNENGTITDAVDCALDPLSETKCTLKSFTVEKGIYQTSNFRVQPTESIVRFPNITNLCPFGEVFNATRFASVYAWNRKRISNCVADYSVLYNSASFSTFKCYGVSPTKLNDLCFTNVYADSFVIRGDEVRQIAPGQTGKIADYNYKLPDDFTGCVIAWNSNNLDSKVGGNYNYLYRLFRKSNLKPFERDISTEIYQAGSTPCNGVEGFNCYFPLQSYGFQPTNGVGYQPYRVVVLSFELLHAPATVCGPKKSTNLVKNKCVNFNFNGLTGTGVLTESNKKFLPFQQFGRDIADTTDAVRDPQTLEILDITPCSFGGVSVITPGTNTSNQVAVLYQDVNCTEVPVAIHADQLTPTWRVYSTGSNVFQTRAGCLIGAEHVNNSYECDIPIGAGICASYQTQTNSPRRARSVASQSIIAYTMSLGAENSVAYSNNSIAIPTNFTISVTTEILPVSMTKTSVDCTMYICGDSTECSNLLLQYGSFCTQLNRALTGIAVEQDKNTQEVFAQVKQIYKTPPIKDFGGFNFSQILPDPSKPSKRSFIEDLLFNKVTLADAGFIKQYGDCLGDIAARDLICAQKFNGLTVLPPLLTDEMIAQYTSALLAGTITSGWTFGAGAALQIPFAMQMAYRFNGIGVTQNVLYENQKLIANQFNSVIGKIQDSLSSTASALGKLQDVVNQNAQALNTLVKQLSSNFGAISSVLNDILSRLDPPEAEVQIDRLITGRLQSLQTYVTQQLIRAAEIRASANLAATKMSECVLGQSKRVDFCGKGYHLMSFPQSAPHGVVFLHVTYVFAQEKNFTTAPAICHDGKAHFPREGVFVSNGTHWFVTQRNFYEPQIITTDNTFVSGNCDVVIGIVNNTVYDPLQPELDSGGSGYIPEAPRDGQAYVRKDGEWVLLSTFL

SEQ ID NO: 9867 - protein, 1177 aa, Artificial Sequence
  SARS-CoV-2/Guangdong/GD2020087-P0008/2020__EPI_ISL_413863 spike protein (1-1147)(K986P_V987P_P1069F) Foldon construct
MFVFLVLLPLVSSQCVNLTTRTQLPPAYTNSFTRGVYYPDKVFRSSVLHSTQDLFLPFFSNVTWFHAIHVSGTNGTKRFDNPVLPFNDGVYFASTEKSNIIRGWIFGTTLDSKTQSLLIVNNATNVVIKVCEFQFCNDPFLGVYYHKNNKSWMESEFRVYSSANNCTFEYVSQPFLMDLEGKQGNFKNLREFVFKNIDGYFKIYSKHTPINLVRDLPQGFSALEPLVDLPIGINITRFQTLLALHRSYLTPGDSSSGWTAGAAAYYVGYLQPRTFLLKYNENGTITDAVDCALDPLSETKCTLKSFTVEKGIYQTSNFRVQPTESIVRFPNITNLCPFGEVFNATRFASVYAWNRKRISNCVADYSVLYNSASFSTFKCYGVSPTKLNDLCFTNVYADSFVIRGDEVREIAPGQTGKIADYNYKLPDDFTGCVIAWNSNNLDSKVGGNYNYLYRLFRKSNLKPFERDISTEIYQAGSTPCNGVEGFNCYFPLQSYGFQPTNGVGYQPYRVVVLSFELLHAPATVCGPKKSTNLVKNKCVNFNFNGLTGTGVLTESNKKFLPFQQFGRDIADTTDAVRDPQTLEILDITPCSFGGVSVITPGTNTSNQVAVLYQDVNCTEVPVAIHADQLTPTWRVYSTGSNVFQTRAGCLIGAEHVNNSYECDIPIGAGICASYQTQTNSPRRARSVASQSIIAYTMSLGAENSVAYSNNSIAIPTNFTISVTTEILPVSMTKTSVDCTMYICGDSTECSNLLLQYGSFCTQLNRALTGIAVEQDKNTQEVFAQVKQIYKTPPIKDFGGFNFSQILPDPSKPSKRSFIEDLLFNKVTLADAGFIKQYGDCLGDIAARDLICAQKFNGLTVLPPLLTDEMIAQYTSALLAGTITSGWTFGAGAALQIPFAMQMAYRFNGIGVTQNVLYENQKLIANQFNSAIGKIQDSLSSTASALGKLQDVVNQNAQALNTLVKQLSSNFGAISSVLNDILSRLDPPEAEVQIDRLITGRLQSLQTYVTQQLIRAAEIRASANLAATKMSECVLGQSKRVDFCGKGYHLMSFPQSAPHGVVFLHVTYVFAQEKNFTTAPAICHDGKAHFPREGVFVSNGTHWFVTQRNFYEPQIITTDNTFVSGNCDVVIGIVNNTVYDPLQPELDSGGSGYIPEAPRDGQAYVRKDGEWVLLSTFL

SEQ ID NO: 9868 - protein, 1177 aa, Artificial Sequence
  SARS-CoV-2/Sweden/01/2020__EPI_ISL_411951 spike protein (1-1147)(K986P_V987P_P1069F) Foldon construct
MFVFLVLLPLVSSQCVNLTTRTQLPPAYTNSFTRGVYYPDKVFRSSVLHSTQDLFLPFFSNVTWFHAIHVSGTNGTKRFDNPVLPFNDGVYFASTEKSNIIRGWIFGTTLDSKTQSLLIVNNATNVVIKVCEFQFCNDPFLGVYYHKNNKSWMESEFRVYSSANNCTFEYVSQPFLMDLEGKQGNFKNLREFVFKNIDGYFKIYSKHTPINLVRDLPQGFSALEPLVDLPIGINITRFQTLLALHRSYLTPGDSSSGWTAGAAAYYVGYLQPRTFLLKYNENGTITDAVDCALDPLSETKCTLKSFTVEKGIYQTSNFRVQPTESIVRFPNITNLCPFGEVFNATRFASVYAWNRKRISNCVADYSVLYNSASFSTFKCYGVSPTKLNDLCFTNVYADSFVIRGDEVRQIAPGQTGKIADYNYKLPDDFTGCVIAWNSNNLDSKVGGNYNYLYRLFRKSNLKPFERDISTEIYQAGSTPCNGVEGFNCYFPLQSYGFQPTNGVGYQPYRVVVLSFELLHAPATVCGPKKSTNLVKNKCVNFNFNGLTGTGVLTESNKKFLPFQQFGRDIADTTDAVRDPQTLEILDITPCSFGGVSVITPGTNTSNQVAVLYQDVNCTEVPVAIHADQLTPTWRVYSTGSNVFQTRAGCLIGAEHVNNSYECDIPIGAGICASYQTQTNSPRRARSVASQSIIAYTMSLGAENSVAYSNNSIAIPTNFTISVTTEILPVSMTKTSVDCTMYICGDSTECSNLLLQYGSFCTQLNRALTGIAVEQDKNTQEVFAQVKQIYKTPPIKDCGGFNFSQILPDPSKPSKRSFIEDLLFNKVTLADAGFIKQYGDCLGDIAARDLICAQKFNGLTVLPPLLTDEMIAQYTSALLAGTITSGWTFGAGAALQIPFAMQMAYRFNGIGVTQNVLYENQKLIANQFNSAIGKIQDSLSSTASALGKLQDVVNQNAQALNTLVKQLSSNFGAISSVLNDILSRLDPPEAEVQIDRLITGRLQSLQTYVTQQLIRAAEIRASANLAATKMSECVLGQSKRVDFCGKGYHLMSFPQSAPHGVVFLHVTYVFAQEKNFTTAPAICHDGKAHFPREGVFVSNGTHWFVTQRNFYEPQIITTDNTFVSGNCDVVIGIVNNTVYDPLQPELDSGGSGYIPEAPRDGQAYVRKDGEWVLLSTFL

SEQ ID NO: 9869 - protein, 1177 aa, Artificial Sequence
  SARS-CoV-2/Tianmen/HBCDC-HB-07/2020__EPI_ISL_412983 spike protein (1-1147)(K986P_V987P_P1069F) Foldon construct
MFVFLVLLPLVSSQCVNLTTRTQLPPAYTNSFTRGVYYPDKVFRSSVLHSTQDLFLPFFSNVTWFHAIHVSGTNGTKRFDNPVLPFNDGVYFASTEKSNIIRGWIFGTTLDSKTQSLLIVNNATNVVIKVCEFQFCNDPFLGVYYHKNNKSWMESEFRVYSSANNCTFEYVSQPFLMDLEGKQGNFKNLREFVFKNIDGYFKIYSKHTPINLVRDLPQGFSALEPLVDLPIGINITRFQTLLALHRSYLTPGDSSSGWTAGAAAYYVGYLQPRTFLLKYNENGTITDAVDCALDPLSETKCTLKSFTVEKGIYQTSNFRVQPTESIVRFPNITNLCPFGEVFNATRFASVYAWNRKRISNCVADYSVLYNSASFSTFKCYGVSPTKLNDLCFTNVYADSFVIRGDEVRQIAPGQTGKIADYNYKLPDDFTGCVIAWNSNNLDSKVGGNYNYLYRLFRKSNLKPFERDISTEIYQAGSTPCNGVEGFNCYFPLQSYGFQPTNGVGYQPYRVVVLSFELLHAPATVCGPKKSTNLVKNKCVNFNFNGLTGTGVLTESNKKFLPFQQFGRDIADTTDAVRDPQTLEILDITPCSFGGVSVITPGTNTSNQVAVLYQDLNCTEVPVAIHADQLTPTWRVYSTGSNVFQTRAGCLIGAEHVNNSYECDIPIGAGICASYQTQTNSPRRARSVASQSIIAYTMSLGAENSVAYSNNSIAIPTNFTISVTTEILPVSMTKTSVDCTMYICGDSTECSNLLLQYGSFCTQLNRALTGIAVEQDKNTQEVFAQVKQIYKTPPIKDFGGFNFSQILPDPSKPSKRSFIEDLLFNKVTLADAGFIKQYGDCLGDIAARDLICAQKFNGLTVLPPLLTDEMIAQYTSALLAGTITSGWTFGAGAALQIPFAMQMAYRFNGIGVTQNVLYENQKLIANQFNSAIGKIQDSLSSTASALGKLQDVVNQNAQALNTLVKQLSSNFGAISSVLNDILSRLDPPEAEVQIDRLITGRLQSLQTYVTQQLIRAAEIRASANLAATKMSECVLGQSKRVDFCGKGYHLMSFPQSAPHGVVFLHVTYVFAQEKNFTTAPAICHDGKAHFPREGVFVSNGTHWFVTQRNFYEPQIITTDNTFVSGNCDVVIGIVNNTVYDPLQPELDSGGSGYIPEAPRDGQAYVRKDGEWVLLSTFL

SEQ ID NO: 9870 - protein, 1177 aa, Artificial Sequence
  SARS-CoV-2/Hong Kong/case42_VM20002493/2020__EPI_ISL_414527 spike protein (1-1147)(K986P_V987P_P1069F) Foldon construct
MFVFLVLLPLVSSQCVNLTTRTQLPPAYTNSFTRGVYYPDKVFRSSVLHSTQDLFLPFFSNVTWFHAIHVSGTNGTKRFDNPVLPFNDGVYFASTEKSNIIRGWIFGTTLDSKTQSLLIVNNATNVVIKVCEFQFCNDPFLGVYYHKNNKSWMESEFRVYSSANNCTFEYVSQPFLMDLEGKQGNFKNLREFVFKNIDGYFKIYSKHTPINLVRDLPQGFSALEPLVDLPIGINITRFQTLLALHRSYLTPGDSSSGWTAGAAAYYVGYLQPRTFLLKYNENGTITDAVDCALDPLSETKCTLKSFTVEKGIYQTSNFRVQPTESIVRFPNITNLCPFGEVFNATRFASVYAWNRKRISNCVADYSVLYNSASFSTFKCYGVSPTKLNDLCFTNVYADSFVIRGDEVRQIAPGQTGKIADYNYKLPDDFTGCVIAWNSNNLDSKVGGNYNYLYRLFRKSNLKPFERDISTEIYQAGSTPCNGVEGFNCYFPLQSYGFQPTNGVGYQPYRVVVLSFELLHAPATVCGPKKSTNLVKNKCVNFNFNGLTGTGVLTESNKKFLPFQQFGRDIADTTDAVRDPQTLEILDITPCSFGGVSVITPGTNTSNQVAVLYQDVNCTEVPVAIHADQLTPTWRVYSTGSNVFQTRAGCLIGAEHVNNSYECDIPIGAGICASYQTQTNSPRRARSVASQSIIAYTMSLGAENSVAYSNNSIAIPTNFAISVTTEILPVSMTKTSVDCTMYICGDSTECSNLLLQYGSFCTQLNRALTGIAVEQDKNTQEVFAQVKQIYKTPPIKDFGGFNFSQILPDPSKPSKRSFIEDLLFNKVTLADAGFIKQYGDCLGDIAARDLICAQKFNGLTVLPPLLTDEMIAQYTSALLAGTITSGWTFGAGAALQIPFAMQMAYRFNGIGVTQNVLYENQKLIANQFNSAIGKIQDSLSSTASALGKLQDVVNQNAQALNTLVKQLSSNFGAISSVLNDILSRLDPPEAEVQIDRLITGRLQSLQTYVTQQLIRAAEIRASANLAATKMSECVLGQSKRVDFCGKGYHLMSFPQSAPHGVVFLHVTYVFAQEKNFTTAPAICHDGKAHFPREGVFVSNGTHWFVTQRNFYEPQIITTDNTFVSGNCDVVIGIVNNTVYDPLQPELDSGGSGYIPEAPRDGQAYVRKDGEWVLLSTFL

SEQ ID NO: 9871 - protein, 1177 aa, Artificial Sequence
  SARS-CoV-2/USA/CruiseA-23/2020__EPI_ISL_414482 spike protein (1-1147)(K986P_V987P_P1069F) Foldon construct
MFVFLVLLPLVSSQCVNLTTRTQLPPAYTNSFTRGVYYPDKVFRSSVLHSTQDLFLPFFSNVTWFHAIHVSGTNGTKRFDNPVLPFNDGVYFASTEKSNIIRGWIFGTTLDSKTQSLLIVNNATNVVIKVCEFQFCNDPFLGVYYHKNNKSWMESEFRVYSSANNCTFEYVSQPFLMDLEVKQGNFKNLREFVFKNIDGYFKIYSKHTPINLVRDLPQGFSALEPLVDLPIGINITRFQTLLALHRSYLTPGDSSSGWTAGAAAYYVGYLQPRTFLLKYNENGTITDAVDCALDPLSETKCTLKSFTVEKGIYQTSNFRVQPTESIVRFPNITNLCPFGEVFNATRFASVYAWNRKRISNCVADYSVLYNSASFSTFKCYGVSPTKLNDLCFTNVYADSFVIRGDEVRQIAPGQTGKIADYNYKLPDDFTGCVIAWNSNNLDSKVGGNYNYLYRLFRKSNLKPFERDISTEIYQAGSTPCNGVEGFNCYFPLQSYGFQPTNGVGYQPYRVVVLSFELLHAPATVCGPKKSTNLVKNKCVNFNFNGLTGTGVLTESNKKFLPFQQFGRDIADTTDAVRDPQTLEILDITPCSFGGVSVITPGTNTSNQVAVLYQDVNCTEVPVAIHADQLTPTWRVYSTGSNVFQTRAGCLIGAEHVNNSYECDIPIGAGICASYQTQTNSPRRARSVASQSIIAYTMSLGAENSVAYSNNSIAIPTNFTISVTTEILPVSMTKTSVDCTMYICGDSTECSNLLLQYGSFCTQLNRALTGIAVEQDKNTQEVFAQVKQIYKTPPIKDFGGFNFSQILPDPSKPSKRSFIEDLLFNKVTLADAGFIKQYGDCLGDIAARDLICAQKFNGLTVLPPLLTDEMIAQYTSALLAGTITSGWTFGAGAALQIPFAMQMAYRFNGIGVTQNVLYENQKLIANQFNSAIGKIQDSLSSTASALGKLQDVVNQNAQALNTLVKQLSSNFGAISSVLNDILSRLDPPEAEVQIDRLITGRLQSLQTYVTQQLIRAAEIRASANLAATKMSECVLGQSKRVDFCGKGYHLMSFPQSAPHGVVFLHVTYVFAQEKNFTTAPAICHDGKAHFPREGVFVSNGTHWFVTQRNFYEPQIITTDNTFVSGNCDVVIGIVNNTVYDPLQPELDSGGSGYIPEAPRDGQAYVRKDGEWVLLSTFL

SEQ ID NO: 9872 - protein, 1177 aa, Artificial Sequence
  SARS-CoV-2/Hong Kong/case85_VM20002868/2020__EPI_ISL_414519 spike protein (1-1147)(K986P_V987P_P1069F) Foldon construct
MFVFLVLVPLVSSQCVNLTTRTQLPPAYTNSFTRGVYYPDKVFRSSVLHSTQDLFLPFFSNVTWFHAIHVSGTNGTKRFDNPVLPFNDGVYFASTEKSNIIRGWIFGTTLDSKTQSLLIVNNATNVVIKVCEFQFCNDPFLGVYYHKNNKSWMESEFRVYSSANNCTFEYVSQPFLMDLEGKQGNFKNLREFVFKNIDGYFKIYSKHTPINLVRDLPQGFSALEPLVDLPIGINITRFQTLLALHRSYLTPGDSSSGWTAGAAAYYVGYLQPRTFLLKYNENGTITDAVDCALDPLSETKCTLKSFTVEKGIYQTSNFRVQPTESIVRFPNITNLCPFGEVFNATRFASVYAWNRKRISNCVADYSVLYNSASFSTFKCYGVSPTKLNDLCFTNVYADSFVIRGDEVRQIAPGQTGKIADYNYKLPDDFTGCVIAWNSNNLDSKVGGNYNYLYRLFRKSNLKPFERDISTEIYQAGSTPCNGVEGFNCYFPLQSYGFQPTNGVGYQPYRVVVLSFELLHAPATVCGPKKSTNLVKNKCVNFNFNGLTGTGVLTESNKKFLPFQQFGRDIADTTDAVRDPQTLEILDITPCSFGGVSVITPGTNTSNQVAVLYQDVNCTEVPVAIHADQLTPTWRVYSTGSNVFQTRAGCLIGAEHVNNSYECDIPIGAGICASYQTQTNSPRRARSVASQSIIAYTMSLGAENSVAYSNNSIAIPTNFTISVTTEILPVSMTKTSVDCTMYICGDSTECSNLLLQYGSFCTQLNRALTGIAVEQDKNTQEVFAQVKQIYKTPPIKDFGGFNFSQILPDPSKPSKRSFIEDLLFNKVTLADAGFIKQYGDCLGDIAARDLICAQKFNGLTVLPPLLTDEMIAQYTSALLAGTITSGWTFGAGAALQIPFAMQMAYRFNGIGVTQNVLYENQKLIANQFNSAIGKIQDSLSSTASALGKLQDVVNQNAQALNTLVKQLSSNFGAISSVLNDILSRLDPPEAEVQIDRLITGRLQSLQTYVTQQLIRAAEIRASANLAATKMSECVLGQSKRVDFCGKGYHLMSFPQSAPHGVVFLHVTYVFAQEKNFTTAPAICHDGKAHFPREGVFVSNGTHWFVTQRNFYEPQIITTDNTFVSGNCDVVIGIVNNTVYDPLQPELDSGGSGYIPEAPRDGQAYVRKDGEWVLLSTFL

SEQ ID NO: 9873 - protein, 1177 aa, Artificial Sequence; identical to SEQ ID NO: 9863
  SARS-CoV-2/England/200990660/2020__EPI_ISL_414523 spike protein (1-1147)(K986P_V987P_P1069F) Foldon construct

SEQ ID NO: 9874 - protein, 1177 aa, Artificial Sequence
  SARS-CoV-2/Australia/NSW09/2020__EPI_ISL_413595 spike protein (1-1147)(K986P_V987P_P1069F) Foldon construct
MFVFLVLLPLVSSQCVNLTTRTQLPPAYTNSFTRGVYYPDKVFRSSVLHSTQDLFLPFFSNVTWFHAIHVSGTNGTKRFDNPVLPFNDGVYFASTEKSNIIRGWIFGTTLDSKTQSLLIVNNATNVVIKVCEFQFCNDPFLGVYYHKNNKSWMESEFRVYSSANNCTFEYVSQPFLMDLEGKQGNFKNLREFVFKNIDGYFKIYSKHTPINLVRDLPQGFSALEPLVDLPIGINITRFQTLLALHRSYLTPGDSSSGWTAGAAAYYVGYLQPRTFLLKYNENGTITDAVDCALDPLSETKCTLKSFTVEKGIYQTSNFRVQPTESIVRFPNITNLCPFGEVFNATRFASVYAWNRKRISNCVADYSVLYNSASFSTFKCYGVSPTKLNDLCFTNVYADSFVIRGDEVRQIAPGQTGKIADYNYKLPDDFTGCVIAWNSNNLDSKVGGNYNYLYRLFRKSNLKPFERDISTEIYQAGSTPCNGVEGFNCYFPLQSYGFQPTNGVGYQPYRVVVLSFELLHAPATVCGPKKSTNLVKNKCVNFNFNGLTGTGVLTESNKKFLPFQQFGRDIADTTDAVRDPQTLEILDITPCSFGGVSVITPGTNTSNQVAVLYQDVNCTEVPVAIHADQLTPTWRVYSTGSNVFQTRAGCLIGAEHVNNSYECDIPIGAGICASYQTQTNSPRRARSVASQSIIAYTMSLGAENSVAYSNNSIAIPTNFTISVTTEILPVSMTKTSVDCTMYICGDSTECSNLLLQYGSFCTQLNRALTGIAVEQDKNTQEVFAQVKQIYKTPPIKDFGGFNFSQILPDPSKPSKRSFIEDLLFNKVTLADAGFIKQYGDCLGDIAARDLICAQKFNGLTVLPPLLTDEMIAQYTSALLAGTITSGWTFGAGAALQIPFAMQMAYRFNGIGVTQNVLYENQKLIANQFNSAIGKIQDSLSFTASALGKLQDVVNQNAQALNTLVKQLSSNFGAISSVLNDILSRLDPPEAEVQIDRLITGRLQSLQTYVTQQLIRAAEIRASANLAATKMSECVLGQSKRVDFCGKGYHLMSFPQSAPHGVVFLHVTYVFAQEKNFTTAPAICHDGKAHFPREGVFVSNGTHWFVTQRNFYEPQIITTDNTFVSGNCDVVIGIVNNTVYDPLQPELDSGGSGYIPEAPRDGQAYVRKDGEWVLLSTFL

SEQ ID NO: 9875 - protein, 1177 aa, Artificial Sequence; identical to SEQ ID NO: 9855
  SARS-CoV-2/Australia/NSW10/2020__EPI_ISL_413596 spike protein (1-1147)(K986P_V987P_P1069F) Foldon construct

SEQ ID NO: 9876 - protein, 1177 aa, Artificial Sequence
  SARS-CoV-2/Switzerland/1000477797/2020__EPI_ISL_413023 spike protein (1-1147)(K986P_V987P_P1069F) Foldon construct
MFVFLVLLPLVSSQCVNLTTRTQLPPAYTNSFTRGVYYPDKVFRSSVLHSTQDLFLPFFSNVTWFHAIHVSGTNGTKRFDNPVLPFNDGVYFASTEKSNIIRGWIFGTTLDSKTQSLLIVNNATNVVIKVCEFQFCNDPFLGVYYHKNNKSWMESEFRVYSSANNCTFEYVSQPFLMDLEGKQGNFKNLREFVFKNIDGYFNIYSKHTPINLVRDLPQGFSALEPLVDLPIGINITRFQTLLALHRSYLTPGDSSSGWTAGAAAYYVGYLQPRTFLLKYNENGTITDAVDCALDPLSETKCTLKSFTVEKGIYQTSNFRVQPTESIVRFPNITNLCPFGEVFNATRFASVYAWNRKRISNCVADYSVLYNSASFSTFKCYGVSPTKLNDLCFTNVYADSFVIRGDEVRQIAPGQTGKIADYNYKLPDDFTGCVIAWNSNNLDSKVGGNYNYLYRLFRKSNLKPFERDISTEIYQAGSTPCNGVEGFNCYFPLQSYGFQPTNGVGYQPYRVVVLSFELLHAPATVCGPKKSTNLVKNKCVNFNFNGLTGTGVLTESNKKFLPFQQFGRDIADTTDAVRDPQTLEILDITPCSFGGVSVITPGTNTSNQVAVLYQGVNCTEVPVAIHADQLTPTWRVYSTGSNVFQTRAGCLIGAEHVNNSYECDIPIGAGICASYQTQTNSPRRARSVASQSIIAYTMSLGAENSVAYSNNSIAIPTNFTISVTTEILPVSMTKTSVDCTMYICGDSTECSNLLLQYGSFCTQLNRALTGIAVEQDKNTQEVFAQVKQIYKTPPIKDFGGFNFSQILPDPSKPSKRSFIEDLLFNKVTLADAGFIKQYGDCLGDIAARDLICAQKFNGLTVLPPLLTDEMIAQYTSALLAGTITSGWTFGAGAALQIPFAMQMAYRFNGIGVTQNVLYENQKLIANQFNSAIGKIQDSLSSTASALGKLQDVVNQNAQALNTLVKQLSSNFGAISSVLNDILSRLDPPEAEVQIDRLITGRLQSLQTYVTQQLIRAAEIRASANLAATKMSECVLGQSKRVDFCGKGYHLMSFPQSAPHGVVFLHVTYVFAQEKNFTTAPAICHDGKAHFPREGVFVSNGTHWFVTQRNFYEPQIITTDNTFVSGNCDVVIGIVNNTVYDPLQPELDSGGSGYIPEAPRDGQAYVRKDGEWVLLSTFL

SEQ ID NO: 9877 - protein, 1177 aa, Artificial Sequence
  SARS-CoV-2/Belgium/BA-02291/2020__EPI_ISL_415159 spike protein (1-1147)(K986P_V987P_P1069F) Foldon construct
MFVFLVLLPLVSSQCVNLTTRTQLPPAYTNSFTRGVYYPDKVFRSSVLHSTQDLFLPFFSNVTWFHAIHVSGTNGTKRFDNPVLPFNDGVYFASTEKSNIIRGWIFGTTLDSKTQSLLIVNNATNVVIKVCEFQFCNDPFLGVYYHKNNKSWMESEFRVYSSANNCTFEYVSQPFLMDLEGKQGNFKNLREFVFKNIDGYFKIYSKHTPINLVRDLPQGFSALEPLVDLPIGINITRFQTLLALHRSYLTPGDSSSGWTAGAAAYYVGYLQPRTFLLKYNENGTITDAVDCALDPLSETKCTLKSFTVEKGIYQTSNFRVQPTESIVRFPNITNLCPFGEVFNATRFASVYAWNRKRISNCVADYSVLYNSASFSTFKCYGVSPTKLNDLCFTNVYADSFVIRGDEVRQIAPGQTGKIADYNYKLPDDFTGCVIAWNSNNLDSKVGGNYNYLYRLFRRSNLKPFERDISTEIYQAGSTPCNGVEGFNCYFPLQSYGFQPTNGVGYQPYRVVVLSFELLPAPATVCGPKKSTNLVKNKCVNFNFNGLTGTGVLTESNKKFLPFQQFGRDIADTTDAVRDPQTLEILDITPCSFGGVSVITPGTNTSNQVAVLYQGVNCTEVPVAIHADQLTPTWRVYSTGSNVFQTRAGCLIGAEHVNNSYECDIPIGAGICASYQTQTNSPRRARSVASQSIIAYTMSLGAENSVAYSNNSIAIPTNFTISVTTEILPVSMTKTSVDCTMYICGDSTECSNLLLQYGSFCTQLNRALTGIAVEQDKNTQEVFAQVKQIYKTPPIKDFGGFNFSQILPDPSKPSKRSFIEDLLFNKVTLADAGFIKQYGDCLGDIAARDLICAQKFNGLTVLPPLLTDEMIAQYTSALLAGTITSGWTFGAGAALQIPFAMQMAYRFNGIGVTQNVLYENQKLIANQFNSAIGKIQDSLSSAAPALGKLQDVVNQNAQALNTLVKQLSSNFGAISSVLNDILSRLDPPEAEVQIDRLITGRLQSLQTYVTQQLIRAAEIRASANLAATKMSECVLGQSKRVDFCGKGYHLMSFPQSAPHGVVFLHVTYVFAQEKNFTTAPAICHDGKAHFPREGVFVSNGTHWFVTQRNFYEPQIITTDNTFVSGNCDVVIGIVNNTVYDPLQPELDSGGSGYIPEAPRDGQAYVRKDGEWVLLSTFL

SEQ ID NO: 9878 - protein, 1177 aa, Artificial Sequence
  SARS-CoV-2/USA/WA8-UW5/2020__EPI_ISL_413486 spike protein (1-1147)(K986P_V987P_P1069F) Foldon construct
MFVFLVLLPLVSSQCVNLTTRTQLPPAYTNSFTRGVYYPDKVFRSSVLHSTQDLFLPFFSNVTWFHAIHVSGTNGTKRFDNPVLPFNDGVYFASTEKSNIIRGWIFGTTLDSKTQSLLIVNNATNVVIKVCEFQFCNDPFLGVYYHKNNKSWMESEFRVYSSANNCTFEYVSQPFLMDLEGKQGNFKNLREFVFKNIDGYFKIYSKHTPINLVRDLPQGFSALEPLVDLPIGINITRFQTLLALHRSYLTPGDSSSGWTAGAAAYYVGYLQPRTFLLKYNENGTITDAVDCALDPLSETKCTLKSFTVEKGIYQTSNFRVQPTESIVRFPNITNLCPFGEVFNATRFASVYAWNRKRISNCVADYSVLYNSASFSTFKCYGVSPTKLNDLCFTNVYADSFVIRGDEVRQIAPGQTGKIADYNYKLPDDFTGCVIAWNSNNLDSKVGGNYNYLYRLFRKSNLKPFERDISTEIYQAGSTPCNGVEGFNCYFPLQSYGFQPTNGVGYQPYRVVVLSFELLHAPATVCGPKKSTNLVKNKCVNFNFNGLTGTGVLTESNKKFLPFQQFGRDIADTTDAVRDPQTLEILDITPCSFGGVSVITPGTNTSNQVAVLYQDVNCTEVPVAIHADQLTPTWRVYSTGSNVFQTRAGCLIGAEYVNNSYECDIPIGAGICASYQTQTNSPRRARSVASQSIIAYTMSLGAENSVAYSNNSIAIPTNFTISVTTEILPVSMTKTSVDCTMYICGDSTECSNLLLQYGSFCTQLNRALTGIAVEQDKNTQEVFAQVKQIYKTPPIKDFGGFNFSQILPDPSKPSKRSFIEDLLFNKVTLADAGFIKQYGDCLGDIAARDLICAQKFNGLTVLPPLLTDEMIAQYTSALLAGTITSGWTFGAGAALQIPFAMQMAYRFNGIGVTQNVLYENQKLIANQFNSAIGKIQDSLSSTASALGKLQDVVNQNAQALNTLVKQLSSNFGAISSVLNDILSRLDPPEAEVQIDRLITGRLQSLQTYVTQQLIRAAEIRASANLAATKMSECVLGQSKRVDFCGKGYHLMSFPQSAPHGVVFLHVTYVFAQEKNFTTAPAICHDGKAHFPREGVFVSNGTHWFVTQRNFYEPQIITTDNTFVSGNCDVVIGIVNNTVYDPLQPELDSGGSGYIPEAPRDGQAYVRKDGEWVLLSTFL

SEQ ID NO: 9879 - protein, 1177 aa, Artificial Sequence
  SARS-CoV-2/England/20102000506/2020__EPI_ISL_415147 spike protein (1-1147)(K986P_V987P_P1069F) Foldon construct
MFVFLVLLPLVSSQCVNLTTRTQLPPAYTNSFTRGVYYPDKVFRSSVLHSTQDLFLPFFSNVTWFHAIHVSGTNGTKRFDNPVLPFNDGVYFASTEKSNIIRGWIFGTTLDSKTQSLLIVNNATNVVIKVCEFQFCNDPFLGVYYHKNNKSWMESEFRVYSSANNCTFEYVSQPFLMDLEGKQGNFKNLREFVFKNIDGYFKIYSKHTPINLVRDLPQGFSALEPLVDLPIGINITRFQTLLALHRSYLTPGDSSSGWTAGAAAYYVGYLQPRTFLLKYNENGTITDAVDCALDPLSETKCTLKSFTVEKGIYQTSNFRVQPTESIVRFPNITNLCPFGEVFNATRFASVYAWNRKRISNCVADYSVLYNSASFSTFKCYGVSPTKLNDLCFTNVYADSFVIRGDEVRQIAPGQTGKIADYNYKLPDDFTGCVIAWNSNNLDSKVGGNYNYLYRLFRKSNLKPFERDISTEIYQAGSTPCNGVEGFNCYFPLQSYGFQPTNGVGYQPYRVVVLSFELLHAPATVCGPKKSTNLVKNKCVNFNFNGLTGTGVLTESNKKFLPFQQFGRDIADTTDAVRDPQTLEILDITPCSFGGVSVITPGTNTSNQVAVLYQGVNCTEVPVAIHADQLTPTWRVYSTGSNVFQTRAGCLIGAEHVNNSYECDIPIGAGICASYQTQTNSPRRARSVASQSIIAYTMSLGAENSVAYSNNSIAIPTNFTISVTTEILPVSMTKTSVDCTMYICGDSTECSNLLLQYGSFCTQLNRALTGIAVEQDKNTQEVFAQVKQIYKTPPIKDFGGFNFSQILPDPSKPSKRSFIEDLLFNKVTLADAGFIKQYGYCLGDIAARDLICAQKFNGLTVLPPLLTDEMIAQYTSALLAGTITSGWTFGAGAALQIPFAMQMAYRFNGIGVTQNVLYENQKLIANQFNSAIGKIQDSLSSTASALGKLQDVVNQNAQALNTLVKQLSSNFGAISSVLNDILSRLDPPEAEVQIDRLITGRLQSLQTYVTQQLIRAAEIRASANLAATKMSECVLGQSKRVDFCGKGYHLMSFPQSAPHGVVFLHVTYVFAQEKNFTTAPAICHDGKAHFPREGVFVSNGTHWFVTQRNFYEPQIITTDNTFVSGNCDVVIGIVNNTVYDPLQPELDSGGSGYIPEAPRDGQAYVRKDGEWVLLSTFL

SEQ ID NO: 9880 - protein, 1177 aa, Artificial Sequence
  SARS-CoV-2/Belgium/VAG-03013/2020__EPI_ISL_415155 spike protein (1-1147)(K986P_V987P_P1069F) Foldon construct
MFVFLVLLPLVSSQCVNLTTRTQLPPAYTNSFTRGVYYPDKVFRSSVLHSTQDLFLPFFSNVTWFHAIHVSGTNGTKRFDNPVLPFNDGVYFASTEKSNIIRGWIFGTTLDSKTQSLLIVNNATNVVIKVCEFQFCNDPFLGVYYHKNNKSWMESEFRVYSSANNCTFEYVSQPFLMDLEGKQGNFKNLREFVFKNIDGYFKIYSKHTPINLVRDLPQGFSALEPLVDLPIGINITRFQTLLALHRSYLTPGDSSSGWTAGAAAYYVGYLQPRTFLLKYNENGTITDAVDCALDPLSETKCTLKSFTVEKGIYQTSNFRVQPTESIVRFPNITNLCPFGEVFNATRFASVYAWNRKRISNCVADYSVLYNSASFSTFKCYGVSPTKLNDLCFTNVYADSFVIRGDEVRQIAPGQTGKIADYNYKLPDDFTGCVIAWNSNNLDSKVGGNYNYLYRLFRKSNLKPFERDISTEIYQAGSTPCNGVEGFNCYFPLQSYGFQPTNGVGYQPYRVVVLSFELLHAPATVCGPKKSTNLVKNKCVNFNFNGLTGTGVLTESNKKFLPFQQFGRDIADTTDAVRDPQTLEILDITPCSFGGVSVITPGTNTSNQVAVLYQGVNCTEVPVAIHADQLTPTWRVYSTGSNVFQTRAGCLIGAEHVNNSYECDIPIGAGICASYQTQTNSPRRARSVASQSIIAYTMSLGAENSVAYSNNSIAIPTNFTISVTTEILPVSMTKTSVDCTMYICGDSTECSNLLLQYGSFCTQLNRALTGIAVEQDKNTQEVFAQVKQIYKTPPIKDFGGFNFSQILPDPSKPSKRSFIEDLLFNKVTLADAGFIKQYGDCLGDIAARDLICAQKFNGLTVLPPLLTDEMIAQYTSALLAGTITSGWTFGAGAALQIPFAMQMAYRFNGIGVTQNVLYENQKLIANQFNSAIGKIQDSLSSTATALGKLQDVVNQNAQALNTLVKQLSSNFGAISSVLNDILSRLDPPEAEVQIDRLITGRLQSLQTYVTQQLIRAAEIRASANLAATKMSECVLGQSKRVDFCGKGYHLMSFPQSAPHGVVFLHVTYVFAQEKNFTTAPAICHDGKAHFPREGVFVSNGTHWFVTQRNFYEPQIITTDNTFVSGNCDVVIGIVNNTVYDPLQPELDSGGSGYIPEAPRDGQAYVRKDGEWVLLSTFL

SEQ ID NO: 9881 - protein, 1177 aa, Artificial Sequence
  SARS-CoV-2/Belgium/BC-03016/2020__EPI_ISL_415157 spike protein (1-1147)(K986P_V987P_P1069F) Foldon construct
MFVFLVLLPLVSSQCVNLTTRTQLPPAYTNSFTRGVYYPDKVFRSSVLHSTQDLFLPFFSNVTWFHAIHVSGTNGTKRFDNPVLPFNDGVYFASTEKSNIIRGWIFGTTLDSKTQSLLIVNNATNVVIKVCEFQFCNDPFLGVYYHKNNKSWMESEFRVYSSANNCTFEYVSQPFLMDLEGKQGNFKNLREFVFKNIDGYFKIYSKHTPINLVRDLPQGFSALEPLVDLPIGINITRFQTLLALHRSYLTPGDSSSGWTAGAAAYYVGYLQPRTFLLKYNENGTITDAVDCALDPLSETKCTLKSFTVEKGIYQTSNFRVQPTESIVRFPNITNLCPFGEVFNATRFASVYAWNRKRISNCVADYSVLYNSASFSTFKCYGVSPTKLNDLCFTNVYADSFVIRGDEVRQIAPGQTGKIADYNYKLPDDFTGCVIAWNSNNLDSKVGGNYNYLYRLFRKSNLKPFERDISTEIYQAGSTPCNGVEGFNCYFPLQSYGFQPTNGVGYQPYRVVVLSFELLHAPATVCGPKKSTNLVKNKCVNFNFNGLTGTGVLTESNKKFLPFQQFGRDIADTTDAVRDPQTLEILDITPCSFGGVSVITPGTNTSNQVAVLYQGVNCTEVPVAIHADQLTPTWRVYSTGSNVFQTRAGCLIGAEHVNNSYECDIPIGAGICASYQTQTNSPRRARSVASQSIIAYTMSLGAENSVAYSNNSIAIPTNFTISVTTEILPVSMTKTSVDCTMYICGDSTECSNLLLQYGSFCTQLNRALTGIAVEQDKNTQEVFAQVKQIYKTPPIKDFGGFNFSQILPDPSKPSKRSFIEDLLFNKVTLADAGFIKQYGDCLGDIAARDLICAQKFNGLTVLPPLLTDEMIAQYTSALLAGTITSGWTFGAGAALQIPFAMQMAYRFNGIGVTQNVLYENQKLIANQFNSAIGKIQDSLSSTAPALGKLQDVVNQNAQALNTLVKQLSSNFGAISSVLNDILSRLDPPEAEVQIDRLITGRLQSLQTYVTQQLIRAAEIRASANLAATKMSECVLGQSKRVDFCGKGYHLMSFPQSAPHGVVFLHVTYVFAQEKNFTTAPAICHDGKAHFPREGVFVSNGTHWFVTQRNFYEPQIITTDNTFVSGNCDVVIGIVNNTVYDPLQPELDSGGSGYIPEAPRDGQAYVRKDGEWVLLSTFL

SEQ ID NO: 9882 - protein, 1177 aa, Artificial Sequence
  SARS-CoV-2/Germany/BavPat3/2020__EPI_ISL_414521 spike protein (1-1147)(K986P_V987P_P1069F) Foldon construct
MFVFLVLLPLVSSQCVNLTTRTQLPPAYTNSFTRGVYYPDKVFRSSVLHSTQDLFLPFFSNVTWFHAIHVSGTNGTKRFDNPVLPFNDGVYFASTEKSNIIRGWIFGTTLDSKTQSLLIVNNATNVVIKVCEFQFCNDPFLGVYYHKNNKSWMESEFRVYSSANNCTFEYVSQPFLMDLEGKQGNFKNLREFVFKNIDGYFKIYSKHTPINLVRDLPQGFSALEPLVDLPIGINITRFQTLLALHRSYLTPGDSSSGWTAGAAAYYVGYLQPRTFLLKYNENGTITDAVDCALDPLSETKCTLKSFTVEKGIYQTSNFRVQPTESIVRFPNITNLCPFGEVFNATRFASVYAWNRKRISNCVADYSVLYNSASFSTFKCYGVSPTKLNDLCFTNVYADSFVIRGDEVRQIAPGQTGKIADYNYKLPDDFTGCVIAWNSNNLDSKVGGNYNYLYRLFRKSNLKPFERDISTEIYQAGSTPCNGVEGFNCYFPLQSYGFQPTNGVGYQPYRVVVLSFELLHAPATVCGPKKSTNLVKNKCVNFNFNGLTGTGVLTESNKKFLPFQQFGRDIADTTDAVRDPQTLEILDITPCSFGGVSVITPGTNTSNQVAVLYQDVNCTEVPVAIHADQLTPTWRVYSTGSNVFQTRAGCLIGAEHVNNSYECDIPIGAGICASYQTQTNSPRRARSVASQSIIAYTMSLGAENSVAYSNNSIAIPTNFTISVTTEILPVSMTKTSVDCTMYICGDSTECSNLLLQYGSFCTQLNRALTGIAVEQDKNTQQVFAQVKQIYKTPPIKDFGGFNFSQILPDPSKPSKRSFIEDLLFNKVTLADAGFIKQYGDCLGDIAARDLICAQKFNGLTVLPPLLTDEMIAQYTSALLAGTITSGWTFGAGAALQIPFAMQMAYRFNGIGVTQNVLYENQKLIANQFNSAIGKIQDSLSSTASALGKLQDVVNQNAQALNTLVKQLSSNFGAISSVLNDILSRLDPPEAEVQIDRLITGRLQSLQTYVTQQLIRAAEIRASANLAATKMSECVLGQSKRVDFCGKGYHLMSFPQSAPHGVVFLHVTYVFAQEKNFTTAPAICHDGKAHFPREGVFVSNGTHWFVTQRNFYEPQIITTDNTFVSGNCDVVIGIVNNTVYDPLQPELDSGGSGYIPEAPRDGQAYVRKDGEWVLLSTFL

SEQ ID NO: 9883 - protein, 1177 aa, Artificial Sequence
  SARS-CoV-2/France/HF1805/2020__EPI_ISL_414628 spike protein (1-1147)(K986P_V987P_P1069F) Foldon construct
MFVFLVLLPLVSSQCVNLTTRTQLPPAYTNSFTRGVYYPDKVFRSSVLHSTQDLFLPFFSNVTWFHAIHVSGTNGTKRFDNPVLPFNDGVYFASTEKSNIIRGWIFGTTLDSKTQSLLIVNNATNVVIKVCEFQFCNDPFLGVYYHKNNKSWMESEFRVYSSANNCTFEYVSQPFLMDLEGKQGNFKNLREFVFKNIDGYFKIYSKHTPINLVRDLPQGFSALEPLVDLPIGINITRFQTLLALHRSYLTPGDSSSGWTAGAAAYYVGYLQPRTFLLKYNENGTITDAVDCALDPLSETKCTLKSFTVEKGIYQTSNFRVQPTESIVRFPNITNLCPFGEVFNATRFASVYAWNRKRISNCVADYSVLYNSASFSTFKCYGVSPTKLNDLCFTNVYADSFVIRGDEVRQIAPGQTGKIADYNYKLPDDFTGCVIAWNSNNLDSKVGGNYNYLYRLFRKSNLKPFERDISTEIYQAGSTPCNGVEGFNCYFPLQSYGFQPTNGVGYQPYRVVVLSFELLHAPATVCGPKKSTNLVKNKCVNFNFNGLTGTGVLTESNKKFLPFQQFGRDIADTTDAVRDPQTLEILDITPCSFGGVSVITPGTNTSNQVAVLYQGVNCTEVPVAIHADQLTPTWRVYSTGSNVFQTRAGCLIGAEHVNNSYECDIPIGAGICASYQTQTNSPRRARSVASQSIIAYTMSLGAENSVAYSNNSIAIPTNFTISVTTEILPVSMTKTSVDCTMYICGDSTECSNLLLQYGSFCTQLNRALTGIAVEQDKNTQEVFAQVKQIYKTPPIKDFGGFNFSQILPDPSKPSKRSFIEDLLFNKVTLADAGFIKQYGDCLGDIAARDLICAQKFNGLTVLPPLLTDEMIAQYTSALLAGTITSGWTFGAGAALQIPFAMQMAYRFNGIGVTQNVLYENQKLIANQFNSAIGKIQDSLSSTASALGKLQDVVNQNAQALNTLVKQLSSNFGAISSVLNDILSRLDPPEAEVQIDRLITGRLQSLQTYVTQQLIRAAEIRASANLAATKMSECVLGQSKRVDFCGKGYHLMSFPQSAPHGVVFLHVTYVFAQEKNFTTAPAICHDGKAHFPREGVFVSNGTHWFVTQRNFYEPQIITTDNTFVSGNCDVVIGVVNNTVYDPLQPELDSGGSGYIPEAPRDGQAYVRKDGEWVLLSTFL

SEQ ID NO: 9884 - protein, 1177 aa, Artificial Sequence
  SARS-CoV-2/Netherlands/ZuidHolland_9/2020__EPI_ISL_414445 spike protein (1-1147)(K986P_V987P_P1069F) Foldon construct
MFVFLVLLPLVSSQCVNLTTRTQLPPAYTNSFTRGVYYPDKVFRSSVLHSTQDLFLPFFSNVTWFHAIHVSGTNGTKRFDNPVLPFNDGVYFASTEKSNIIRGWIFGTTLDSKTQSLLIVNNATNVVIKVCEFQFCNDPFLGVYYHKNNKSWMESEFRVYSSANNCTFEYVSQPFLMDLEGKQGNFKNLREFVFKNIDGYFKIYSKHTPINLVRDLPQGFSALEPLVDLPIGINITRFQTLLALHRSYLTPGDSSSGWTAGAAAYYVGYLQPRTFLLKYNENGTITDAVDCALDPLSETKCTLKSFTVEKGIYQTSNFRVQPTESIVRFPNITNLCPFGEVFNATRFASVYAWNRKRISNCVADYSVLYNSASFSTFKCYGVSPTKLNDLCFTNVYADSFVIRGDEVRQIAPGQTGKIADYNYKLPDDFTGCVIAWNSNNLDSKVGGNYNYLYRLFRKSNLKPFERDISTEIYQAGSTPCNGVEGFNCYFPLQSYGFQPTNGVGYQPYRVVVLSFELLHAPATVCGPKKSTNLVKNKCVNFNFNGLTGTGVLTESNKKFLPFQQFGRDIADTTDAVRDPQTLEILDITPCSFGGVSVITPGTNTSNQVAVLYQGVNCTEVPVAIHADQLTPTWRVYSTGSNVFQTRAGCLIGAEHVNNSYECDIPIGAGICASYQTQTNSPRRARSVASQSIIAYTMSLGAENSVAYSNNSIAIPTNFTISVTTEILPVSMTKTSVDCTMYICGDSTECSNLLLQYGSFCTQLNRALTGIAVEQDKNTQEVFAQVKQIYKTPPIKDFGGFNFSQILPDPSKPSKRSFIEDLLFNKVTLADAGFIKQYGDCLGDIAARDLICVQKFNGLTVLPPLLTDEMIAQYTSALLAGTITSGWTFGAGAALQIPFAMQMAYRFNGIGVTQNVLYENQKLIANQFNSAIGKIQDSLSSTASALGKLQDVVNQNAQALNTLVKQLSSNFGAISSVLNDILSRLDPPEAEVQIDRLITGRLQSLQTYVTQQLIRAAEIRASANLAATKMSECVLGQSKRVDFCGKGYHLMSFPQSAPHGVVFLHVTYVFAQEKNFTTAPAICHDGKAHFPREGVFVSNGTHWFVTQRNFYEPQIITTDNTFVSGNCDVVIGIVNNTVYDPLQPELDSGGSGYIPEAPRDGQAYVRKDGEWVLLSTFL

SEQ ID NO: 9885 - protein, 1177 aa, Artificial Sequence
  SARS-CoV-2/Finland/FIN03032020A/2020__EPI_ISL_413602 spike protein (1-1147)(K986P_V987P_P1069F) Foldon construct
MFVFLVLLPLVSSQCVNLTTRTQLPPAYTNSFTRGVYYPDKVFRSSVLHSTQDLFLPFFSNVTWFHAIHVSGTNGTKRFDNPVLPFNDGVYFASTEKSNIIRGWIFGTTLDSKTQSLLIVNNATNVVIKVCEFQFCNDPFLGVYYHKNNKSWMESEFRVYSSANNCTFEYVSQPFLMDLEGKQGNFKNLREFVFKNIDGYFKIYSKHTPINLVRDLPQGFSALEPLVDLPIGINITRFQTLLALHRSYLTPGDSSSGWTAGAAAYYVGYLQPRTFLLKYNENGTITDAVDCALDPLSETKCTLKSFTVEKGIYQTSNFRVQPTESIVRFPNITNLCPFGEVFNATRFASVYAWNRKRISNCVADYSVLYNSASFSTFKCYGVSPTKLNDLCFTNVYADSFVIRGDEVRQIAPGQTGKIADYNYKLPDDFTGCVISWNSNNLDSKVGGNYNYLYRLFRKSNLKPFERDISTEIYQAGSTPCNGVEGFNCYFPLQSYGFQPTNGVGYQPYRVVVLSFELLHAPATVCGPKKSTNLVKNKCVNFNFNGLTGTGVLTESNKKFLPFQQFGRDIADTTDAVRDPQTLEILDITPCSFGGVSVITPGTNTSNQVAVLYQGVNCTEVPVAIHADQLTPTWRVYSTGSNVFQTRAGCLIGAEHVNNSYECDIPIGAGICASYQTQTNSPRRARSVASQSIIAYTMSLGAENSVAYSNNSIAIPTNFTISVTTEILPVSMTKTSVDCTMYICGDSTECSNLLLQYGSFCTQLNRALTGIAVEQDKNTQEVFAQVKQIYKTPPIKDFGGFNFSQILPDPSKPSKRSFIEDLLFNKVTLADAGFIKQYGDCLGDIAARDLICAQKFNGLTVLPPLLTDEMIAQYTSALLAGTITSGWTFGAGAALQIPFAMQMAYRFNGIGVTQNVLYENQKLIANQFNSAIGKIQDSLSSTASALGKLQDVVNQNAQALNTLVKQLSSNFGAISSVLNDILSRLDPPEAEVQIDRLITGRLQSLQTYVTQQLIRAAEIRASANLAATKMSECVLGQSKRVDFCGKGYHLMSFPQSAPHGVVFLHVTYVFAQEKNFTTAPAICHDGKAHFPREGVFVSNGTHWFVTQRNFYEPQIITTDNTFVSGNCDVVIGIVNNTVYDPLQPELDSGGSGYIPEAPRDGQAYVRKDGEWVLLSTFL

SEQ ID NO: 9886 - protein, 1177 aa, Artificial Sequence
  SARS-CoV-2/France/GE1977/2020__EPI_ISL_414632 spike protein (1-1147)(K986P_V987P_P1069F) Foldon construct
MFVFLVLLPLVSSQCVNLTTRTQLPPAYTNSFTRGVYYPDKVFRSSVLHSTQDLFLPFFSNVTWFHAIHVSGTNGTKRFDNPVLPFNDGVYFASTEKSNIIRGWIFGTTLDSKTQSLLIVNNATNVVIKVCEFQFCNDPFLGVYYHKNNKSWMESEFRVYSSANNCTFEYVSQPFLMDLEGKQGNFKNLREFVFKNIDGYFKIYSKHTPINLVRDLPQGFSALEPLVDLPIGINITRFQTLLALHRSYLTPGDSSSGWTAGAAAYYVGYLQPRTFLLKYNENGTITDAVDCALDPLSETKCTLKSFTVEKGIYQTSNFRVQPTESIVRFPNITNLCPFGEVFNATRFASVYAWNRKRISNCVADYSVLYNSASFSTFKCYGVSPTKLNDLCFTNVYADSFVIRGDEVRQIAPGQTGKIADYNYKLPDDFTGCVIAWNSNNLDSKVGGNYNYLYRLFRKSNLKPFERDISTEIYQAGSTPCNGVEGFNCYFPLQSYGFQPTNGVGYQPYRVVVLSFELLHAPATVCGPKKSTNLVKNKCVNFNFNGLTGTGVLTESNKKFLPFQQFGRDIADTTDAVRDPQTLEILDITPCSFGGVSVITPGTNTSNQVAVLYQGVNCTEVPVAIHADQLTPTWRVYSTGSNVFQTRAGCLIGAEHVNNSYECDIPIGAGICASYQTQTNSPRRARSVASQSIIAYTMSLGAENSVAYSNNSIAIPTNFTISVTTEILPVSMTKTSVDCTMYICGDSTECSNLLLQYGSFCTQLNRALTGIAVEQDKNTQEVFAQVKQIYKTPPIKDFGGFNFSQILPDPSKPSKRSFIEDLLFNKVTLADAGFIKQYGDCLGDIAARDLICAQKFNGLTVLPPLLTDEMIAQYTSALLAGTITSGWTFGAGAALQIPFAMQMAYRFNGIGVTQNVLYENQKLIANQFNSAIGKIQDSLFSTASALGKLQDVVNQNAQALNTLVKQLSSNFGAISSVLNDILSRLDPPEAEVQIDRLITGRLQSLQTYVTQQLIRAAEIRASANLAATKMSECVLGQSKRVDFCGKGYHLMSFPQSAPHGVVFLHVTYVFAQEKNFTTAPAICHDGKAHFPREGVFVSNGTHWFVTQRNFYEPQIITTDNTFVSGNCDVVIGIVNNTVYDPLQPELDSGGSGYIPEAPRDGQAYVRKDGEWVLLSTFL

SEQ ID NO: 9887 - protein, 1177 aa, Artificial Sequence
  SARS-CoV-2/Finland/FIN-313/2020__EPI_ISL_414641 spike protein (1-1147)(K986P_V987P_P1069F) Foldon construct
MFVFLVLLPLVSSQCVNLTTRTQLPPAYTNSFTRGVYYPDKVFRSSVLHSTQDLFLPFFSNVTWFHAIHVSGTNGTKRFDNPVLPFNDGVYFASTEKSNIIRGWIFGTTLDSKTQSLLIVNNATNVVIKVCEFQFCNDPFLGVYYHKNNKSWMESEFRVYSSANNCTFEYVSQPFLMDLEGKQGNFKNLREFVFKNIDGYFKIYSKHTPINLVRDLPQGFSALEPLVDLPIGINITRFKTLLALHRSYLTPGDSSSGWTAGAAAYYVGYLQPRTFLLKYNENGTITDAVDCALDPLSETKCTLKSFTVEKGIYQTSNFRVQPTESIVRFPNITNLCPFGEVFNATRFASVYAWNRKRISNCVADYSVLYNSASFSTFKCYGVSPTKLNDLCFTNVYADSFVIRGDEVRQIAPGQTGKIADYNYKLPDDFTGCVIAWNSNNLDSKVGGNYNYLYRLFRKSNLKPFERDISTEIYQAGSTPCNGVEGFNCYFPLQSYGFQPTNGVGYQPYRVVVLSFELLHAPATVCGPKKSTNLVKNKCVNFNFNGLTGTGVLTESNKKFLPFQQFGRDIADTTDAVRDPQTLEILDITPCSFGGVSVITPGTNTSNQVAVLYQGVNCTEVPVAIHADQLTPTWRVYSTGSNVFQTRAGCLIGAEHVNNSYECDIPIGAGICASYQTQTNSPRRARSVASQSIIAYTMSLGAENSVAYSNNSIAIPTNFTISVTTEILPVSMTKTSVDCTMYICGDSTECSNLLLQYGSFCTQLNRALTGIAVEQDKNTQEVFAQVKQIYKTPPIKDFGGFNFSQILPDPSKPSKRSFIEDLLFNKVTLADAGFIKQYGDCLGDIAARDLICAQKFNGLTVLPPLLTDEMIAQYTSALLAGTITSGWTFGAGAALQIPFAMQMAYRFNGIGVTQNVLYENQKLIANQFNSAIGKIQDSLSSTASALGKLQDVVNQNAQALNTLVKQLSSNFGAISSVLNDILSRLDPPEAEVQIDRLITGRLQSLQTYVTQQLIRAAEIRASANLAATKMSECVLGQSKRVDFCGKGYHLMSFPQSAPHGVVFLHVTYVFAQEKNFTTAPAICHDGKAHFPREGVFVSNGTHWFVTQRNFYEPQIITTDNTFVSGNCDVVIGIVNNTVYDPLQPELDSGGSGYIPEAPRDGQAYVRKDGEWVLLSTFL

SEQ ID NO: 9888 - protein, 1177 aa, Artificial Sequence
  SARS-CoV-2/Netherlands/ZuidHolland_2/2020__EPI_ISL_414556 spike protein (1-1147)(K986P_V987P_P1069F) Foldon construct
MFVFLVLLPLVSSQCVNLTTRTQLPPAYTNSFTRGVYYPDKVFRSSVLHSTQDLFLPFFSNVTWFHAIHVSGTNGTKRFDNPVLPFNDGVYFASTEKSNIIRGWIFGTTLDSKTQSLLIVNNATNVVIKVCEFQFCNDPFLGVYYHKNNKSWMESEFRVYSSANNCTFEYVSQPFLMDLEGKQGNFKNLREFVFKNIDGYFKIYSKHTPINLVRDLPQGFSALEPLVDLPIGINITRFQTLLALHRSYLTPGDSSSGWTAGAAAYYVGYLQPRTFLLKYNENGTITDAVDCALDPLSETKCTLKSFTVEKGIYQTSNFRVQPTESIVRFPNITNLCPFGEVFNATRFASVYAWNRKRISNCVADYSVLYNSASFSTFKCYGVSPTKLNDLCFTNVYADSFVIRGDEVRQIAPGQTGKIADYNYKLPDDFTGCVIAWNSNNLDSKVGGNYNYLYRLFRKSNLKPFERDISTEIYQAGSTPCNGVEGFNCYFPLQSYGFQPTNGVGYQPYRVVVLSFELLHAPATVCGPKKSTNLVKNKCVNFNFNGLTGTGVLTESNKKFLPFQQFGRDIADTTDAVRDPQTLEILDITPCSFGGVSVITPGTNTSNQVAVLYQGVNCTEVPVAIHADQLTPTWRVYSTGSNVFQTRAGCLIGAEHVNNSYECDIPIGAGICASYQTQTNSPRRARSVASQSIIAYTMSLGAENSVAYSNNSIAIPTNFTISVTTEILPVSMTKTSVDCTMYICGDSTECSNLLLQYGSFCTQLNRALTGIALEQDKNTQEVFAQVKQIYKTPPIKDFGGFNFSQILPDPSKPSKRSFIEDLLFNKVTLADAGFIKQYGDCLGDIAARDLICAQKFNGLTVLPPLLTDEMIAQYTSALLAGTITSGWTFGAGAALQIPFAMQMAYRFNGIGVTQNVLYENQKLIANQFNSAIGKIQDSLSSTASALGKLQDVVNQNAQALNTLVKQLSSNFGAISSVLNDILSRLDPPEAEVQIDRLITGRLQSLQTYVTQQLIRAAEIRASANLAATKMSECVLGQSKRVDFCGKGYHLMSFPQSAPHGVVFLHVTYVFAQEKNFTTAPAICHDGKAHFPREGVFVSNGTHWFVTQRNFYEPQIITTDNTFVSGNCDVVIGIVNNTVYDPLQPELDSGGSGYIPEAPRDGQAYVRKDGEWVLLSTFL

SEQ ID NO: 9889 - protein, 1177 aa, Artificial Sequence
  SARS-CoV-2/USA/WA-UW31/2020__EPI_ISL_414618 spike protein (1-1147)(K986P_V987P_P1069F) Foldon construct
MFVFLVLLPLVSSQCVNLTTRTQLPPAYTNSFTRGVYYPDKVFRSSVLHSTQDLFLPFFSNVTWFHAIHVSGTNGTKRFDNPVLPFNDGVYFASTEKSNIIRGWIFGTTLDSKTQSLLIVNNATNVVIKVCEFQFCNDPFLGVYYHKNNKSWMESEFRVYSSANNCTFEYVSQPFLMDLEGKQGNFKNLREFVFKNIDGYFKIYSKHTPINLVRDLPQGFSALEPLVDLPIGINITRFQTLLALHRSYLTPGDSSSGWTAGAAAYYVGYLQPRTFLLKYNENGTITDAVDCALDPLSETKCTLKSFTVEKGIYQTSNFRVQPTESIVRFPNITNLCPFGEVFNATRFASVYAWNRKRISNCVADYSVLYNSASFSTFKCYGVSPTKLNDLCFTNVYADSFVIRGDEVRQIAPGQTGKIADYNYKLPDDFTGCVIAWNSNNLDSKVGGNYNYLYRLFRKSNLKPFERDISTEIYQAGSTPCNGAEGFNCYFPLQSYGFQPTNGVGYQPYRVVVLSFELLHAPATVCGPKKSTNLVKNKCVNFNFNGLTGTGVLTESNKKFLPFQQFGRDIADTTDAVRDPQTLEILDITPCSFGGVSVITPGTNTSNQVAVLYQDVNCTEVPVAIHADQLTPTWRVYSTGSNVFQTRAGCLIGAEHVNNSYECDIPIGAGICASYQTQTNSPRRARSVASQSIIAYTMSLGAENSVAYSNNSIAIPTNFTISVTTEILPVSMTKTSVDCTMYICGDSTECSNLLLQYGSFCTQLNRALTGIAVEQDKNTQEVFAQVKQIYKTPPIKDFGGFNFSQILPDPSKPSKRSFIEDLLFNKVTLADAGFIKQYGDCLGDIAARDLICAQKFNGLTVLPPLLTDEMIAQYTSALLAGTITSGWTFGAGAALQIPFAMQMAYRFNGIGVTQNVLYENQKLIANQFNSAIGKIQDSLSSTASALGKLQDVVNQNAQALNTLVKQLSSNFGAISSVLNDILSRLDPPEAEVQIDRLITGRLQSLQTYVTQQLIRAAEIRASANLAATKMSECVLGQSKRVDFCGKGYHLMSFPQSAPHGVVFLHVTYVFAQEKNFTTAPAICHDGKAHFPREGVFVSNGTHWFVTQRNFYEPQIITTDNTFVSGNCDVVIGIVNNTVYDPLQPELDSGGSGYIPEAPRDGQAYVRKDGEWVLLSTFL

SEQ ID NO: 9890 - protein, 1177 aa, Artificial Sequence
  SARS-CoV-2/South Korea/SNU01/2020__EPI_ISL_411929 spike protein (1-1147)(K986P_V987P_P1069F) Foldon construct
MFVFLVLLPLVSSQCVNLTTRTQLPPAYTNSFTRGVYYPDKVFRSSVLHSTQDLFLPFFSNVTWFHAIHVSGTNGTKRFDNPVLPFNDGVYFASTEKSNIIRGWIFGTTLDSKTQSLLIVNNATNVVIKVCEFQFCNDPFLGVYYHKNNKSWMESEFRVYSSANNCTFEYVSQPFLMDLEGKQGNFKNLREFVFKNIDGYFKIYSKHTPINLVRDLPQGFWALEPLVDLPIGINITRFQTLLALHRSYLTPGDSSSGWTAGAAAYYVGYLQPRTFLLKYNENGTITDAVDCALDPLSETKCTLKSFTVEKGIYQTSNFRVQPTESIVRFPNITNLCPFGEVFNATRFASVYAWNRKRISNCVADYSVLYNSASFSTFKCYGVSPTKLNDLCFTNVYADSFVIRGDEVRQIAPGQTGKIADYNYKLPDDFTGCVIAWNSNNLDSKVGGNYNYLYRLFRKSNLKPFERDISTEIYQAGSTPCNGVEGFNCYFPLQSYGFQPTNGVGYQPYRVVVLSFELLHAPATVCGPKKSTNLVKNKCVNFNFNGLTGTGVLTESNKKFLPFQQFGRDIADTTDAVRDPQTLEILDITPCSFGGVSVITPGTNTSNQVAVLYQDVNCTEVPVAIHADQLTPTWRVYSTGSNVFQTRAGCLIGAEHVNNSYECDIPIGAGICASYQTQTNSPRRARSVASQSIIAYTMSLGAENSVAYSNNSIAIPTNFTISVTTEILPVSMTKTSVDCTMYICGDSTECSNLLLQYGSFCTQLNRALTGIAVEQDKNTQEVFAQVKQIYKTPPIKDFGGFNFSQILPDPSKPSKRSFIEDLLFNKVTLADAGFIKQYGDCLGDIAARDLICAQKFNGLTVLPPLLTDEMIAQYTSALLAGTITSGWTFGAGAALQIPFAMQMAYRFNGIGVTQNVLYENQKLIANQFNSAIGKIQDSLSSTASALGKLQDVVNQNAQALNTLVKQLSSNFGAISSVLNDILSRLDPPEAEVQIDRLITGRLQSLQTYVTQQLIRAAEIRASANLAATKMSECVLGQSKRVDFCGKGYHLMSFPQSAPHGVVFLHVTYVFAQEKNFTTAPAICHDGKAHFPREGVFVSNGTHWFVTQRNFYEPQIITTDNTFVSGNCDVVIGIVNNTVYDPLQPELDSGGSGYIPEAPRDGQAYVRKDGEWVLLSTFL

SEQ ID NO: 9891 - protein, 1177 aa, Artificial Sequence
  SARS-CoV-2/China/WF0004/2020__EPI_ISL_413694 spike protein (1-1147)(K986P_V987P_P1069F) Foldon construct
MFVFLVLLPLVSSQCVNLTTRTQLPPAYTNSFTRGVYYPDKVFRSSVLHSTQDLFLPFFSNVTWFHAIHVSGTNGTKRFDNPVLPFNDGVYFASTEKSNIIRGWIFGTTLDSKTQSLLIVNNATNVVIKVCEFQFCNDPFLGVYYHKNNKSWTESEFRVYSSANNCTFEYVSQPFLMDLEGKQGNFKNLREFVFKNIDGYFKIYSKHTPINLVRDLPQGFSALEPLVDLPIGINITRFQTLLALHRSYLTPGDSSSGWTAGAAAYYVGYLQPRTFLLKYNENGTITDAVDCALDPLSETKCTLKSFTVEKGIYQTSNFRVQPTESIVRFPNITNLCPFGEVFNATRFASVYAWNRKRISNCVADYSVLYNSASFSTFKCYGVSPTKLNDLCFTNVYADSFVIRGDEVRQIAPGQTGKIADYNYKLPDDFTGCVIAWNSNNLDSKVGGNYNYLYRLFRKSNLKPFERDISTEIYQAGSTPCNGVEGFNCYFPLQSYGFQPTNGVGYQPYRVVVLSFELLHAPATVCGPKKSTNLVKNKCVNFNFNGLTGTGVLTESNKKFLPFQQFGRDIADTTDAVRDPQTLEILDITPCSFGGVSVITPGTNTSNQVAVLYQDVNCTEVPVAIHADQLTPTWRVYSTGSNVFQTRAGCLIGAEHVNNSYECDIPIGAGICASYQTQTNSPRRARSVASQSIIAYTMSLGAENSVAYSNNSIAIPTNFTISVTTEILPVSMTKTSVDCTMYICGDSTECSNLLLQYGSFCTQLNRALTGIAVEQDKNTQEVFAQVKQIYKTPPIKDFGGFNFSQILPDPSKPSKRSFIEDLLFNKVTLADAGFIKQYGDCLGDIAARDLICAQKFNGLTVLPPLLTDEMIAQYTSALLAGTITSGWTFGAGAALQIPFAMQMAYRFNGIGVTQNVLYENQKLIANQFNSAIGKIQDSLSSTASALGKLQDVVNQNAQALNTLVKQLSSNFGAISSVLNDILSRLDPPEAEVQIDRLITGRLQSLQTYVTQQLIRAAEIRASANLAATKMSECVLGQSKRFDFCGKGYHLMSFPQSAPHGVVFLHVTYVFAQEKNFTTAPAICHDGKAHFPREGVFVSNGTHWFVTQRNFYEPQIITTDNTFVSGNCDVVIGIVNNTVYDPLQPELDSGGSGYIPEAPRDGQAYVRKDGEWVLLSTFL

SEQ ID NO: 9892 - protein, 1177 aa, Artificial Sequence
  SARS-CoV-2/China/WF0028/2020__EPI_ISL_413791 spike protein (1-1147)(K986P_V987P_P1069F) Foldon construct
MFVFLVLLPLVSSQCVNLTTRTQLPPAYTNSFTRGVYYPDKVFRSSVLHSTQDLFLPFFSNVTWFHAIHVSGTNGTKRFDNPVLPFNDGVYFASTEKSNIIRGWIFGTTLDSKTQSLLIVNNATNVVIKVCEFQFCNDPFLGVYYHKNNKSWMESEFRVYSSANNCTFEYVSQPFLMDLEGKQGNFKNLREFVFKNIDGYFKIYSKHTPINLVRDLPQGFSALEPLVDLPIGINITRFQTLLALHRSYLTPGDSSSGWTAGAAAYYVGYLQPRTFLLKYNENGTITDAVDCALDPLSETKCTLKSFTVEKGIYQTSNFRVQPTESIVRFPNITNLCPFGEVFNATRFASVYAWNRKRISNCVADYSVLYNSASFSTFKCYGVSPTKLNDLCFTNVYADSFVIRGDEVRQIAPGQTGKIADYNYKLPDDFTGCVIAWNSNNLDSKVGGNYNYLYRLFRKSNLKPFERDISTEIYQAGSTPCNGVEGFNCYFPLQSYGFQPTNGVGYQPYRVVVLSFELLHAPATVCGPKKSTNLVKNKCVNFNFNGLTGTGVLTESNKKFLPFQQFGRDIADTTDAVRDPQTLEILDITPCSFGGVSVITPGTNTSNQVAVLYQDVNCTEVPVAIHADQLTPTWRVYSTGSNVFQTRAGCLIGAEHVNNSYECDIPIGAGICASYQTQTNSPRRARSVASQSIIAYTMSLGAENSVAYSNNSIAIPTNFTISVTTEILPVSMTKTSVDCTMYICGDSTECSNLLLQYGSFCTQLNRALTGIAVEQDKNTQEVFAQVKQIYKTPPIKDFGGFNFSQILPDPSKPSKRSFIEDLLFNKVTLADAGFIKQYGDCLGDIAARDLICAQKFNGLTVLPPLLTDEMIAQYTSALLAGTITSGWTFGAGAALQIPFAMQMAYRFNGIGVTQNVLYENQKLIANQFNSAIGKIQDSLSSTASALGKLQDVVNQNAQALNTLVKQLSSNFGAISSVLNDILSRLDPPEAEVQIDRLITGRLQSLQTYVTQQLIRAAEIRASANLAATKMSECVLGQSKRVDFCGKGYHLMSFPQSAPHGVVFLHVTYVFAQEKNFTTAPAICHDGKAHFPREGVFVSNGTHWFVTQRNFYEPQIITTDNTFVSGNCDVVIGIVNNTVYDPLQPELESGGSGYIPEAPRDGQAYVRKDGEWVLLSTFL

SEQ ID NO: 9893 - protein, 1177 aa, Artificial Sequence
  SARS-CoV-2/2019-nCoV/USA-CruiseA-18/2020__MT159716.1 spike protein (1-1147)(K986P_V987P_P1069F) Foldon construct
MFVFLVLLPLVSSQCVNLTTRTQLPPAYTNSFTRGVYYPDKVFRSSVLHSTQDLFLPFFSNVTWFHAIHVSGTNGTKRFDNPVLPFNDGVYFASTEKSNIIRGWIFGTTLDSKTQSLLIVNNATNVVIKVCEFQFCNDPFLGVYYHKNNKSWMESELRVYSSANNCTFEYVSQPFLMDLEGKQGNFKNLREFVFKNIDGYFKIYSKHTPINLVRDLPQGFSALEPLVDLPIGINITRFQTLLALHRSYLTPGDSSSGWTAGAAAYYVGYLQPRTFLLKYNENGTITDAVDCALDPLSETKCTLKSFTVEKGIYQTSNFRVQPTESIVRFPNITNLCPFGEVFNATRFASVYAWNRKRISNCVADYSVLYNSASFSTFKCYGVSPTKLNDLCFTNVYADSFVIRGDEVRQIAPGQTGKIADYNYKLPDDFTGCVIAWNSNNLDSKVGGNYNYLYRLFRKSNLKPFERDISTEIYQAGSTPCNGVEGFNCYFPLQSYGFQPTNGVGYQPYRVVVLSFELLHAPATVCGPKKSTNLVKNKCVNFNFNGLTGTGVLTESNKKFLPFQQFGRDIADTTDAVRDPQTLEILDITPCSFGGVSVITPGTNTSNQVAVLYQDVNCTEVPVAIHADQLTPTWRVYSTGSNVFQTRAGCLIGAEHVNNSYECDIPIGAGICASYQTQTNSPRRARSVASQSIIAYTMSLGAENSVAYSNNSIAIPTNFTISVTTEILPVSMTKTSVDCTMYICGDSTECSNLLLQYGSFCTQLNRALTGIAVEQDKNTQEVFAQVKQIYKTPPIKDFGGFNFSQILPDPSKPSKRSFIEDLLFNKVTLADAGFIKQYGDCLGDIAARDLICAQKFNGLTVLPPLLTDEMIAQYTSALLAGTITSGWTFGAGAALQIPFAMQMAYRFNGIGVTQNVLYENQKLIANQFNSAIGKIQDSLSSTASALGKLQDVVNQNAQALNTLVKQLSSNFGAISSVLNDILSRLDPPEAEVQIDRLITGRLQSLQTYVTQQLIRAAEIRASANLAATKMSECVLGQSKRVDFCGKGYHLMSFPQSAPHGVVFLHVTYVFAQEKNFTTAPAICHDGKAHFPREGVFVSNGTHWFVTQRNFYEPQIITTDNTFVSGNCDVVIGIVNNTVYDPLQPELDSGGSGYIPEAPRDGQAYVRKDGEWVLLSTFL

SEQ ID NO: 9894 - protein, 1177 aa, Artificial Sequence
  SARS-CoV-2/SARS-CoV-2/Yunnan-01/human/2020/CHN__MT049951.1 spike protein (1-1147)(K986P_V987P_P1069F) Foldon construct
MFVFLVLLPLVSSQCVNLTTRTQLPPANTNSFTRGVYYPDKVFRSSVLHSTQDLFLPFFSNVTWFHAIHVSGTNGTKRFDNPVLPFNDGVYFASTEKSNIIRGWIFGTTLDSKTQSLLIVNNATNVVIKVCEFQFCNDPFLGVYYHKNNKSWMESEFRVYSSANNCTFEYVSQPFLMDLEGKQGNFKNLREFVFKNIDGYFKIYSKHTPINLVRDLPQGFSALEPLVDLPIGINITRFQTLLALHRSYLTPGDSSSGWTAGAAAYYVGYLQPRTFLLKYNENGTITDAVDCALDPLSETKCTLKSFTVEKGIYQTSNFRVQPTESIVRFPNITNLCPFGEVFNATRFASVYAWNRKRISNCVADYSVLYNSASFSTFKCYGVSPTKLNDLCFTNVYADSFVIRGDEVRQIAPGQTGKIADYNYKLPDDFTGCVIAWNSNNLDSKVGGNYNYLYRLFRKSNLKPFERDISTEIYQAGSTPCNGVEGFNCYFPLQSYGFQPTNGVGYQPYRVVVLSFELLHAPATVCGPKKSTNLVKNKCVNFNFNGLTGTGVLTESNKKFLPFQQFGRDIADTTDAVRDPQTLEILDITPCSFGGVSVITPGTNTSNQVAVLYQDVNCTEVPVAIHADQLTPTWRVYSTGSNVFQTRAGCLIGAEHVNNSYECDIPIGAGICASYQTQTNSPRRARSVASQSIIAYTMSLGAENSVAYSNNSIAIPTNFTISVTTEILPVSMTKTSVDCTMYICGDSTECSNLLLQYGSFCTQLNRALTGIAVEQDKNTQEVFAQVKQIYKTPPIKDFGGFNFSQILPDPSKPSKRSFIEDLLFNKVTLADAGFIKQYGDCLGDIAARDLICAQKFNGLTVLPPLLTDEMIAQYTSALLAGTITSGWTFGAGAALQIPFAMQMAYRFNGIGVTQNVLYENQKLIANQFNSAIGKIQDSLSSTASALGKLQDVVNQNAQALNTLVKQLSSNFGAISSVLNDILSRLDPPEAEVQIDRLITGRLQSLQTYVTQQLIRAAEIRASANLAATKMSECVLGQSKRVDFCGKGYHLMSFPQSAPHGVVFLHVTYVFAQEKNFTTAPAICHDGKAHFPREGVFVSNGTHWFVTQRNFYEPQIITTDNTFVSGNCDVVIGIVNNTVYDPLQPELDSGGSGYIPEAPRDGQAYVRKDGEWVLLSTFL

SEQ ID NO: 9895 - protein, 1177 aa, Artificial Sequence
  SARS-CoV-2/USA/WA-UW292/2020__EPI_ISL_418077 spike protein (1-1147)(K986P_V987P_P1069F) Foldon construct
MFVFLVLLPLVSSQCVNLTTRTQLPPAYTNSFTRGVYYPDKVFRSSVLHSTQDLFLPFFSNVTWFHAIHVSGTNGTKRFDNPVLPFNDGVYFASTEKSNIIRGWIFGTTLDSKTQSLLIVNNATNVVIKVCEFQFCNDPFLGVYYHKNNKSWMESEFRVYSSANNCTFEYVSQPFLMDLEGKQGNFKNLREFVFKNIDGYFKIYSKHTPINLVRDLPQGFSALEPLVDLPIGINITRFQTLLALHRSYLTPGDSSSGWTAGAAAYYVGYLQPRTFLLKYNENGTITDAVDCALDPLSETKCTLKSFTVEKGIYQTSNFRVQPTESIVRFPNITNLCPFGEVFNATRFASVYAWNRKRISNCVADYSVLYNSASFSTFKCYGVSPTKLNDLCFTNVYADSFVIRGDEVRQIAPGQTGKIADYNYKLPDDFTGCVIAWNSNNLDSKVGGNYNYLYRLFRKSNLKPFERDISTEIYQASSTPCNGVEGFNCYFPLQSYGFQPTNGVGYQPYRVVVLSFELLHAPATVCGPKKSTNLVKNKCVNFNFNGLTGTGVLTESNKKFLPFQQFGRDIADTTDAVRDPQTLEILDITPCSFGGVSVITPGTNTSNQVAVLYQDVNCTEVPVAIHADQLTPTWRVYSTGSNVFQTRAGCLIGAEHVNNSYECDIPIGAGICASYQTQTNSPRRARSVASQSIIAYTMSLGAENSVAYSNNSIAIPTNFTISVTTEILPVSMTKTSVDCTMYICGDSTECSNLLLQYGSFCTQLNRALTGIAVEQDKNTQEVFAQVKQIYKTPPIKDFGGFNFSQILPDPSKPSKRSFIEDLLFNKVTLADAGFIKQYGDCLGDIAARDLICAQKFNGLTVLPPLLTDEMIAQYTSALLAGTITSGWTFGAGAALQIPFAMQMAYRFNGIGVTQNVLYENQKLIANQFNSAIGKIQDSLSSTASALGKLQDVVNQNAQALNTLVKQLSSNFGAISSVLNDILSRLDPPEAEVQIDRLITGRLQSLQTYVTQQLIRAAEIRASANLAATKMSECVLGQSKRVDFCGKGYHLMSFPQSAPHGVVFLHVTYVFAQEKNFTTAPAICHDGKAHFPREGVFVSNGTHWFVTQRNFYEPQIITTDNTFVSGNCDVVIGIVNNTVYDPLQPELDSGGSGYIPEAPRDGQAYVRKDGEWVLLSTFL

SEQ ID NO: 9896 - protein, 1177 aa, Artificial Sequence
  SARS-CoV-2/Iceland/192/2020__EPI_ISL_417819 spike protein (1-1147)(K986P_V987P_P1069F) Foldon construct
MFVFFVLLPLVSSQCVNLTTRTQLPPAYTNSFTRGVYYPDKVFRSSVLHSTQDLFLPFFSNVTWFHAIHVSGTNGTKRFDNPVLPFNDGVYFASTEKSNIIRGWIFGTTLDSKTQSLLIVNNATNVVIKVCEFQFCNDPFLGVYYHKNNKSWMESEFRVYSSANNCTFEYVSQPFLMDLEGKQGNFKNLREFVFKNIDGYFKIYSKHTPINLVRDLPQGFSALEPLVDLPIGINITRFQTLLALHRSYLTPGDSSSGWTAGAAAYYVGYLQPRTFLLKYNENGTITDAVDCALDPLSETKCTLKSFTVEKGIYQTSNFRVQPTESIVRFPNITNLCPFGEVFNATRFASVYAWNRKRISNCVADYSVLYNSASFSTFKCYGVSPTKLNDLCFTNVYADSFVIRGDEVRQIAPGQTGKIADYNYKLPDDFTGCVIAWNSNNLDSKVGGNYNYLYRLFRKSNLKPFERDISTEIYQAGSTPCNGVEGFNCYFPLQSYGFQPTNGVGYQPYRVVVLSFELLHAPATVCGPKKSTNLVKNKCVNFNFNGLTGTGVLTESNKKFLPFQQFGRDIADTTDAVRDPQTLEILDITPCSFGGVSVITPGTNTSNQVAVLYQGVNCTEVPVAIHADQLTPTWRVYSTGSNVFQTRAGCLIGAEHVNNSYECDIPIGAGICASYQTQTNSPRRARSVASQSIIAYTMSLGAENSVAYSNNSIAIPTNFTISVTTEILPVSMTKTSVDCTMYICGDSTECSNLLLQYGSFCTQLNRALTGIAVEQDKNTQEVFAQVKQIYKTPPIKDFGGFNFSQILPDPSKPSKRSFIEDLLFNKVTLADAGFIKQYGDCLGDIAARDLICAQKFNGLTVLPPLLTDEMIAQYTSALLAGTITSGWTFGAGAALQIPFAMQMAYRFNGIGVTQNVLYENQKLIANQFNSAIGKIQDSLSSTASALGKLQDVVNQNAQALNTLVKQLSSNFGAISSVLNDILSRLDPPEAEVQIDRLITGRLQSLQTYVTQQLIRAAEIRASANLAATKMSECVLGQSKRVDFCGKGYHLMSFPQSAPHGVVFLHVTYVFAQEKNFTTAPAICHDGKAHFPREGVFVSNGTHWFVTQRNFYEPQIITTDNTFVSGNCDVVIGIVNNTVYDPLQPELDSGGSGYIPEAPRDGQAYVRKDGEWVLLSTFL

SEQ ID NO: 9897 - protein, 1177 aa, Artificial Sequence
  SARS-CoV-2/Belgium/ULG-6939/2020__EPI_ISL_417020 spike protein (1-1147)(K986P_V987P_P1069F) Foldon construct
MFVFLVLLPLVSSQCVNLTTRTQLPPAYTNSFTRGVYYPDKVFRSSVLHSTQDLFLPFFSNVTWFHAIHVSGTNGTKRFDNPVLPFNDGVYFASTEKSNIIRGWIFGTTLDSKTQSLLIVNNATNVVIKVCEFQFCNDPFLGVYYHKNNKSWMESEFRVYSSANNCTFEYVSQPFLMDLEGKQGNFKNLREFVFKNIDGYFKIYSKHTPINLVRDLPQGFSALEPLVDLPIGINITRFQTLLALHRSYLTPGDSSSGWTAGAAAYYVGYLQPRTFLLKYNENGTITDAVDCALDPLSETKCTLKSFTVEKGIYQTSNFRVQPTESIVRFPNITNLCPFGEVFNATRFASVYAWNRKRISNCVADYSVLYNSASFSTFKCYGVSPTKLNDLCFTNVYADSFVIRGDEVRQIAPGQTGKIADYNYKLPDDFTGCVIAWNSNNLDSKVGGNYNYLYRLFRKSNLKPFERDISTEIYQAGSTPCNGVEGFNCYFPLQSYGFQPTNGVGYQPYRVVVLSFELLHAPATVCGPKKSTNLVKNKCVNFNFNGLTGTGVLTESNKKFLPFQQFGRDIADTTDAVRDPQTLEILDITPCSFGGVSVITPGTNTSNQVAVLYQGVNCTEVPVAIHADQLTPTWRVYSTGSNVFQTRAGCLIGAEHVNNSYECDIPIGAGICASYQTQTNSPRRARSVASQSIIAYTMSLGAENSVVYSNNSIAIPTNFTISVTTEILPVSMTKTSVDCTMYICGDSTECSNLLLQYGSFCTQLNRALTGIAVEQDKNTQEVFAQVKQIYKTPPIKDFGGFNFSQILPDPSKPSKRSFIEDLLFNKVTLADAGFIKQYGDCLGDIAARDLICAQKFNGLTVLPPLLTDEMIAQYTSALLAGTITSGWTFGAGAALQIPFAMQMAYRFNGIGVTQNVLYENQKLIANQFNSAIGKIQDSLSSTASALGKLQDVVNQNAQALNTLVKQLSSNFGAISSVLNDILSRLDPPEAEVQIDRLITGRLQSLQTYVTQQLIRAAEIRASANLAATKMSECVLGQSKRVDFCGKGYHLMSFPQSAPHGVVFLHVTYVFAQEKNFTTAPAICHDGKAHFPREGVFVSNGTHWFVTQRNFYEPQIITTDNTFVSGNCDVVIGIVNNTVYDPLQPELDSGGSGYIPEAPRDGQAYVRKDGEWVLLSTFL

SEQ ID NO: 9898 - protein, 1177 aa, Artificial Sequence
  SARS-CoV-2/France/HF2496/2020__EPI_ISL_418231 spike protein (1-1147)(K986P_V987P_P1069F) Foldon construct
MFVFLVLLPLVSSQCVNLTTRTQLPPAYTNSFTRGVYYPDKVFRSSVLHSTQDLFLPFFSNVTWFHAIHVSGTNGTKRFDNPVLPFNDGVYFASTEKSNIIRGWIFGTTLDSKTQSLLIVNNATNVVIKVCEFQFCNDPFLGVYYHKNNKSWMESEFRVYSSANNCTFEYVSQPFLMDLEGKQGNFKNLREFVFKNIDGYFKIYSKHTPINLVRDLPQGFSALEPLVDLPIGINITRFQTLLALHRSYLTPGDSSSGWTAGAAAYYVGYLQPRTFLLKYNENGTITDAVDCALDPLSETKCTLKSFTVEKGIYQTSNFRVQPTESIVRFPNITNLCPFGEVFNATRFASVYAWNRKRISNCVADYSVLYNSASFSTFKCYGVSPTKLNDLCFTNVYADSFVIRGDEVRQIAPGQTGKIADYNYKLPDDFTGCVIAWNSNNLDSKVGGNYNYLYRLFRKSNLKPFERDISTEIYQAGSTPCNGVEGFNCYFPLQSYGFQPTNGVGYQPYRVVVLSFELLHAPATVCGPKKSTNLVKNKCVNFNFNGLTGTGVLTESNKKFLPFQQFGRDIADTTDAVRDPQTLEILDITPCSFGGVSVITPGTNTSNQVAVLYQGVNCTEVPVAIHADQLTPTWRVYSTGSNVFQTRAGCLIGAEHVNNSYECDIPIGAGICASYQTQTNSPRRARSVASQSIIAYTMSLGAENSVAYSNNSIAIPTNFTISVTTEILPVSMTKTSVDCTMYICGDSTECSNLLLQYGSFCTQLNRALTGIAVEQDKNTQEVFAQVKQIYKTPPIKDFGGFNFSQILPDPSKPSKRSFIEDLLFNKVTLADAGFIKQYGDCLGDIVARDLICAQKFNGLTVLPPLLTDEMIAQYTSALLAGTITSGWTFGAGAALQIPFAMQMAYRFNGIGVTQNVLYENQKLIANQFNSAIGKIQDSLSSTASALGKLQDVVNQNAQALNTLVKQLSSNFGAISSVLNDILSRLDPPEAEVQIDRLITGRLQSLQTYVTQQLIRAAEIRASANLAATKMSECVLGQSKRVDFCGKGYHLMSFPQSAPHGVVFLHVTYVFAQEKNFTTAPAICHDGKAHFPREGVFVSNGTHWFVTQRNFYEPQIITTDNTFVSGNCDVVIGIVNNTVYDPLQPELDSGGSGYIPEAPRDGQAYVRKDGEWVLLSTFL

SEQ ID NO: 9899 - protein, 1177 aa, Artificial Sequence
  SARS-CoV-2/USA/WA-UW291/2020__EPI_ISL_418076 spike protein (1-1147)(K986P_V987P_P1069F) Foldon construct
MFVFLVLLPLVSSQCVNLTTRTQLPPAYTNSFTRGVYYPDKVFRSSVLHSTQDLFLPFFSNVTWFHAIHVSGTNGTKRFDNPVLPFNDGVYFASTEKSNIIRGWIFGTTLDSKTQSLLIVNNATNVVIKVCEFQFCNDPFLGVYYHKNNKSWMESEFRVYSSANNCTFEYVSQPFLMDLEGKQGNFKNLREFVFKNIDGYFKIYSKHTPINLVRDLPQGFSALEPLVDLPIGINITRFQTLLALHRSYLTPGDSSSGWTAGAAAYYVGYLQPRTFLLKYNENGTITDAVDCALDPLSETKCTLKSFTVEKGIYQTSNFRVQPTESIVRFPNITNLCPFGEVFNATRFASVYAWNRKRISNCVADYSVLYNSASFSTFKCYGVSPTKLNDLCFTNVYADSFVIRGDEVRQIAPGQTGKIADYNYKLPDDFTGCVIAWNSNNLDSKVGGNYNYLYRLFRKSNLKPFERDISTEIYQAGSTPCNGVEGFNCYFPLQSYGFQPTNGVGYQPYRVVVLSFELLHAPATVCGPKKSTNLVKNKCVNFNFNGLTGTGVLTESNKKFLPFQQFGRDIADTTDAVRDPQTLEILDITPCSFGGVSVITPGTNTSNQVAVLYQGVNCTEVPVAIHADQLTPTWRVYSTGSNVFQTRAGCLIGAEHVNNSYECDIPIGAGICASYQTQTNSPRRARSVASQSIIAYTMSLGAENSVAYSNNSIAIPTNFTISVTTEILPVSMTKTSVDCTMYICGDSTECSNLLLQYGSFCTQLNRALTGIAVEQDKNTQEVFAQVKQIYKTPPIKDFGGFNFSQILPDPSKPSKRSFIEDLLFNKVTLADAGFIKQYGDCLGDIAARDLICAQKFNGLTVLPPLLTDEMIAQYTSALLAGTITSGWTFGAGAALQIPFAMQMAYRFNGIGVTQNVLYENQKLIANQFNSAIGKIQYSLSSTASALGKLQDVVNQNAQALNTLVKQLSSNFGAISSVLNDILSRLDPPEAEVQIDRLITGRLQSLQTYVTQQLIRAAEIRASANLAATKMSECVLGQSKRVDFCGKGYHLMSFPQSAPHGVVFLHVTYVFAQEKNFTTAPAICHDGKAHFPREGVFVSNGTHWFVTQRNFYEPQIITTDNTFVSGNCDVVIGIVNNTVYDPLQPELDSGGSGYIPEAPRDGQAYVRKDGEWVLLSTFL

SEQ ID NO: 9900 - protein, 1177 aa, Artificial Sequence; identical to SEQ ID NO: 9863
  SARS-CoV-2/Portugal/PT0034/2020__EPI_ISL_418019 spike protein (1-1147)(K986P_V987P_P1069F) Foldon construct

SEQ ID NO: 9901 - protein, 1177 aa, Artificial Sequence; identical to SEQ ID NO: 9855
  SARS-CoV-2/Iceland/202/2020__EPI_ISL_417750 spike protein (1-1147)(K986P_V987P_P1069F) Foldon construct

SEQ ID NO: 9902 - protein, 1177 aa, Artificial Sequence
  SARS-CoV-2/USA/WA-UW261/2020__EPI_ISL_418046 spike protein (1-1147)(K986P_V987P_P1069F) Foldon construct
MFVFLVLLPLVSSQCVNLTTRTQLPPAYTNSFTRGVYYPDKVFRSSVLHSTQDLFLPFFSNVTWFHAIHVSGTNGTKRFDNPVLPFNDGVYFASTEKSNIIRGWIFGTTLDSKTQSLLIVNNATNVVIKVCEFQFCNDPFLGVYYHKNNKSWMESEFRVYSSANNCTFEYVSQPFLMDLEGKQGNFKNLREFVFKNIDGYFKIYSKHTPINLVRDLPQGFSALEPLVDLPIGINITRFQTLLALHRSYLTPGDSSSGWTAGAAAYYVGYLQPRTFLLKYNENGTITDAVDCALDPLSETKCTLKSFTVEKGIYQTSNFRVQPTESIVRFPNITNLCPFGEVFNATRFTSVYAWNRKRISNCVADYSVLYNSASFSTFKCYGVSPTKLNDLCFTNVYADSFVIRGDEVRQIAPGQTGKIADYNYKLPDDFTGCVIAWNSNNLDSKVGGNYNYLYRLFRKSNLKPFERDISTEIYQAGSTPCNGVEGFNCYFPLQSYGFQPTNGVGYQPYRVVVLSFELLHAPATVCGPKKSTNLVKNKCVNFNFNGLTGTGVLTESNKKFLPFQQFGRDIADTTDAVRDPQTLEILDITPCSFGGVSVITPGTNTSNQVAVLYQDVNCTEVPVAIHADQLTPTWRVYSTGSNVFQTRAGCLIGAEHVNNSYECDIPIGAGICASYQTQTNSPRRARSVASQSIIAYTMSLGAENSVAYSNNSIAIPTNFTISVTTEILPVSMTKTSVDCTMYICGDSTECSNLLLQYGSFCTQLNRALTGIAVEQDKNTQEVFAQVKQIYKTPPIKDFGGFNFSQILPDPSKPSKRSFIEDLLFNKVTLADAGFIKQYGDCLGDIAARDLICAQKFNGLTVLPPLLTDEMIAQYTSALLAGTITSGWTFGAGAALQIPFAMQMAYRFNGIGVTQNVLYENQKLIANQFNSAIGKIQDSLSSTASALGKLQDVVNQNAQALNTLVKQLSSNFGAISSVLNDILSRLDPPEAEVQIDRLITGRLQSLQTYVTQQLIRAAEIRASANLAATKMSECVLGQSKRVDFCGKGYHLMSFPQSAPHGVVFLHVTYVFAQEKNFTTAPAICHDGKAHFPREGVFVSNGTHWFVTQRNFYEPQIITTDNTFVSGNCDVVIGIVNNTVYDPLQPELDSGGSGYIPEAPRDGQAYVRKDGEWVLLSTFL

SEQ ID NO: 9903 - protein, 1177 aa, Artificial Sequence
  SARS-CoV-2/Portugal/PT0035/2020__EPI_ISL_418020 spike protein (1-1147)(K986P_V987P_P1069F) Foldon construct
MFVFLVLLPLVSSQCVNLTTRTQLPPAYTNSFTRGVYYPDKVFRSSVLHSTQDLFLPFFSNVTWFHAIHVSGTNGTKRFDNPVLPFNDGVYFASTEKSNIIRGWIFGTTLDSKTQSLLIVNNATNVVIKVCEFQFCNDPFLGVYYHKNNKSWMESEFRVYSSANNCTFEYVSQPFLMDLEGKQGNFKNLREFVFKNIDGYFKIYSKHTPINLVRDLPQGFSALEPLVDLPIGINITRFQTLLALHRSYLTPGDSSSGWTAGAAAYYVGYLQPRTFLLKYNENGTITDAVDCALDPLSETKCTLKSFTVEKGIYQTSNFRVQPTESIVRFPNITNLCPFGEVFNATRFASVYAWNRKRISNCVADYSVLYNSASFSTFKCYGVSPTKLNDLCFTNVYADSFVIRGDEVRQIAPGQTGKIADYNYKLPDDFTGCVIAWNSNNLDSKVGGNYNYLYRLFRKSNLKPFERDISTEIYQAGSTPCNGVEGFNCYFPLQSYGFQPTNGVGYQPYRVVVLSFELLHAPATVCGPKKSTNLVKNKCVNFNFNGLTGTGVLTESNKKFLPFQQFGRDIADTTDAVRDPQTLEILDITPCSFGGVSVITPGTNTSNQVAVLYQDVNCTEVPVAIHADQLTPTWRVYSTGSNVFQTRAGCLIGAEHVNNSYECDIPIGAGICASYQTQTNSPRRARSVASQSIIAYTMSLGAENSVAYSNNSIAIPTNFTISVTTEILPVSMTKTSVDCTMYICGDSTECSNLLLQYGSFCTQLNRALTGIAVEQDKNTQEVFAQVKQIYKTPPIKDFGGFNFSQILPDPSKPSKRSFIEDLLFNKVTLADAGFIKQYGDCLGDISARDLICAQKFNGLTVLPPLLTDEMIAQYTSALLAGTITSGWTFGAGAALQIPFAMQMAYRFNGIGVTQNVLYENQKLIANQFNSAIGKIQDSLSSTASALGKLQDVVNQNAQALNTLVKQLSSNFGAISSVLNDILSRLDPPEAEVQIDRLITGRLQSLQTYVTQQLIRAAEIRASANLAATKMSECVLGQSKRVDFCGKGYHLMSFPQSAPHGVVFLHVTYVFAQEKNFTTAPAICHDGKAHFPREGVFVSNGTHWFVTQRNFYEPQIITTDNTFVSGNCDVVIGIVNNTVYDPLQPELDSGGSGYIPEAPRDGQAYVRKDGEWVLLSTFL

SEQ ID NO: 9904 - protein, 1177 aa, Artificial Sequence
  SARS-CoV-2/USA/NY-NYUMC7/2020__EPI_ISL_418192 spike protein (1-1147)(K986P_V987P_P1069F) Foldon construct
MFVFLVLLPLVSSQCVNLTTRTQLPPAYTNSFTRGVYYPDKVFRSSVLHSTQDLFLPFFSNVTWFHAIHVSGTNGTKRFDNPVLPFNDGVYFASTEKSNIIRGWIFGTTLDSKTQSLLIVNNATNVVIKVCEFQFCNDPFLGVYHHKNNKSWMESEFRVYSSANNCTFEYVSQPFLMDLEGKQGNFKNLREFVFKNIDGYFKIYSKHTPINLVRDLPQGFSALEPLVDLPIGINITRFQTLLALHRSYLTPGDSSSGWTAGAAAYYVGYLQPRTFLLKYNENGTITDAVDCALDPLSETKCTLKSFTVEKGIYQTSNFRVQPTESIVRFPNITNLCPFGEVFNATRFASVYAWNRKRISNCVADYSVLYNSASFSTFKCYGVSPTKLNDLCFTNVYADSFVIRGDEVRQIAPGQTGKIADYNYKLPDDFTGCVIAWNSNNLDSKVGGNYNYLYRLFRKSNLKPFERDISTEIYQAGSTPCNGVEGFNCYFPLQSYGFQPTNGVGYQPYRVVVLSFELLHAPATVCGPKKSTNLVKNKCVNFNFNGLTGTGVLTESNKKFLPFQQFGRDIADTTDAVRDPQTLEILDITPCSFGGVSVITPGTNTSNQVAVLYQGVNCTEVPVAIHADQLTPTWRVYSTGSNVFQTRAGCLIGAEHVNNSYECDIPIGAGICASYQTQTNSPRRARSVASQSIIAYTMSLGAENSVAYSNNSIAIPTNFTISVTTEILPVSMTKTSVDCTMYICGDSTECSNLLLQYGSFCTQLNRALTGIAVEQDKNTQEVFAQVKQIYKTPPIKDFGGFNFSQILPDPSKPSKRSFIEDLLFNKVTLADAGFIKQYGDCLGDIAARDLICAQKFNGLTVLPPLLTDEMIAQYTSALLAGTITSGWTFGAGAALQIPFAMQMAYRFNGIGVTQNVLYENQKLIANQFNSAIGKIQDSLSSTASALGKLQDVVNQNAQALNTLVKQLSSNFGAISSVLNDILSRLDPPEAEVQIDRLITGRLQSLQTYVTQQLIRAAEIRASANLAATKMSECVLGQSKRVDFCGKGYHLMSFPQSAPHGVVFLHVTYVFAQEKNFTTAPAICHDGKAHFPREGVFVSNGTHWFVTQRNFYEPQIITTDNTFVSGNCDVVIGIVNNTVYDPLQPELDSGGSGYIPEAPRDGQAYVRKDGEWVLLSTFL

SEQ ID NO: 9905 - protein, 1177 aa, Artificial Sequence
  SARS-CoV-2/Iceland/189/2020__EPI_ISL_417709 spike protein (1-1147)(K986P_V987P_P1069F) Foldon construct
MFVFLVLLPLVSSQCVNLTTRTQLPPAYTNSFTRGVYYPDKVFRSSVLHSTQDLFLPFFSNVTWFHAIHVSGTNGTKRFDNPVLPFNDGVYFASTEKSNIIRGWIFGTTLDSKTQSLLIVNNATNVVIKVCEFQFCNDPFLGVYYHKNNKSWMESEFRVYSSANNCTFEYVSQPFLMDLEGKQGNFKNLREFVFKNIDGYFKIYSKHTPINLVRDLPQGFSALEPLVDLPIGINITRFQTLLALHRSYLTPGDSSSGWTAGAAAYYVGYLQPRTFLLKYNENGTITDAVDCALDPLSETKCTLKSFTVEKGIYQTSNFRVQPTESIVRFPNITNLCPFGEVFNATRFASVYAWNRKRISNCVADYSVLYNSASFSTFKCYGVSPTKLNDLCFTNVYADSFVIRGDEVRQIAPGQTGKIADYNYKLPDDFTGCVIAWNSNNLDSKVGGNYNYLYRLFRKSNLKPFERDISTEIYQAGSTPCNGVEGFNCYFPLQSYGFQPTNGVGYQPYRVVVLSFELLHAPATVCGPKKSTNLVKNKCVNFNFNGLTGTGVLTESNKKFLPFQQFGRDIADTTDAVRDPQTLEILDITPCSFGGVSVITPGTNTSNQVAVLYQGVNCTEVPVAIHADQLTPTWRVYSTGSNVFQTRAGCLIGAEHVNNSYECDIPIGAGICASYQTQTNSPRRARSVASQSIIAYTMSLGAENSVAYSNNSIAIPTNFTISVTTEILPVSMTKTSVDCTMYICGDSTECSNLLLQYGSFCTQLNRALTGIAVEQDKNTQEVFAQVKQIYKTPPIKDFGGFNFSQILPDPSKPSKRSFIEDLLFNKVTLADAGFTKQYGDCLGDIAARDLICAQKFNGLTVLPPLLTDEMIAQYTSALLAGTITSGWTFGAGAALQIPFAMQMAYRFNGIGVTQNVLYENQKLIANQFNSAIGKIQDSLSSTASALGKLQDVVNQNAQALNTLVKQLSSNFGAISSVLNDILSRLDPPEAEVQIDRLITGRLQSLQTYVTQQLIRAAEIRASANLAATKMSECVLGQSKRVDFCGKGYHLMSFPQSAPHGVVFLHVTYVFAQEKNFTTAPAICHDGKAHFPREGVFVSNGTHWFVTQRNFYEPQIITTDNTFVSGNCDVVIGIVNNTVYDPLQPELDSGGSGYIPEAPRDGQAYVRKDGEWVLLSTFL

SEQ ID NO: 9906 - protein, 1177 aa, Artificial Sequence
  SARS-CoV-2/Australia/NSW56/2020__EPI_ISL_417408 spike protein (1-1147)(K986P_V987P_P1069F) Foldon construct
MFVFLVLLPLVSSQCVNLTTRTQLPPAYTNSFTRGVYYPDKVFRSSVLHSTQDLFLPFFSNVTWFHAIHVSGTNGTKRFDNPVLPFNDGVYFASTEKSNIIRGWIFGTTLDSKTQSLLIVNNATNVVIKVCEFQFCNDPFLGVYYHKNNKSWMESEFRVYSSANNCTFEYVSQPFLMDLEGKQGNFKNLREFVFKNIDGYFKIYSKHTPINLVRDLPQGFSALEPLVDLPIGINITRFQTLLALHRSYLTPGDSSSGWTAGAAAYYVGYLQPRTFLLKYNENGTITDAVDCALDPLSETKCTLKSFTVEKGIYQTSNFRVQPTESIVRFPNITNLCPFGEVFNATRFASVYAWNRKRISNCVADYSVLYNSASFSTFKCYGVSPTKLNDLCFTNVYADSFVIRGDEVRQIAPGQTGKIADYNYKLPDDFTGCVIAWNSNNLDSKVGGNYNYLYRLFRKSNLKPFERDISTEIYQAGSTPCNGVEGFNCYFPLQSYGFQPTNGVGYQPYRVVVLSFELLHAPATVCGPKKSTNLVKNKCVNFNFNGLTGTGVLTESNKKFLPFQQFGRDIADTTDAVRDPQTLEILDITPCSFGGVSVITPGTNTSNQVAVLYQDVNCTEVPVAIHADQLTPTWRVYSTGSNVFQTRAGCLIGAEHVNNSYECDIPIGAGICASYQTQTNSPRRARSVASQSIIAYTMSLGAENSVAYSNNSIAIPTNFTISVTTEILPVSMTKTSVDCTMYICGDSTECSNLLLQYGSFCTQLNRALTGIAVEQDKNTQEVFAQVKQIYKTPPIKDFGGFNFSQILPDSSKPSKRSFIEDLLFNKVTLADAGFIKQYGDCLGDIAARDLICAQKFNGLTVLPPLLTDEMIAQYTSALLAGTITSGWTFGAGAALQIPFAMQMAYRFNGIGVTQNVLYENQKLIANQFNSAIGKIQDSLSSTASALGKLQDVVNQNAQALNTLVKQLSSNFGAISSVLNDILSRLDPPEAEVQIDRLITGRLQSLQTYVTQQLIRAAEIRASANLAATKMSECVLGQSKRVDFCGKGYHLMSFPQSAPHGVVFLHVTYVFAQEKNFTTAPAICHDGKAHFPREGVFVSNGTHWFVTQRNFYEPQIITTDNTFVSGNCDVVIGIVNNTVYDPLQPELDSGGSGYIPEAPRDGQAYVRKDGEWVLLSTFL

SEQ ID NO: 9907 - protein, 1177 aa, Artificial Sequence
  SARS-CoV-2/Iceland/280/2020__EPI_ISL_417608 spike protein (1-1147)(K986P_V987P_P1069F) Foldon construct
MFVFLVLLPLVSSQCVNLTTRTQLPPAYTNSFTRGVYYPDKVFRSSVLHSTQDLFLPFFSNVTWFHAIHVSGTNGTKRFDNPVLPFNDGVYFASTEKSNIIRGWIFGTTLDSKTQSLLIVNNATNVVIKVCEFQFCNDPFLGVYYHKNNKSWMESEFRVYSSANNCTFEYVSQPFLMDLEGKQGNFKNLREFVFKNIDGYFKIYSKHTPINLVRDLPQGFSALEPLVDLPIGINITRFQTLLALHRSYLTPGDSSSGWTAGAAAYYVGYLQPRTFLLKYNENGTITDAVDCALDPLSETKCTLKSFTVEKGIYQTSNFRVQPTESIVRFPNITNLCPFGEVFNATRFASVYAWNRKRISNCVADYSVLYNSASFSTFKCYGVSPTKLNDLCFTNVYADSFVIRGDEVRQIAPGQTGKIADYNYKLPDDFTGCVIAWNSNNLDSKVGGNYNYLYRLFRKSNLKPFERDISTEIYQAGSTPCNGVEGFNCYFPLQSYGFQPTNGVGYQPYRVVVLSFELLHAPATVCGPKKSTNLVKNKCVNFNFNGLTGTGVLTESNKKFLPFQQFGRDIADTTDAVRDPQTLEILDITPCSFGGVSVITPGTNTSNQVAVLYQGVNCTEVPVAIHADQLTPTWRVYSTGSNVFQTRAGCLIGAEHVNNSYECDIPIGAGICASYHTQTNSPRRARSVASQSIIAYTMSLGAENSVAYSNNSIAIPTNFTISVTTEILPVSMTKTSVDCTMYICGDSTECSNLLLQYGSFCTQLNRALTGIAVEQDKNTQEVFAQVKQIYKTPPIKDFGGFNFSQILPDPSKPSKRSFIEDLLFNKVTLADAGFIKQYGDCLGDIAARDLICAQKFNGLTVLPPLLTDEMIAQYTSALLAGTITSGWTFGAGAALQIPFAMQMAYRFNGIGVTQNVLYENQKLIANQFNSAIGKIQDSLSSTASALGKLQDVVNQNAQALNTLVKQLSSNFGAISSVLNDILSRLDPPEAEVQIDRLITGRLQSLQTYVTQQLIRAAEIRASANLAATKMSECVLGQSKRVDFCGKGYHLMSFPQSAPHGVVFLHVTYVFAQEKNFTTAPAICHDGKAHFPREGVFVSNGTHWFVTQRNFYEPQIITTDNTFVSGNCDVVIGIVNNTVYDPLQPELDSGGSGYIPEAPRDGQAYVRKDGEWVLLSTFL

SEQ ID NO: 9908 - protein, 1177 aa, Artificial Sequence; identical to SEQ ID NO: 9863
  SARS-CoV-2/Iceland/247/2020__EPI_ISL_417575 spike protein (1-1147)(K986P_V987P_P1069F) Foldon construct

SEQ ID NO: 9909 - protein, 1177 aa, Artificial Sequence
  SARS-CoV-2/Iceland/238/2020__EPI_ISL_417566 spike protein (1-1147)(K986P_V987P_P1069F) Foldon construct
MFVFLVLLPLVSSQCVNLTTRTQLPPAYTNSFTRGVYYPDKVFRSSVLHSTQDLFLPFFSNVTWFHAIHVSGTNGTKRFDNPVLPFNDGVYFASTEKSNIIRGWIFGTTLDSKTQSLLIVNNATNVVIKVCEFQFCNDPFLGVYYHKNNKSWMESEFRVYSSANNCTFEYVSQPFLMDLEGKQGNFKNLREFVFKNIDGYFKIYSKHTPINLVRDLPQGFSALEPLVDLPIGINITRFQTLLALHRSYLTPGDSSSGWTAGAAAYYVGYLQPRTFLLKYNENGTITDAVDCALDPLSETKCTLKSFTVEKGIYQTSNFRVQPTESIVRFPNITNLCPFGEVFNATRFASVYAWNRKRISNCVADYSVLYNSASFSTFKCYGVSPTKLNDLCFTNVYADSFVIRGDEVRQIAPGQTGKIADYNYKLPDDFTGCVIAWNSNNLDSKVGGNYNYLYRLFRKSNLKPFERDISTEIYQAGSTPCNGVEGFNCYFPLQSYGFQPTNGVGYQPYRVVVLSFELLHAPATVCGPKKSTNLVKNKCVNFNFNGLTGTGVLTESNKKFLPFQQFGRDIADTTDAVRDPQTLEILDITPCSFGGVSVITPGTNTSNQVAVLYQGVNCTEVPVAIHADQLTPTWRVYSTGSNVFQTRAGCLIGAEHVNNSYECDIPIGAGICASYQTQTNSPRRARSVASQSIIAYTMSLGAENSVAYSNNSIAIPTNFTISVTTEILPVSMTKTSVDCTMYICGDSTECSNLLLQYGSFCTQLNRALTGIAVEQDKNTQEVFAQVKQIYKTPPIKDFGGFNFSQILPDPSKPSKRSFIEDLLFNKVTLADVGFIKQYGDCLGDIAARDLICAQKFNGLTVLPPLLTDEMIAQYTSALLAGTITSGWTFGAGAALQIPFAMQMAYRFNGIGVTQNVLYENQKLIANQFNSAIGKIQDSLSSTASALGKLQDVVNQNAQALNTLVKQLSSNFGAISSVLNDILSRLDPPEAEVQIDRLITGRLQSLQTYVTQQLIRAAEIRASANLAATKMSECVLGQSKRVDFCGKGYHLMSFPQSAPHGVVFLHVTYVFAQEKNFTTAPAICHDGKAHFPREGVFVSNGTHWFVTQRNFYEPQIITTDNTFVSGNCDVVIGIVNNTVYDPLQPELDSGGSGYIPEAPRDGQAYVRKDGEWVLLSTFL

SEQ ID NO: 9910 - protein, 1177 aa, Artificial Sequence
  SARS-CoV-2/Greece/16/2020__EPI_ISL_418265 spike protein (1-1147)(K986P_V987P_P1069F) Foldon construct
MFVFLVLLPLVSSQCVNLTTRTQLPPAYTNSFTRGVYYPDKVFRSSVLHSTQDLFLPFFSNVTWFHAIHVSGTNGTKRFDNPVLPFNDGVYFASTEKSNIIRGWIFGTTLDSKTQSLLIVNNATNVVIKVCEFQFCNDPFLGVYYHKNNKSWMESEFRVYSSANNCTFEYVSQPFLMDLEGKQGNFKNLREFVFKNVDGYFKIYSKHTPINLVRDLPQGFSALEPLVDLPIGINITRFQTLLALHRSYLTPGDSSSGWTAGAAAYYVGYLQPRTFLLKYNENGTITDAVDCALDPLSETKCTLKSFTVEKGIYQTSNFRVQPTESIVRFPNITNLCPFGEVFNATRFASVYAWNRKRISNCVADYSVLYNSASFSTFKCYGVSPTKLNDLCFTNVYADSFVIRGDEVRQIAPGQTGKIADYNYKLPDDFTGCVIAWNSNNLDSKVGGNYNYLYRLFRKSNLKPFERDISTEIYQAGSTPCNGVEGFNCYFPLQSYGFQPTNGVGYQPYRVVVLSFELLHAPATVCGPKKSTNLVKNKCVNFNFNGLTGTGVLTESNKKFLPFQQFGRDIADTTDAVRDPQTLEILDITPCSFGGVSVITPGTNTSNQVAVLYQDVNCTEVPVAIHADQLTPTWRVYSTGSNVFQTRAGCLIGAEHVNNSYECDIPIGAGICASYQTQTNSPRRARSVASQSIIAYTMSLGAENSVAYSNNSIAIPTNFTISVTTEILPVSMTKTSVDCTMYICGDSTECSNLLLQYGSFCTQLNRALTGIAVEQDKNTQEVFAQVKQIYKTPPIKDFGGFNFSQILPDPSKPSKRSFIEDLLFNKVTLADAGFIKQYGDCLGDIAARDLICAQKFNGLTVLPPLLTDEMIAQYTSALLAGTITSGWTFGAGAALQIPFAMQMAYRFNGIGVTQNVLYENQKLIANQFNSAIGKIQDSLSSTASALGKLQDVVNQNAQALNTLVKQLSSNFGAISSVLNDILSRLDPPEAEVQIDRLITGRLQSLQTYVTQQLIRAAEIRASANLAATKMSECVLGQSKRVDFCGKGYHLMSFPQSAPHGVVFLHVTYVFAQEKNFTTAPAICHDGKAHFPREGVFVSNGTHWFVTQRNFYEPQIITTDNTFVSGNCDVVIGIVNNTVYDPLQPELDSGGSGYIPEAPRDGQAYVRKDGEWVLLSTFL

SEQ ID NO: 9911 - protein, 1177 aa, Artificial Sequence
  SARS-CoV-2/Iceland/319/2020__EPI_ISL_417648 spike protein (1-1147)(K986P_V987P_P1069F) Foldon construct
MFVFLVLLPLVSSQCVNLTTRTQLPPAYTNSFTRGVYYPDKVFRSSVLHSTQDLFLPFFSNVTWFHAIHVSGTNGTKRFDNPVLPFNDGVYFASTEKSNIIRGWIFGTTLDSKTQSLLIVNNATNVVIKVCEFQFCNDPFLGVYYHKNNKSWMESEFRVYSSANNCTFEYVSQPFLIDLEGKQGNFKNLREFVFKNIDGYFKIYSKHTPINLVRDLPQGFSALEPLVDLPIGINITRFQTLLALHRSYLTPGDSSSGWTAGAAAYYVGYLQPRTFLLKYNENGTITDAVDCALDPLSETKCTLKSFTVEKGIYQTSNFRVQPTESIVRFPNITNLCPFGEVFNATRFASVYAWNRKRISNCVADYSVLYNSASFSTFKCYGVSPTKLNDLCFTNVYADSFVIRGDEVRQIAPGQTGKIADYNYKLPDDFTGCVIAWNSNNLDSKVGGNYNYLYRLFRKSNLKPFERDISTEIYQAGSTPCNGVEGFNCYFPLQSYGFQPTNGVGYQPYRVVVLSFELLHAPATVCGPKKSTNLVKNKCVNFNFNGLTGTGVLTESNKKFLPFQQFGRDIADTTDAVRDPQTLEILDITPCSFGGVSVITPGTNTSNQVAVLYQGVNCTEVPVAIHADQLTPTWRVYSTGSNVFQTRAGCLIGAEHVNNSYECDIPIGAGICASYQTQTNSPRRARSVASQSIIAYTMSLGAENSVAYSNNSIAIPTNFTISVTTEILPVSMTKTSVDCTMYICGDSTECSNLLLQYGSFCTQLNRALTGIAVEQDKNTQEVFAQVKQIYKTPPIKDFGGFNFSQILPDPSKPSKRSFIEDLLFNKVTLADAGFIKQYGDCLGDIAARDLICAQKFNGLTVLPPLLTDEMIAQYTSALLAGTITSGWTFGAGAALQIPFAMQMAYRFNGIGVTQNVLYENQKLIANQFNSAIGKIQDSLSSTASALGKLQDVVNQNAQALNTLVKQLSSNFGAISSVLNDILSRLDPPEAEVQIDRLITGRLQSLQTYVTQQLIRAAEIRASANLAATKMSECVLGQSKRVDFCGKGYHLMSFPQSAPHGVVFLHVTYVFAQEKNFTTAPAICHDGKAHFPREGVFVSNGTHWFVTQRNFYEPQIITTDNTFVSGNCDVVIGIVNNTVYDPLQPELDSGGSGYIPEAPRDGQAYVRKDGEWVLLSTFL

SEQ ID NO: 9912 - protein, 1177 aa, Artificial Sequence
  SARS-CoV-2/Congo/94/2020__EPI_ISL_417947 spike protein (1-1147)(K986P_V987P_P1069F) Foldon construct
MFVFLVLLPLVSSQCVNLTTRTQLPPAYTNSFTRGVYYPDKVFRSSVLHSTQDLFLPFFSNVTWFHAIHVSGTNGTKRFDNPVLPFNDGVYFASTEKSNIIRGWIFGTTLDSKTQSLLIVNNATNVVIKVCEFQFCNDPFLGVYYHKNNKSWMESEFRVYSSANNCTFEYVSQPFLMDLEGKQGNFKNLREFVFKNIDGYFKIYSKHTPINLVRDLPQGFSALEPLVDLPIGINITRFQTLLALHRSYLTPGDSSSGWTAGAAAYYVGYLQPRTFLLKYNENGTITDAVDCALDPLSETKCTLKSFTVEKGIYQTSNFRVQPTESIVRFPNITNLCPFGEVFNATRFASVYAWNRKRISNCVADYSVLYNSASFSTFKCYGVSPTKLNDLCFTNVYADSFVIRGDEVRQIAPGQTGKIADYNYKLPDDFTGCVIAWNSNNLDSKVGGNYNYLYRLFRKSNLKPFERDISTEIYQAGSTPCNGVEGFNCYFPLQSYGFQPTNGVGYQPYRVVVLSFELLHAPATVCGPKKSTNLVKNKCVNFNFNGLTGTGVLTESNKKFLPFQQFGRDIADTTDAVRDPQTLEILDITPCSFGGVSVITPGTNTSNQVAVLYQGVNCTEVPVAIHADQLTPTWRVYSTGSNVFQTRAGCLIGAEHVNNSYECDIPIGAGICASYQTQTNSPRRARSVASQSIIAYTMSLGAENSVAYSNNSIAIPTNFTISVTTEILPVSMTKTSVDCTMYICGDSTECSNLLLQYGSFCTQLNRALTGIAVEQDKNTQEVFAQVKQIYKTPPIKDFGGFNFSQILPDPSKPSKRSFIEDILFNKVTLADAGFIKQYGDCLGDIAARDLICAQKFNGLTVLPPLLTDEMIAQYTSALLAGTITSGWTFGAGAALQIPFAMQMAYRFNGIGVTQNVLYENQKLIANQFNSAIGKIQDSLSSTASALGKLQDVVNQNAQALNTLVKQLSSNFGAISSVLNDILSRLDPPEAEVQIDRLITGRLQSLQTYVTQQLIRAAEIRASANLAATKMSECVLGQSKRVDFCGKGYHLMSFPQSAPHGVVFLHVTYVFAQEKNFTTAPAICHDGKAHFPREGVFVSNGTHWFVTQRNFYEPQIITTDNTFVSGNCDVVIGIVNNTVYDPLQPELDSGGSGYIPEAPRDGQAYVRKDGEWVLLSTFL

SEQ ID NO: 9913 - protein, 1177 aa, Artificial Sequence
  SARS-CoV-2/Congo/158/2020__EPI_ISL_417950 spike protein (1-1147)(K986P_V987P_P1069F) Foldon construct
MFVFLVLLPLVSSQCVNLTTRTQLPPAYTNSFTRGVYYPDKVFRSSVLHSTQDLFLPFFSNVTWFHAIHVSGTNGTKRFDNPVLPFNDGVYFASTEKSNIIRGWIFGTTLDSKTQSLLIVNNATNVVIKVCEFQFCNDPFLGVYYHKNNKSWMESEFRVYSSANNCTFEYVSQPFLMDLEGKQGNFKNLREFVFKNIDGYFKIYSKHTPINLVRDLPQGFSALEPLVDLPIGINITRFQTLLALHRSYLTPGDSSSGWTAGAAAYYVGYLQPRTFLLKYNENGTITDAVDCALDPLSETKCTLKSFTVEKGIYQTSNFRVQPTESIVRFPNITNLCPFGEVFNATRFASVYAWNRKRISNCVADYSVLYNSASFSTFKCYGVSPTKLNDLCFTNVYADSFVIRGDEVRQIAPGQTGKIADYNYKLPDDFTGCVIAWNSNNLDSKVGGNYNYLYRLFRKSNLKPFERDISTEIYQAGSTPCNGVEGFNCYFPLQSYGFQPTNGVGYQPYRVVVLSFELLHAPATVCGPKKSTNLVKNKCVNFNFNGLTGTGVLTESNKKFLPFQQFGRDIADTTDAVRDPQTLEILDITPCSFGGVSVITPGTNTSNQVAVLYQDVNCTEVPVAIHADQLTPTWRVYSTGSNVFQTRAGCLIGAEHVNNSYECDIPIGAGICASYQTQTNSPRRARSVASQSIIAYTMSLGAENSVAYSNNSIAIPTNFTISVTTEILPVSMTKTSVDCTMYICGDSTECSNLLLQYGSFCTQLNRALTGIAVEQDKNTQEVFAQVKQIYKTPPIKDFGGFNFSQILPDPSKPSKRSFIEDLLFNKVTLADAGFIKQYGDCLGDIAARDLICAQKFNGLTVLPPLLTDEMIAQYTSALLAGTITSGWTFGAGAALQIPFAMQMAYRFNGIGVTQNVLYENQKLIANQFNSAIGKIQDSLSSTASALGKLQDVVNQNAQALNTLVKQLSSNFGAISSVLNDILSRLDPPEAEVQIDRLITGRLQSLQTYVTQQLIRAAEIRASANLAATKMSECVLGQSKRVDFCGKGYHLMSFPQSAPHGVVFLHVTYVFAQEKNFTTAPAICHDGKAHFPREGVFVSNGTHWFVTQRNFYEPQIITTDNTFLSGNCDVVIGIVNNTVYDPLQPELDSGGSGYIPEAPRDGQAYVRKDGEWVLLSTFL

SEQ ID NO: 9914 - protein, 1177 aa, Artificial Sequence
  SARS-CoV-2/USA/UT-00034/2020__EPI_ISL_417977 spike protein (1-1147)(K986P_V987P_P1069F) Foldon construct
MFVFLVLLPLVSSQCVNLTTRTQLPPAYTNSFTRGVYYPDKVFRSSVLHSTQDLFLPFFSNVTWFHAIHVSGTNGTKRFDNPVLPFNDGVYFASTEKSNIIRGWIFGTTLDSKTQSLLIVNNATNVVIKVCEFQFCNDPFLGVYYYKNNKSWMESEFRVYSSANNCTFEYVSQPFLMDLEGKQGNFKNLREFVFKNIDGYFKIYSKHTPINLVRDLPQGFSALEPLVDLPIGINITRFQTLLALHRSYLTPGDSSSGWTAGAAAYYVGYLQPRTFLLKYNENGTITDAVDCALDPLSETKCTLKSFTVEKGIYQTSNFRVQPTESIVRFPNITNLCPFGEVFNATRFASVYAWNRKRISNCVADYSVLYNSASFSTFKCYGVSPTKLNDLCFTNVYADSFVIRGDEVRQIAPGQTGKIADYNYKLPDDFTGCVIAWNSNNLDSKVGGNYNYLYRLFRKSNLKPFERDISTEIYQAGSTPCNGVEGFNCYFPLQSYGFQPTNGVGYQPYRVVVLSFELLHAPATVCGPKKSTNLVKNKCVNFNFNGLTGTGVLTESNKKFLPFQQFGRDIADTTDAVRDPQTLEILDITPCSFGGVSVITPGTNTSNQVAVLYQGVNCTEVPVAIHADQLTPTWRVYSTGSNVFQTRAGCLIGAEHVNNSYECDIPIGAGICASYQTQTNSPRRARSVASQSIIAYTMSLGAENSVAYSNNSIAIPTNFTISVTTEILPVSMTKTSVDCTMYICGDSTECSNLLLQYGSFCTQLNRALTGIAVEQDKNTQEVFAQVKQIYKTPPIKDFGGFNFSQILPDPSKPSKRSFIEDLLFNKVTLADAGFIKQYGDCLGDIAARDLICAQKFNGLTVLPPLLTDEMIAQYTSALLAGTITSGWTFGAGAALQIPFAMQMAYRFNGIGVTQNVLYENQKLIANQFNSAIGKIQDSLSSTASALGKLQDVVNQNAQALNTLVKQLSSNFGAISSVLNDILSRLDPPEAEVQIDRLITGRLQSLQTYVTQQLIRAAEIRASANLAATKMSECVLGQSKRVDFCGKGYHLMSFPQSAPHGVVFLHVTYVFAQEKNFTTAPAICHDGKAHFPREGVFVSNGTHWFVTQRNFYEPQIITTDNTFVSGNCDVVIGIVNNTVYDPLQPELDSGGSGYIPEAPRDGQAYVRKDGEWVLLSTFL

SEQ ID NO: 9915 - protein, 1177 aa, Artificial Sequence
  SARS-CoV-2/USA/UT-00033/2020__EPI_ISL_417976 spike protein (1-1147)(K986P_V987P_P1069F) Foldon construct
MFVFLVLLPLVSSQCVNLTTRTQLPPAYTNSFTRGVYYPDKVFRSSVLHSTQDLFLPFFSNVTWFHAIHVSGTNGTKRFDNPVLPFNDGVYFASTEKSNIIRGWIFGTTLDSKTQSLLIVNNATNVVIKVCEFQFCNDPFLGVYYHKNNKSWMESEFRVYSSANNCTFEYVSQPFLMDLEGKQGNFKNLREFVFKNIDGYFKIYSKHTPINLVRDLPQGFSALEPLVDLPIGINITRFQTLLALHRSYLTPGDSSSGLTAGAAAYYVGYLQPRTFLLKYNENGTITDAVDCALDPLSETKCTLKSFTVEKGIYQTSNFRVQPTESIVRFPNITNLCPFGEVFNATRFASVYAWNRKRISNCVADYSVLYNSASFSTFKCYGVSPTKLNDLCFTNVYADSFVIRGDEVRQIAPGQTGKIADYNYKLPDDFTGCVIAWNSNNLDSKVGGNYNYLYRLFRKSNLKPFERDISTEIYQAGSTPCNGVEGFNCYFPLQSYGFQPTNGVGYQPYRVVVLSFELLHAPATVCGPKKSTNLVKNKCVNFNFNGLTGTGVLTESNKKFLPFQQFGRDIADTTDAVRDPQTLEILDITPCSFGGVSVITPGTNTSNQVAVLYQGVNCTEVPVAIHADQLTPTWRVYSTGSNVFQTRAGCLIGAEHVNNSYECDIPIGAGICASYQTQTNSPRRARSVASQSIIAYTMSLGAENSVAYSNNSIAIPTNFTISVTTEILPVSMTKTSVDCTMYICGDSTECSNLLLQYGSFCTQLNRALTGIAVEQDKNTQEVFAQVKQIYKTPPIKDFGGFNFSQILPDPSKPSKRSFIEDLLFNKVTLADAGFIKQYGDCLGDIAARDLICAQKFNGLTVLPPLLTDEMIAQYTSALLAGTITSGWTFGAGAALQIPFAMQMAYRFNGIGVTQNVLYENQKLIANQFNSAIGKIQDSLSSTASALGKLQDVVNQNAQALNTLVKQLSSNFGAISSVLNDILSRLDPPEAEVQIDRLITGRLQSLQTYVTQQLIRAAEIRASANLAATKMSECVLGQSKRVDFCGKGYHLMSFPQSAPHGVVFLHVTYVFAQEKNFTTAPAICHDGKAHFPREGVFVSNGTHWFVTQRNFYEPQIITTDNTFVSGNCDVVIGIVNNTVYDPLQPELDSGGSGYIPEAPRDGQAYVRKDGEWVLLSTFL

SEQ ID NO: 9916 - protein, 1177 aa, Artificial Sequence
  SARS-CoV-2/USA/WI-13/2020__EPI_ISL_417516 spike protein (1-1147)(K986P_V987P_P1069F) Foldon construct
MFVFLVLLPLVSSQCVNLTTRTQLPPAYTNSFTRGVYYPDKVFRSSVLHSTQDLFLPFFSNVTWFHAIHVSGTNGTKRFDNPVLPFNDGVYFASTEKSNIIRGWIFGTTLDSKTQSLLIVNNATNVVIKVCEFQFCNDPFLGVYYHKNNKSWMESEFRVYSSANNCTFEYVSQPFLMDLEGKQGNFKNLREFVFKNIDGYFKIYSKHTPINLVRDLPQGFSALEPLVDLPIGINITRFQTLLALHRSYLTPGDSSSGWTAGAAAYYVGYLQPRTFLLKYNENGTITDAVDCALDPLSETKCTLKSFTVEKGIYQTSNFRVLPTESIVRFPNITNLCPFGEVFNATRFASVYAWNRKRISNCVADYSVLYNSASFSTFKCYGVSPTKLNDLCFTNVYADSFVIRGDEVRQIAPGQTGKIADYNYKLPDDFTGCVIAWNSNNLDSKVGGNYNYLYRLFRKSNLKPFERDISTEIYQAGSTPCNGVEGFNCYFPLQSYGFQPTNGVGYQPYRVVVLSFELLHAPATVCGPKKSTNLVKNKCVNFNFNGLTGTGVLTESNKKFLPFQQFGRDIADTTDAVRDPQTLEILDITPCSFGGVSVITPGTNTSNQVAVLYQGVNCTEVPVAIHADQLTPTWRVYSTGSNVFQTRAGCLIGAEHVNNSYECDIPIGAGICASYQTQTNSPRRARSVASQSIIAYTMSLGAENSVAYSNNSIAIPTNFTISVTTEILPVSMTKTSVDCTMYICGDSTECSNLLLQYGSFCTQLNRALTGIAVEQDKNTQEVFAQVKQIYKTPPIKDFGGFNFSQILPDPSKPSKRSFIEDLLFNKVTLADAGFIKQYGDCLGDIAARDLICAQKFNGLTVLPPLLTDEMIAQYTSALLAGTITSGWTFGAGAALQIPFAMQMAYRFNGIGVTQNVLYENQKLIANQFNSAIGKIQDSLSSTASALGKLQDVVNQNAQALNTLVKQLSSNFGAISSVLNDILSRLDPPEAEVQIDRLITGRLQSLQTYVTQQLIRAAEIRASANLAATKMSECVLGQSKRVDFCGKGYHLMSFPQSAPHGVVFLHVTYVFAQEKNFTTAPAICHDGKAHFPREGVFVSNGTHWFVTQRNFYEPQIITTDNTFVSGNCDVVIGIVNNTVYDPLQPELDSGGSGYIPEAPRDGQAYVRKDGEWVLLSTFL

SEQ ID NO: 9917 - protein, 1176 aa, Artificial Sequence
  SARS-CoV-2/India/1-27/2020__EPI_ISL_413522 spike protein (1-1146)(K985P_V986P_P1068F) Foldon construct
MFVFLVLLPLVSSQCVNLTTRTQLPPAYTNSFTRGVYYPDKVFRSSVLHSTQDLFLPFFSNVTWFHAIHVSGTNGTKRFDNPVLPFNDGVYFASTEKSNIIRGWIFGTTLDSKTQSLLIVNNATNVVIKVCEFQFCNDPFLGVYHKNNKSWMESEFRVYSSANNCTFEYVSQPFLMDLEGKQGNFKNLREFVFKNIDGYFKIYSKHTPINLVRDLPQGFSALEPLVDLPIGINITRFQTLLALHRSYLTPGDSSSGWTAGAAAYYVGYLQPRTFLLKYNENGTITDAVDCALDPLSETKCTLKSFTVEKGIYQTSNFRVQPTESIVRFPNITNLCPFGEVFNATRFASVYAWNRKRISNCVADYSVLYNSASFSTFKCYGVSPTKLNDLCFTNVYADSFVIRGDEVIQIAPGQTGKIADYNYKLPDDFTGCVIAWNSNNLDSKVGGNYNYLYRLFRKSNLKPFERDISTEIYQAGSTPCNGVEGFNCYFPLQSYGFQPTNGVGYQPYRVVVLSFELLHAPATVCGPKKSTNLVKNKCVNFNFNGLTGTGVLTESNKKFLPFQQFGRDIADTTDAVRDPQTLEILDITPCSFGGVSVITPGTNTSNQVAVLYQDVNCTEVPVAIHADQLTPTWRVYSTGSNVFQTRAGCLIGAEHVNNSYECDIPIGAGICASYQTQTNSPRRARSVASQSIIAYTMSLGAENSVAYSNNSIAIPTNFTISVTTEILPVSMTKTSVDCTMYICGDSTECSNLLLQYGSFCTQLNRALTGIAVEQDKNTQEVFAQVKQIYKTPPIKDFGGFNFSQILPDPSKPSKRSFIEDLLFNKVTLADAGFIKQYGDCLGDIAARDLICAQKFNGLTVLPPLLTDEMIAQYTSALLAGTITSGWTFGAGAALQIPFAMQMAYRFNGIGVTQNVLYENQKLIANQFNSAIGKIQDSLSSTASALGKLQDVVNQNAQALNTLVKQLSSNFGAISSVLNDILSRLDPPEAEVQIDRLITGRLQSLQTYVTQQLIRAAEIRASANLAATKMSECVLGQSKRVDFCGKGYHLMSFPQSAPHGVVFLHVTYVFAQEKNFTTAPAICHDGKAHFPREGVFVSNGTHWFVTQRNFYEPQIITTDNTFVSGNCDVVIGIVNNTVYDPLQPELDSGGSGYIPEAPRDGQAYVRKDGEWVLLSTFL

SEQ ID NO: 9918 - protein, 1171 aa, Artificial Sequence
  SARS-CoV-2/pangolin/Guangxi/P4L/2017__EPI_ISL_410538 spike protein (1-1141)(K980P_V981P_P1063F) Foldon construct
MFVFLFVLPLVSSQCVNLTTRTGIPPGYTNSSTRGVYYPDKVFRSSILHLTQDLFLPFFSNVTWFNTINYQGGFKKFDNPVLPFNDGVYFASTEKSNIIRGWIFGTTLDARTQSLLIVNNATNVVIKVCEFQFCTDPFLGVYYHNNNKTWVENEFRVYSSANNCTFEYISQPFLMDLEGKQGNFKNLREFVFKNVDGYFKIYSKHTPIDLVRDLPRGFAALEPLVDLPIGINITRFQTLLALHRSYLTPGNLESGWTTGAAAYYVGYLQQRTFLLSYNQNGTITDAVDCSLDPLSETKCTLKSLTVEKGIYQTSNFRVQPTISIVRFPNITNLCPFGEVFNASKFASVYAWNRKRISNCVADYSVLYNSTSFSTFKCYGVSPTKLNDLCFTNVYADSFVVKGDEVRQIAPGQTGVIADYNYKLPDDFTGCVIAWNSVKQDALTGGNYGYLYRLFRKSKLKPFERDISTEIYQAGSTPCNGQVGLNCYYPLERYGFHPTTGVNYQPFRVVVLSFELLNGPATVCGPKLSTTLVKDKCVNFNFNGLTGTGVLTTSKKQFLPFQQFGRDISDTTDAVRDPQTLEILDITPCSFGGVSVITPGTNTSNQVAVLYQDVNCTEVPMAIHAEQLTPAWRVYSAGANVFQTRAGCLVGAEHVNNSYECDIPVGAGICASYHSMSSLRSVNQRSIIAYTMSLGAENSVAYSNNSIAIPTNFTISVTTEILPVSMTKTSVDCTMYICGDSIECSNLLLQYGSFCTQLNRALTGIAVEQDKNTQEVFAQVKQIYKTPPIKDFGGFNFSQILPDPSKPSKRSFIEDLLFNKVTLADAGFIKQYGDCLGDIAARDLICAQKFNGLTVLPPLLTDEMIAQYTSALLAGTITSGWTFGAGAALQIPFAMQMAYRFNGIGVTQNVLYENQKLIANQFNSAIGKIQDSLSSTASALGKLQDVVNQNAQALNTLVKQLSSNFGAISSVLNDILSRLDPPEAEVQIDRLITGRLQSLQTYVTQQLIRAAEIRASANLAATKMSECVLGQSKRVDFCGKGYHLMSFPQSAPHGVVFLHVTYVFAQEKNFTTAPAICHEGKAHFPREGVFVSNGTHWFITQRNFYEPQIITTDNTFVSGSCDVVIGIVNNTVYDPLQPELDSGGSGYIPEAPRDGQAYVRKDGEWVLLSTFL

SEQ ID NO: 9919 - protein, 1171 aa, Artificial Sequence
  SARS-CoV-2/pangolin/Guangxi/P5L/2017__EPI_ISL_410540 spike protein (1-1141)(K980P_V981P_P1063F) Foldon construct
MFVFLFVLPLVSSQCVNLTTRTGIPPGYTNSSTRGVYYPDKVFRSSILHLTQDLFLPFFSNVTWFNTINYQGGFKKFDNPVLPFNDGVYFASTEKSNIIRGWIFGTTLDARTQSLLIVNNATNVVIKVCEFQFCTDPFLGVYYHNNNKTWVENEFRVYSSANNCTFEYISQPFLMDLEGKQGNFKNLREFVFKNVDGYFKIYSKHTPIDLVRDLPRGFAALEPLVDLPIGINITRFQTLLALHRSYLTPGKLESGWTTGAAAYYVGYLQQRTFLLSYNQNGTITDAVDCSLDPLSETKCTLKSLTVEKGIYQTSNFRVQPTISIVRFPNITNLCPFGEVFNASKFASVYAWNRKRISNCVADYSVLYNSTSFSTFKCYGVSPTKLNDLCFTNVYADSFVVKGDEVRQIAPGQTGVIADYNYKLPDDFTGCVIAWNSVKQDALTGGNYGYLYRLFRKSKLKPFERDISTEIYQAGSTPCNGQVGLNCYYPLERYGFHPTTGVNYQPFRVVVLSFELLNGPATVCGPKLSTTLVKDKCVNFNFNGLTGTGVLTTSKKQFLPFQQFGRDISDTTDAVRDPQTLEILDITPCSFGGVSVITPGTNTSNQVAVLYQDVNCTEVPMAIHAEQLTPAWRVYSAGANVFQTRAGCLVGAEHVNNSYECDIPVGAGICASYHSMSSFRSVNQRSIIAYTMSLGAENSVAYSNNSIAIPTNFTISVTTEILPVSMTKTSVDCTMYICGDSIECSNLLLQYGSFCTQLNRALTGIAVEQDKNTQEVFAQVKQIYKTPPIKDFGGFNFSQILPDPSKPSKRSFIEDLLFNKVTLADAGFIKQYGDCLGDIAARDLICAQKFNGLTVLPPLLTDEMIAQYTSALLAGTITSGWTFGAGAALQIPFAMQMAYRFNGIGVTQNVLYENQKLIANQFNSAIGKIQDSLSSTASALGKLQDVVNQNAQALNTLVKQLSSNFGAISSVLNDILSRLDPPEAEVQIDRLITGRLQSLQTYVTQQLIRAAEIRASANLAATKMSECVLGQSKRVDFCGKGYHLMSFPQSAPHGVVFLHVTYVFAQEKNFTTAPAICHEGKAHFPREGVFVSNGTHWFITQRNFYEPQIITTDNTFVSGSCDVVIGIVNNTVYDPLQPELDSGGSGYIPEAPRDGQAYVRKDGEWVLLSTFL

SEQ ID NO: 9920 - protein, 1171 aa, Artificial Sequence
  SARS-CoV-2/pangolin/Guangxi/P5E/2017__EPI_ISL_410541 spike protein (1-1141)(K980P_V981P_P1063F) Foldon construct
MFVFLFVLPLVSSQCVNLTTRTGIPPGYTNSSTRGVYYPDKVFRSSILHLTQDLFLPFFSNVTWFNTITYQGGSKKFDNPVLPFNDGVYFASTEKSNIIRGWIFGTTLDARTQSLLIVNNATNVVIKVCEFQFCTDPFLGVYYHNNNKTWVENEFRVYSSANNCTFEYISQPFLMDLEGKQGNFKNLREFVFKNVDGYFKIYSKHTPIDLVRDLPRGFAALEPLVDLPIGINITRFQTLLALHRSYLTPGKLESGWTTGAAAYYVGYLQQRTFLLSYNQNGTITDAVDCSLDPLSETKCTLKSLTVEKGIYQTSNFRVQPTISIVRFPNITNLCPFGEVFNASKFASVYAWNRKRISNCVADYSVLYNSTSFSTFKCYGVSPTKLNDLCFTNVYADSFVVKGDEVRQIAPGQTGVIADYNYKLPDDFTGCVIAWNSVKQDALTGDNYGYLYRLFRKSKLKPFERDISTEIYQAGSTPCNGQVGLNCYYPLERYGFHPTTGVNYQPFRVVVLSFELLNGPATVCGPKLSTTLVKDKCVNFNFNGLTGTGVLTTSKKQFLPFQQFGRDISDTTDAVRDPQTLEILDITPCSFGGVSVITPGTNTSNQVAVLYQDVNCTEVPMAIHAEQLTPAWRVYSAGANVFQTRAGCLVGAEHVNNSYECDIPVGAGICASYHSMSSFRSVNQRSIIAYTMSLGAENSVAYSNNSIAIPTNFTISVTTEILPVSMTKTSVDCTMYICGDSIECSNLLLQYGSFCTQLNRALTGIAVEQDKNTQEVFAQVKQIYKTPPIKDFGGFNFSQILPDPSKPSKRSFIEDLLFNKVTLADAGFIKQYGDCLGDIAARDLICAQKFNGLTVLPPLLTDEMIAQYTSALLAGTITSGWTFGAGAALQIPFAMQMAYRFNGIGVTQNVLYENQKLIANQFNSAIGKIQDSLSSTASALGKLQDVVNQNAQALNTLVKQLSSNFGAISSVLNDILSRLDPPEAEVQIDRLITGRLQSLQTYVTQQLIRAAEIRASANLAATKMSECVLGQSKRVDFCGKGYHLMSFPQSAPHGVVFLHVTYVFAQEKNFTTAPAICHEGKAHFPREGVFVSNGTHWFITQRNFYEPQIITTDNTFVSGSCDVVIGIVNNTVYDPLQPELDSGGSGYIPEAPRDGQAYVRKDGEWVLLSTFL

SEQ ID NO: 9921 - protein, 1169 aa, Artificial Sequence
  SARS-CoV-2/pangolin/Guangxi/P1E/2017__EPI_ISL_410539 spike protein (1-1139)(K978P_V979P_P1061F) Foldon construct
MFVFLFVLPLVSSQCVNLTTRTGIQPGYTNSSTRGVYYPDKVFRSSILHLTQDLFLPFFSNVTWFNTINYQGGFKKFDNPVLPFNDGVYFASTEKSNIIRGWIFGTTLDARTQSLLIVNNATNVVIKVCEFQFCTDPFLGVYYHNNNKTWVENEFRVYSSANNCTFEYISQPFLMDLEGKQGNFKNLREFVFKNVDGYFKIYSKHTPIDLVRDLPRGFAALEPLVDLPIGINITRFQTLLALHRSYLTPGKLESGWTTGAAAYYVGYLQQRTFLLSYNQNGTITDAVDCSLDPLSETKCTLKSLTVEKGIYQTSNFRVQPTISIVRFPNITNLCPFGEVFNASKFASVYAWNRKRISNCVADYSVLYNSTSFSTFKCYGVSPTKLNDLCFTNVYADSFVVKGDEVRQIAPGQTGVIADYNYKLPDDFTGCVIAWNSVKQDALTGGNYLYRLFRKSKLKPFERDISTEIYQAGSTPCNGQVGLNCYYPLERYGFHPTTGVNYQPFRVVVLSFELLNGPATVCGPKLSTTLVKDKCVNFNFNGLTGTGVLTTSKKQFLPFQQFGRDISDTTDAVRDPQTLEILDITPCSFGGVSVITPGTNTSNQVAVLYQDVNCTEVPMAIHAEQLTPAWRVYSAGANVFQTRAGCLVGAEHVNNSYECDIPVGAGICASYHSMSSLRSVNQRSIIAYTMSLGAENSVAYSNNSIAIPTNFTISVTTEILPVSMTKTSVDCTMYICGDSIECSNLLLQYGSFCTQLNRALTGIAVEQDKNTQEVFAQVKQIYKTPPIKDFGGFNFSQILPDPSKPSKRSFIEDLLFNKVTLADAGFIKQYGDCLGDIAARDLICAQKFNGLTVLPPLLTDEMIAQYTSALLAGTITSGWTFGAGAALQIPFAMQMAYRFNGIGVTQNVLYENQKLIANQFNSAIGKIQDSLSSTASALGKLQDVVNQNAQALNTLVKQLSSNFGAISSVLNDILSRLDPPEAEVQIDRLITGRLQSLQTYVTQQLIRAAEIRASANLAATKMSECVLGQSKRVDFCGKGYHLMSFPQSAPHGVVFLHVTYVFAQEKNFTTAPAICHEGKAHFPREGVFVSNGTHWFITQRNFYEPQIITTDNTFVSGSCDVVIGIVNNTVYDPLQPELDSGGSGYIPEAPRDGQAYVRKDGEWVLLSTFL

SEQ ID NO: 9922 - protein, 1177 aa, Artificial Sequence
  SARS-CoV-2/Wuhan/WIV05/2019__EPI_ISL_402128 spike protein (1-1147)(K986P_V987P_ H1048Q_H1064N_ H1083N_H1101N) Foldon construct
MFVFLVLLPLVSSQCVNLTTRTQLPPAYTNSFTRGVYYPDKVFRSSVLHSTQDLFLPFFSNVTWFHAIHVSGTNGTKRFDNPVLPFNDGVYFASTEKSNIIRGWIFGTTLDSKTQSLLIVNNATNVVIKVCEFQFCNDPFLGVYYHKNNKSWMESEFRVYSSANNCTFEYVSQPFLMDLEGKQGNFKNLREFVFKNIDGYFKIYSKHTPINLVRDLPQGFSALEPLVDLPIGINITRFQTLLALHRSYLTPGDSSSGWTAGAAAYYVGYLQPRTFLLKYNENGTITDAVDCALDPLSETKCTLKSFTVEKGIYQTSNFRVQPTESIVRFPNITNLCPFGEVFNATRFASVYAWNRKRISNCVADYSVLYNSASFSTFKCYGVSPTKLNDLCFTNVYADSFVIRGDEVRQIAPGQTGKIADYNYKLPDDFTGCVIAWNSNNLDSKVGGNYNYLYRLFRKSNLKPFERDISTEIYQAGSTPCNGVEGFNCYFPLQSYGFQPTNGVGYQPYRVVVLSFELLHAPATVCGPKKSTNLVKNKCVNFNFNGLTGTGVLTESNKKFLPFQQFGRDIADTTDAVRDPQTLEILDITPCSFGGVSVITPGTNTSNQVAVLYQDVNCTEVPVAIHADQLTPTWRVYSTGSNVFQTRAGCLIGAEHVNNSYECDIPIGAGICASYQTQTNSPRRARSVASQSIIAYTMSLGAENSVAYSNNSIAIPTNFTISVTTEILPVSMTKTSVDCTMYICGDSTECSNLLLQYGSFCTQLNRALTGIAVEQDKNTQEVFAQVKQIYKTPPIKDFGGFNFSQILPDPSKPSKRSFIEDLLFNKVTLADAGFIKQYGDCLGDIAARDLICAQKFNGLTVLPPLLTDEMIAQYTSALLAGTITSGWTFGAGAALQIPFAMQMAYRFNGIGVTQNVLYENQKLIANQFNSAIGKIQDSLSSTASALGKLQDVVNQNAQALNTLVKQLSSNFGAISSVLNDILSRLDPPEAEVQIDRLITGRLQSLQTYVTQQLIRAAEIRASANLAATKMSECVLGQSKRVDFCGKGYQLMSFPQSAPHGVVFLNVTYVPAQEKNFTTAPAICNDGKAHFPREGVFVSNGTNWFVTQRNFYEPQIITTDNTFVSGNCDVVIGIVNNTVYDPLQPELDSGGSGYIPEAPRDGQAYVRKDGEWVLLSTFL

SEQ ID NO: 9923 - protein, 1173 aa, Artificial Sequence
  SARS-CoV-2/bat/Yunnan/RaTG13/2013__EPI_ISL_402131 spike protein (1-1143)(K982P_V983P_ H1044Q_H1060N_ H1079N_H1097N) Foldon construct
MFVFLVLLPLVSSQCVNLTTRTQLPPAYTNSSTRGVYYPDKVFRSSVLHLTQDLFLPFFSNVTWFHAIHVSGTNGIKRFDNPVLPFNDGVYFASTEKSNIIRGWIFGTTLDSKTQSLLIVNNATNVVIKVCEFQFCNDPFLGVYYHKNNKSWMESEFRVYSSANNCTFEYVSQPFLMDLEGKQGNFKNLREFVFKNIDGYFKIYSKHTPINLVRDLPPGFSALEPLVDLPIGINITRFQTLLALHRSYLTPGDSSSGWTAGAAAYYVGYLQPRTFLLKYNENGTITDAVDCALDPLSETKCTLKSFTVEKGIYQTSNFRVQPTDSIVRFPNITNLCPFGEVFNATTFASVYAWNRKRISNCVADYSVLYNSTSFSTFKCYGVSPTKLNDLCFTNVYADSFVITGDEVRQIAPGQTGKIADYNYKLPDDFTGCVIAWNSKHIDAKEGGNFNYLYRLFRKANLKPFERDISTEIYQAGSKPCNGQTGLNCYYPLYRYGFYPTDGVGHQPYRVVVLSFELLNAPATVCGPKKSTNLVKNKCVNFNFNGLTGTGVLTESNKKFLPFQQFGRDIADTTDAVRDPQTLEILDITPCSFGGVSVITPGTNASNQVAVLYQDVNCTEVPVAIHADQLTPTWRVYSTGSNVFQTRAGCLIGAEHVNNSYECDIPIGAGICASYQTQTNSRSVASQSIIAYTMSLGAENSVAYSNNSIAIPTNFTISVTTEILPVSMTKTSVDCTMYICGDSTECSNLLLQYGSFCTQLNRALTGIAVEQDKNTQEVFAQVKQIYKTPPIKDFGGFNFSQILPDPSKPSKRSFIEDLLFNKVTLADAGFIKQYGDCLGDIAARDLICAQKFNGLTVLPPLLTDEMIAQYTSALLAGTITSGWTFGAGAALQIPFAMQMAYRFNGIGVTQNVLYENQKLIANQFNSAIGKIQDSLSSTASALGKLQDVVNQNAQALNTLVKQLSSNFGAISSVLNDILSRLDPPEAEVQIDRLITGRLQSLQTYVTQQLIRAAEIRASANLAATKMSECVLGQSKRVDFCGKGYQLMSFPQSAPHGVVFLNVTYVPAQEKNFTTAPAICNDGKAHFPREGVFVSNGTNWFVTQRNFYEPQIITTDNTFVSGSCDVVIGIVNNTVYDPLQPELDSGGSGYIPEAPRDGQAYVRKDGEWVLLSTFL

SEQ ID NO: 9924 - protein, 1177 aa, Artificial Sequence
  SARS-CoV-2/Wuhan/HBCDC-HB-01/2019__EPI_ISL_402132 spike protein (1-1147)(K986P_V987P_ H1048Q_H1064N_ H1083N_H1101N) Foldon construct
MFVFLVLLPLVSSQCVNLTTRTQLPPAYTNSITRGVYYPDKVFRSSVLHSTQDLFLPFFSNVTWFHAIHVSGTNGTKRFDNPVLPFNDGVYFASTEKSNIIRGWIFGTTLDSKTQSLLIVNNATNVVIKVCEFQFCNDPFLGVYYHKNNKSWMESEFRVYSSANNCTFEYVSQPFLMDLEGKQGNFKNLREFVFKNIDGYFKIYSKHTPINLVRDLPQGFSALEPLVDLPIGINITRFQTLLALHRSYLTPGDSSSGWTAGAAAYYVGYLQPRTFLLKYNENGTITDAVDCALDPLSETKCTLKSFTVEKGIYQTSNFRVQPTESIVRFPNITNLCPFGEVFNATRFASVYAWNRKRISNCVADYSVLYNSASFSTFKCYGVSPTKLNDLCFTNVYADSFVIRGDEVRQIAPGQTGKIADYNYKLPDDFTGCVIAWNSNNLDSKVGGNYNYLYRLFRKSNLKPFERDISTEIYQAGSTPCNGVEGFNCYFPLQSYGFQPTNGVGYQPYRVVVLSFELLHAPATVCGPKKSTNLVKNKCVNFNFNGLTGTGVLTESNKKFLPFQQFGRDIADTTDAVRDPQTLEILDITPCSFGGVSVITPGTNTSNQVAVLYQDVNCTEVPVAIHADQLTPTWRVYSTGSNVFQTRAGCLIGAEHVNNSYECDIPIGAGICASYQTQTNSPRRARSVASQSIIAYTMSLGAENSVAYSNNSIAIPTNFTISVTTEILPVSMTKTSVDCTMYICGDSTECSNLLLQYGSFCTQLNRALTGIAVEQDKNTQEVFAQVKQIYKTPPIKDFGGFNFSQILPDPSKPSKRSFIEDLLFNKVTLADAGFIKQYGDCLGDIAARDLICAQKFNGLTVLPPLLTDEMIAQYTSALLAGTITSGWTFGAGAALQIPFAMQMAYRFNGIGVTQNVLYENQKLIANQFNSAIGKIQDSLSSTASALGKLQDVVNQNAQALNTLVKQLSSNFGAISSVLNDILSRLDPPEAEVQIDRLITGRLQSLQTYVTQQLIRAAEIRASANLAATKMSECVLGQSKRVDFCGKGYQLMSFPQSAPHGVVFLNVTYVPAQEKNFTTAPAICNDGKAHFPREGVFVSNGTNWFVTQRNFYEPQIITTDNTFVSGNCDVVIGIVNNTVYDPLQPELDSGGSGYIPEAPRDGQAYVRKDGEWVLLSTFL

SEQ ID NO: 9925 - protein, 1177 aa, Artificial Sequence
  SARS-CoV-2/Guangdong/20SF028/2020__EPI_ISL_403936 spike protein (1-1147)(K986P_V987P_ H1048Q_H1064N_ H1083N_H1101N) Foldon construct
MFVFLVLLPLVSSQCVNLTTRTQLPPAYTNSFTRGVYYPDKVFRSSVLYSTQDLFLPFFSNVTWFHAIHVSGTNGTKRFDNPVLPFNDGVYFASTEKSNIIRGWIFGTTLDSKTQSLLIVNNATNVVIKVCEFQFCNDPFLGVYYHKNNKSWMESEFRVYSSANNCTFEYVSQPFLMDLEGKQGNFKNLREFVFKNIDGYFKIYSKHTPINLVRDLPQGFSALEPLVDLPIGINITRFQTLLALHRSYLTPGDSSSGWTAGAAAYYVGYLQPRTFLLKYNENGTITDAVDCALDPLSETKCTLKSFTVEKGIYQTSNFRVQPTESIVRFPNITNLCPFGEVFNATRFASVYAWNRKRISNCVADYSVLYNSASFSTFKCYGVSPTKLNDLCFTNVYADSFVIRGDEVRQIAPGQTGKIADYNYKLPDDFTGCVIAWNSNNLDSKVGGNYNYLYRLFRKSNLKPFERDISTEIYQAGSTPCNGVEGFNCYFPLQSYGFQPTNGVGYQPYRVVVLSFELLHAPATVCGPKKSTNLVKNKCVNFNFNGLTGTGVLTESNKKFLPFQQFGRDIADTTDAVRDPQTLEILDITPCSFGGVSVITPGTNTSNQVAVLYQDVNCTEVPVAIHADQLTPTWRVYSTGSNVFQTRAGCLIGAEHVNNSYECDIPIGAGICASYQTQTNSPRRARSVASQSIIAYTMSLGAENSVAYSNNSIAIPTNFTISVTTEILPVSMTKTSVDCTMYICGDSTECSNLLLQYGSFCTQLNRALTGIAVEQDKNTQEVFAQVKQIYKTPPIKDFGGFNFSQILPDPSKPSKRSFIEDLLFNKVTLADAGFIKQYGDCLGDIAARDLICAQKFNGLTVLPPLLTDEMIAQYTSALLAGTITSGWTFGAGAALQIPFAMQMAYRFNGIGVTQNVLYENQKLIANQFNSAIGKIQDSLSSTASALGKLQDVVNQNAQALNTLVKQLSSNFGAISSVLNDILSRLDPPEAEVQIDRLITGRLQSLQTYVTQQLIRAAEIRASANLAATKMSECVLGQSKRVDFCGKGYQLMSFPQSAPHGVVFLNVTYVPAQEKNFTTAPAICNDGKAHFPREGVFVSNGTNWFVTQRNFYEPQIITTDNTFVSGNCDVVIGIVNNTVYDPLQPELDSGGSGYIPEAPRDGQAYVRKDGEWVLLSTFL

SEQ ID NO: 9926 - protein, 1177 aa, Artificial Sequence
  SARS-CoV-2/Shenzhen/SZTH-001/2020__EPI_ISL_406592 spike protein (1-1147)(K986P_V987P_ H1048Q_H1064N_ H1083N_H1101N) Foldon construct
MFVFLVLLPLVSSQCVNLTTRTQLPPAYTNSFTRGVYYPDKVFRSSVLHSTQDLFLPFFSNVTWFHAIHVSGTNGTKRFDNPVLPFNDGVYFASTEKSNIIRGWIFGTTLDSKTQSLLIVNNATNVVIKVCEFQFCNDPFLGVYYHKNNKSWMESEFRVYSSANNCTFEYVSQPFLMDLEGKQGNFKNLREFVFKNIDGYFKIYSKHTPINLVRDLPQGFSALEPLVDLPIGINITRFQTLLALHRSYLTPGDSSSGWTAGAAAYYVGYLQPRTFLLKYNENGTITDAVDCALDPLSETKCTLKSFTVEKGIYQTSNFRVQPTESIVRFPNITNLCPFGEVFNATRFASVYAWNRKRISNCVADYSVLYNSASFSTFKCYGVSPTKLNDLCFTNVYADSFVIRGDEVRQIAPGQTGKIADYNYKLPDDFTGCVIAWNSNNLDSKVGGNYNYLYRLFRKSNLKPFERDISTEIYQAGSTPCNGVEGFNCYFPLQSYGFQPTNGVGYQPYRVVVLSFELLHAPATVCGPKKSTNLVKNKCVNFNFNGLTGTGVLTESNKKFLPFQQFGRDIADTTDAVRDPQTLEILDITPCSFGGVSVITPGTNTSNQVAVLYQDVNCTEVPVAIHADQLTPTWRVYSTGSNVFQTRAGCLIGAEHVNNSYECDIPIGAGICASYQTQTNSPRRARSVASQSIIAYTMSLGAENSVAYSNNSIAIPTNFTISVTTEILPVSMTKTSVDCTMYICGDSTECSNLLLQYGSFCTQLNRALTGIAVEQDKNTQEVFAQVKQIYKTPPIKDFGGFNFSQILPDPSKPSKRSFIEDLLFNKVTLADAGFIKQYGDCLGDIAARDLICAQKFNGLTVLPPLLTDEMIAQYTSALLAGTITSGWTFGAGAALQIPFAMQMAYRFNGIGVTQNVLYENQKLIANQFNSAIGKIQDSLSSTASALGKLQDVVNQNAQALNTLVKQLSSNFGAISSVLNDILSRLDPPEAEVQIDRLITGRLQSLQTYVTQQLIRAAEIRASANLAATKMSECVLGQSKRVDFCGKGYQLMSFPQSAPHGVVFLNVTYVPAQEKNFTTAPAICNDGKAHFPREGVFVSNGTNWFVTQRNFYEPQIITTDNTFVSGNCDVLIGIVNNTVYDPLQPELDSGGSGYIPEAPRDGQAYVRKDGEWVLLSTFL

SEQ ID NO: 9927 - protein, 1177 aa, Artificial Sequence
  SARS-CoV-2/Shenzhen/SZTH-004/2020__EPI_ISL_406595 spike protein (1-1147)(K986P_V987P_ H1048Q_H1064N_ H1083N_H1101N) Foldon construct
MFVFLVLLPLVSSQCVNLTTRTQLPPAYTNSFTRGVYYPDKVFRSSVLHSTQDLFLPFFSNVTWFHAIHVSGTNGTKRFDNPVLPFNDGVYFASTEKSNIIRGWIFGTTLDSKTQSLLIVNNATNVVIKVCEFQFCNDPFLGVYYHKNNKSWMESEFRVYSSANNCTFEYVSQPFLMDLEGKQGNFKNLREFVFKNIDGYFKIYSKHTPINLVRDLPQGFSALEPLVDLPIGINITRFQTLLALHRSYLTPGDSSSGWTAGAAAYYVGYLQPRTFLLKYNENGTITDAVDCALDPLSETKCTLKSFTVEKGIYQTSNFRVQPTESIVRFPNITNLCPFGEVFNATRFASVYAWDRKRISNCVAYYSVLYNSASFSTFKCYGVSPTKLNDLCFTNVYADSFVIRGDEVRQIAPGQTGKIADYNYKLPDDFTGCVIAWNSNNLDSKVGGNYNYLYRLFRKSNLKPFERDISTEIYQAGSTPCNGVEGFNCYFPLQSYGFQPTNGVGYQPYRVVVLSFELLHAPATVCGPKKSTNLVKNKCVNFNFNGLTGTGVLTESNKKFLPFQQFGRDIADTTDAVRDPQTLEILDITPCSFGGVSVITPGTNTSNQVAVLYQDVNCTEVPVAIHADQLTPTWRVYSTGSNVFQTRAGCLIGAEHVNNSYECDIPIGAGICASYQTQTNSPRRARSVASQSIIAYTMSLGAENSVAYSNNSIAIPTNFTISVTTEILPVSMTKTSVDCTMYICGDSTECSNLLLQYGSFCTQLNRALTGIAVEQDKNTQEVFAQVKQIYKTPPIKDFGGFNFSQILPDPSKPSKRSFIEDLLFNKVTLADAGFIKQYGDCLGDIAARDLICAQKFNGLTVLPPLLTDEMIAQYTSALLAGTITSGWTFGAGAALQIPFAMQMAYRFNGIGVTQNVLYENQKLIANQFNSAIGKIQDSLSSTASALGKLQDVVNQNAQALNTLVKQLSSNFGAISSVLNDILSRLDPPEAEVQIDRLITGRLQSLQTYVTQQLIRAAEIRASANLAATKMSECVLGQSKRVDFCGKGYQLMSFPQSAPHGVVFLNVTYVPAQEKNFTTAPAICNDGKAHFPREGVFVSNGTNWFVTQRNFYEPQIITTDNTFVSGNCDVVIGIVNNTVYDPLQPELDSGGSGYIPEAPRDGQAYVRKDGEWVLLSTFL

SEQ ID NO: 9928 - protein, 1177 aa, Artificial Sequence
  SARS-CoV-2/France/IDF0372/2020__EPI_ISL_406596 spike protein (1-1147)(K986P_V987P_ H1048Q_H1064N_ H1083N_H1101N) Foldon construct
MFVFLVLLPLVSSQCVNLTTRTQLPPAYTNSFTRGVYYPDKVFRSSVLHSTQDLFLPFFSNVTWFHAIHVSGTNGTKRFDNPVLPFNDGVYFASTEKSNIIRGWIFGTTLDSKTQSLLIVNNATNVVIKVCEFQFCNDPFLGVYYHKNNKSWMESEFRVYSSANNCTFEYVSQPFLMDLEGKQGNFKNLREFVFKNIDGYFKIYSKHTPINLVRDLPQGFSALEPLVDLPIGINITRFQTLLALHRSYLTPGDSSSGWTAGAAAYYVGYLQPRTFLLKYNENGTITDAVDCALDPLSETKCTLKSFTVEKGIYQTSNFRVQPTESIVRFPNITNLCPFGEVFNATRFASVYAWNRKRISNCVADYSFLYNSASFSTFKCYGVSPTKLNDLCFTNVYADSFVIRGDEVRQIAPGQTGKIADYNYKLPDDFTGCVIAWNSNNLDSKVGGNYNYLYRLFRKSNLKPFERDISTEIYQAGSTPCNGVEGFNCYFPLQSYGFQPTNGVGYQPYRVVVLSFELLHAPATVCGPKKSTNLVKNKCVNFNFNGLTGTGVLTESNKKFLPFQQFGRDIADTTDAVRDPQTLEILDITPCSFGGVSVITPGTNTSNQVAVLYQDVNCTEVPVAIHADQLTPTWRVYSTGSNVFQTRAGCLIGAEHVNNSYECDIPIGAGICASYQTQTNSPRRARSVASQSIIAYTMSLGAENSVAYSNNSIAIPTNFTISVTTEILPVSMTKTSVDCTMYICGDSTECSNLLLQYGSFCTQLNRALTGIAVEQDKNTQEVFAQVKQIYKTPPIKDFGGFNFSQILPDPSKPSKRSFIEDLLFNKVTLADAGFIKQYGDCLGDIAARDLICAQKFNGLTVLPPLLTDEMIAQYTSALLAGTITSGWTFGAGAALQIPFAMQMAYRFNGIGVTQNVLYENQKLIANQFNSAIGKIQDSLSSTASALGKLQDVVNQNAQALNTLVKQLSSNFGAISSVLNDILSRLDPPEAEVQIDRLITGRLQSLQTYVTQQLIRAAEIRASANLAATKMSECVLGQSKRVDFCGKGYQLMSFPQSAPHGVVFLNVTYVPAQEKNFTTAPAICNDGKAHFPREGVFVSNGTNWFVTQRNFYEPQIITTDNTFVSGNCDVVIGIVNNTVYDPLQPELDSGGSGYIPEAPRDGQAYVRKDGEWVLLSTFL

SEQ ID NO: 9929 - protein, 1177 aa, Artificial Sequence
  SARS-CoV-2/Australia/VIC01/2020__EPI_ISL_406844 spike protein (1-1147)(K986P_V987P_ H1048Q_H1064N_ H1083N_H1101N) Foldon construct
MFVFLVLLPLVSSQCVNLTTRTQLPPAYTNSFTRGVYYPDKVFRSSVLHSTQDLFLPFFSNVTWFHAIHVSGTNGTKRFDNPVLPFNDGVYFASTEKSNIIRGWIFGTTLDSKTQSLLIVNNATNVVIKVCEFQFCNDPFLGVYYHKNNKSWMESEFRVYSSANNCTFEYVSQPFLMDLEGKQGNFKNLREFVFKNIDGYFKIYSKHTPINLVRDLPQGFSALEPLVDLPIGINITRFQTLLALHRRYLTPGDSSSGWTAGAAAYYVGYLQPRTFLLKYNENGTITDAVDCALDPLSETKCTLKSFTVEKGIYQTSNFRVQPTESIVRFPNITNLCPFGEVFNATRFASVYAWNRKRISNCVADYSVLYNSASFSTFKCYGVSPTKLNDLCFTNVYADSFVIRGDEVRQIAPGQTGKIADYNYKLPDDFTGCVIAWNSNNLDSKVGGNYNYLYRLFRKSNLKPFERDISTEIYQAGSTPCNGVEGFNCYFPLQSYGFQPTNGVGYQPYRVVVLSFELLHAPATVCGPKKSTNLVKNKCVNFNFNGLTGTGVLTESNKKFLPFQQFGRDIADTTDAVRDPQTLEILDITPCSFGGVSVITPGTNTSNQVAVLYQDVNCTEVPVAIHADQLTPTWRVYSTGSNVFQTRAGCLIGAEHVNNSYECDIPIGAGICASYQTQTNSPRRARSVASQSIIAYTMSLGAENSVAYSNNSIAIPTNFTISVTTEILPVSMTKTSVDCTMYICGDSTECSNLLLQYGSFCTQLNRALTGIAVEQDKNTQEVFAQVKQIYKTPPIKDFGGFNFSQILPDPSKPSKRSFIEDLLFNKVTLADAGFIKQYGDCLGDIAARDLICAQKFNGLTVLPPLLTDEMIAQYTSALLAGTITSGWTFGAGAALQIPFAMQMAYRFNGIGVTQNVLYENQKLIANQFNSAIGKIQDSLSSTASALGKLQDVVNQNAQALNTLVKQLSSNFGAISSVLNDILSRLDPPEAEVQIDRLITGRLQSLQTYVTQQLIRAAEIRASANLAATKMSECVLGQSKRVDFCGKGYQLMSFPQSAPHGVVFLNVTYVPAQEKNFTTAPAICNDGKAHFPREGVFVSNGTNWFVTQRNFYEPQIITTDNTFVSGNCDVVIGIVNNTVYDPLQPELDSGGSGYIPEAPRDGQAYVRKDGEWVLLSTFL

SEQ ID NO: 9930 - protein, 1177 aa, Artificial Sequence
  SARS-CoV-2/Germany/BavPat1/2020__EPI_ISL_406862 spike protein (1-1147)(K986P_V987P_ H1048Q_H1064N_ H1083N_H1101N) Foldon construct
MFVFLVLLPLVSSQCVNLTTRTQLPPAYTNSFTRGVYYPDKVFRSSVLHSTQDLFLPFFSNVTWFHAIHVSGTNGTKRFDNPVLPFNDGVYFASTEKSNIIRGWIFGTTLDSKTQSLLIVNNATNVVIKVCEFQFCNDPFLGVYYHKNNKSWMESEFRVYSSANNCTFEYVSQPFLMDLEGKQGNFKNLREFVFKNIDGYFKIYSKHTPINLVRDLPQGFSALEPLVDLPIGINITRFQTLLALHRSYLTPGDSSSGWTAGAAAYYVGYLQPRTFLLKYNENGTITDAVDCALDPLSETKCTLKSFTVEKGIYQTSNFRVQPTESIVRFPNITNLCPFGEVFNATRFASVYAWNRKRISNCVADYSVLYNSASFSTFKCYGVSPTKLNDLCFTNVYADSFVIRGDEVRQIAPGQTGKIADYNYKLPDDFTGCVIAWNSNNLDSKVGGNYNYLYRLFRKSNLKPFERDISTEIYQAGSTPCNGVEGFNCYFPLQSYGFQPTNGVGYQPYRVVVLSFELLHAPATVCGPKKSTNLVKNKCVNFNFNGLTGTGVLTESNKKFLPFQQFGRDIADTTDAVRDPQTLEILDITPCSFGGVSVITPGTNTSNQVAVLYQGVNCTEVPVAIHADQLTPTWRVYSTGSNVFQTRAGCLIGAEHVNNSYECDIPIGAGICASYQTQTNSPRRARSVASQSIIAYTMSLGAENSVAYSNNSIAIPTNFTISVTTEILPVSMTKTSVDCTMYICGDSTECSNLLLQYGSFCTQLNRALTGIAVEQDKNTQEVFAQVKQIYKTPPIKDFGGFNFSQILPDPSKPSKRSFIEDLLFNKVTLADAGFIKQYGDCLGDIAARDLICAQKFNGLTVLPPLLTDEMIAQYTSALLAGTITSGWTFGAGAALQIPFAMQMAYRFNGIGVTQNVLYENQKLIANQFNSAIGKIQDSLSSTASALGKLQDVVNQNAQALNTLVKQLSSNFGAISSVLNDILSRLDPPEAEVQIDRLITGRLQSLQTYVTQQLIRAAEIRASANLAATKMSECVLGQSKRVDFCGKGYQLMSFPQSAPHGVVFLNVTYVPAQEKNFTTAPAICNDGKAHFPREGVFVSNGTNWFVTQRNFYEPQIITTDNTFVSGNCDVVIGIVNNTVYDPLQPELDSGGSGYIPEAPRDGQAYVRKDGEWVLLSTFL

SEQ ID NO: 9931 - protein, 1177 aa, Artificial Sequence
  SARS-CoV-2/Wuhan/HBCDC-HB-02/2020__EPI_ISL_412978 spike protein (1-1147)(K986P_V987P_ H1048Q_H1064N_ H1083N_H1101N) Foldon construct
MFVFLVLLPLVSSQCVNLTTRTQLPPAYTNSFTRGVYYPDKVFRSSVLHSTQDLFLPFFSNVTWFHAIHVSGTNGTKRFDNPVLPFNDGVYFASTEKSNIIRGWIFGTTLDSKTQSLLIVNNATNVVIKVCEFQFCNDPFLGVYYHKNNKSWMESEFRVYSSANNCTFEYVSQPFLMDLEGKQGNFKNLREFVFKNIDGYFKIYSKHTPINLVRDLPQGFSALEPLVDLPIGINITRFQTLLALHRSYLTPGDSSSGWTAGAAAYYVGYLQPRTFLLKYNENGTITDAVDCALDPLSETKCTLKSFTVEKGIYQTSNFRVQPTESIVRFPNITNLCPFGEVFNATRFASVYAWNRKRISNCVADYSVLYNSASFSTFKCYGVSPTKLNDLCFTNVYADSFVIRGDEVRQIAPGQTGKIADYNYKLPDDFTGCVIAWNSNNLDSKVGGNYNYLYRLFRKSNLKPFERDISTEIYQAGSTPCNGVEGFNCYFPLQSYGFQPTNGVGYQPYRVVVLSFELLHAPATVCGPKKSTNLVKNKCVNFNFNGLTGTGVLTESNKKFLPFQQFGRDIADTTDAVRDPQTLEILDITPCSFGGVSVITPGTNTSNQVAVLYQDVNCTEVPVAIHADQLTPTWRVYSTGSNVFQTRAGCLIGAEHVNNSYECDIPIGAGICASYQTQTNSPRRARSVASQSIIAYTMSLGAENSVAYSNNSIAIPTNFTISVTTEILPVSMTKTSVDCTMYICGDSTECSNFLLQYGSFCTQLNRALTGIAVEQDKNTQEVFAQVKQIYKTPPIKDFGGFNFSQILPDPSKPSKRSFIEDLLFNKVTLADAGFIKQYGDCLGDIAARDLICAQKFNGLTVLPPLLTDEMIAQYTSALLAGTITSGWTFGAGAALQIPFAMQMAYRFNGIGVTQNVLYENQKLIANQFNSAIGKIQDSLSSTASALGKLQDVVNQNAQALNTLVKQLSSNFGAISSVLNDILSRLDPPEAEVQIDRLITGRLQSLQTYVTQQLIRAAEIRASANLAATKMSECVLGQSKRVDFCGKGYQLMSFPQSAPHGVVFLNVTYVPAQEKNFTTAPAICNDGKAHFPREGVFVSNGTNWFVTQRNFYEPQIITTDNTFVSGNCDVVIGIVNNTVYDPLQPELDSGGSGYIPEAPRDGQAYVRKDGEWVLLSTFL

SEQ ID NO: 9932 - protein, 1177 aa, Artificial Sequence
  SARS-CoV-2/Australia/QLD02/2020__EPI_ISL_407896 spike protein (1-1147)(K986P_V987P_ H1048Q_H1064N_ H1083N_H1101N) Foldon construct
MFVFLVLLPLVSSQCVNLTTRTQLPPAYTNSFTRGVYYPDKVFRSSVLHSTQDLFLPFFSNVTWFHAIHVSGTNGTKRFDNPVLPFNDGVYFASTEKSNIIRGWIFGTTLDSKTQSLLIVNNATNVVIKVCEFQFCNDPFLGVYYHKNNKSWMESEFRVYSSANNCTFEYVSQPFLMDLEGKQGNFKNLREFVFKNIDGYFKIYSKHTPINLVRDLPQGFSALEPLVDLPIGINITRFQTLLALHRSYLTPGDSSSGWTAGAAAYYVGYLQPRTFLLKYNENGTITDAVDCALDPLSETKCTLKSFTVEKGIYQTSNFRVQPTESIVRFPNITNLCPFGEVFNATRFASVYAWNRKRISNCVADYSVLYNSASFSTFKCYGVSPTKLNDLCFTNVYADSFVIRGDEVRQIAPGQTGKIADYNYKLPDDFTGCVIAWNSNNLDSKVGGNYNYLYRLFRKSNLKPFERDISTEIYQAGSTPCNGVEGFNCYFPLQSYGFQPTNGVGYQPYRVVVLSFELLHAPATVCGPKKSTNLVKNKCVNFNFNGLTGTGVLTESNKKFLPFQQFGRDIADTTDAVRDPQTLEILDITPCSFGGVSVITPGTNTSNQVAVLYQDVNCTEVPVAIHADQLTPTWRVYSTGSNVFQTRAGCLIGAEHVNNSYECDIPIGAGICASYQTQTNSPRRARSVASQSIIAYTMSLGAENSVAYSNNSIAIPTNFTISVTTEILPVSMTKTSVDCTMYICGDSTECSNLLLQYGSFCTQLNRALTGIAVEQDKNTQEVFAQVKQIYKTPPIKDFGGFNFSQILPDPSKPSKRSFIEDLLFNKVTLADAGFIKQYGDCLGDIAARDLICAQKFNGLTVLPPLLTDEMIAQYTSALLAGTITSGWTFGAGAALQIPFAMQMAYRFNGIGVTQNVLYENQKLIANQFNSAIGKIQDSLSSTASALGKLQDVVNQNAQALNTLVKQLSSNFGAISSVLNDILSRLDPPEAEVQIDRLITGRLQSLQTYVTQQLIRAAEIRASANLAATKMSECVLGQSKRVDFCGKGYQLMSFPQSAPHGVVFLNVTYVPAQEKNFTTAPAICNDGKAHFPREGVFVSNGTNWFVTQRNFYEPQIITTDNTFVSGNCDVVIGIVNNTVYDPLQLELDSGGSGYIPEAPRDGQAYVRKDGEWVLLSTFL

SEQ ID NO: 9933 - protein, 1177 aa, Artificial Sequence
  SARS-CoV-2/India/1-31/2020__EPI_ISL_413523 spike protein (1-1147)(K986P_V987P_ H1048Q_H1064N_ H1083N_H1101N) Foldon construct
MFVFLVLLPLVSSQCVNLTTRTQLPPAYTNSFTRGVYYPDKVFRSSVLHSTQDLFLPFFSNVTWFHAIHVSGTNGTKRFDNPVLPFNDGVYFASTEKSNIIRGWIFGTTLDSKTQSLLIVNNATNVVIKVCEFQFCNDPFLGVYYHKNNKSWMESEFRVYSSANNCTFEYVSQPFLMDLEGKQGNFKNLREFVFKNIDGYFKIYSKHTPINLVRDLPQGFSALEPLVDLPIGINITRFQTLLALHRSYLTPGDSSSGWTAGAAAYYVGYLQPRTFLLKYNENGTITDAVDCALDPLSETKCTLKSFTVEKGIYQTSNFRVQPTESIVRFPNITNLCPFGEVFNATRFASVYAWNRKRISNCVADYSVLYNSASFSTFKCYGVSPTKLNDLCFTNVYADSFVIRGDEVRQIAPGQTGKIADYNYKLPDDFTGCVIAWNSNNLDSKVGGNYNYLYRLFRKSNLKPFERDISTEIYQAGSTPCNGVEGFNCYFPLQSYGFQPTNGVGYQPYRVVVLSFELLHAPATVCGPKKSTNLVKNKCVNFNFNGLTGTGVLTESNKKFLPFQQFGRDIADTTDAVRDPQTLEILDITPCSFGGVSVITPGTNTSNQVAVLYQDVNCTEVPVAIHADQLTPTWRVYSTGSNVFQTRAGCLIGAEHVNNSYECDIPIGAGICASYQTQTNSPRRARSVASQSIIAYTMSLGAENSVAYSNNSIAIPTNFTISVTTEILPVSMTKTSVDCTMYICGDSTECSNLLLQYGSFCTQLNRALTGIAVEQDKNTQEVFAQVKQIYKTPPIKDFGGFNFSQILPDPSKPSKRSFIEDLLFNKVTLADAGFIKQYGDCLGDIAARDLICAQKFNGLTVLPPLLTDEMIAQYTSALLAGTITSGWTFGAGAALQIPFAMQMAYRFNGIGVTQNVLYENQKLIANQFNSVIGKIQDSLSSTASALGKLQDVVNQNAQALNTLVKQLSSNFGAISSVLNDILSRLDPPEAEVQIDRLITGRLQSLQTYVTQQLIRAAEIRASANLAATKMSECVLGQSKRVDFCGKGYQLMSFPQSAPHGVVFLNVTYVPAQEKNFTTAPAICNDGKAHFPREGVFVSNGTNWFVTQRNFYEPQIITTDNTFVSGNCDVVIGIVNNTVYDPLQPELDSGGSGYIPEAPRDGQAYVRKDGEWVLLSTFL

SEQ ID NO: 9934 - protein, 1177 aa, Artificial Sequence
  SARS-CoV-2/Guangdong/GD2020087-P0008/2020__EPI_ISL_413863 spike protein (1-1147)(K986P_V987P_ H1048Q_H1064N_ H1083N_H1101N) Foldon construct
MFVFLVLLPLVSSQCVNLTTRTQLPPAYTNSFTRGVYYPDKVFRSSVLHSTQDLFLPFFSNVTWFHAIHVSGTNGTKRFDNPVLPFNDGVYFASTEKSNIIRGWIFGTTLDSKTQSLLIVNNATNVVIKVCEFQFCNDPFLGVYYHKNNKSWMESEFRVYSSANNCTFEYVSQPFLMDLEGKQGNFKNLREFVFKNIDGYFKIYSKHTPINLVRDLPQGFSALEPLVDLPIGINITRFQTLLALHRSYLTPGDSSSGWTAGAAAYYVGYLQPRTFLLKYNENGTITDAVDCALDPLSETKCTLKSFTVEKGIYQTSNFRVQPTESIVRFPNITNLCPFGEVFNATRFASVYAWNRKRISNCVADYSVLYNSASFSTFKCYGVSPTKLNDLCFTNVYADSFVIRGDEVREIAPGQTGKIADYNYKLPDDFTGCVIAWNSNNLDSKVGGNYNYLYRLFRKSNLKPFERDISTEIYQAGSTPCNGVEGFNCYFPLQSYGFQPTNGVGYQPYRVVVLSFELLHAPATVCGPKKSTNLVKNKCVNFNFNGLTGTGVLTESNKKFLPFQQFGRDIADTTDAVRDPQTLEILDITPCSFGGVSVITPGTNTSNQVAVLYQDVNCTEVPVAIHADQLTPTWRVYSTGSNVFQTRAGCLIGAEHVNNSYECDIPIGAGICASYQTQTNSPRRARSVASQSIIAYTMSLGAENSVAYSNNSIAIPTNFTISVTTEILPVSMTKTSVDCTMYICGDSTECSNLLLQYGSFCTQLNRALTGIAVEQDKNTQEVFAQVKQIYKTPPIKDFGGFNFSQILPDPSKPSKRSFIEDLLFNKVTLADAGFIKQYGDCLGDIAARDLICAQKFNGLTVLPPLLTDEMIAQYTSALLAGTITSGWTFGAGAALQIPFAMQMAYRFNGIGVTQNVLYENQKLIANQFNSAIGKIQDSLSSTASALGKLQDVVNQNAQALNTLVKQLSSNFGAISSVLNDILSRLDPPEAEVQIDRLITGRLQSLQTYVTQQLIRAAEIRASANLAATKMSECVLGQSKRVDFCGKGYQLMSFPQSAPHGVVFLNVTYVPAQEKNFTTAPAICNDGKAHFPREGVFVSNGTNWFVTQRNFYEPQIITTDNTFVSGNCDVVIGIVNNTVYDPLQPELDSGGSGYIPEAPRDGQAYVRKDGEWVLLSTFL

SEQ ID NO: 9935 - protein, 1177 aa, Artificial Sequence
  SARS-CoV-2/Sweden/01/2020__EPI_ISL_411951 spike protein (1-1147)(K986P_V987P_ H1048Q_H1064N_ H1083N_H1101N) Foldon construct
MFVFLVLLPLVSSQCVNLTTRTQLPPAYTNSFTRGVYYPDKVFRSSVLHSTQDLFLPFFSNVTWFHAIHVSGTNGTKRFDNPVLPFNDGVYFASTEKSNIIRGWIFGTTLDSKTQSLLIVNNATNVVIKVCEFQFCNDPFLGVYYHKNNKSWMESEFRVYSSANNCTFEYVSQPFLMDLEGKQGNFKNLREFVFKNIDGYFKIYSKHTPINLVRDLPQGFSALEPLVDLPIGINITRFQTLLALHRSYLTPGDSSSGWTAGAAAYYVGYLQPRTFLLKYNENGTITDAVDCALDPLSETKCTLKSFTVEKGIYQTSNFRVQPTESIVRFPNITNLCPFGEVFNATRFASVYAWNRKRISNCVADYSVLYNSASFSTFKCYGVSPTKLNDLCFTNVYADSFVIRGDEVRQIAPGQTGKIADYNYKLPDDFTGCVIAWNSNNLDSKVGGNYNYLYRLFRKSNLKPFERDISTEIYQAGSTPCNGVEGFNCYFPLQSYGFQPTNGVGYQPYRVVVLSFELLHAPATVCGPKKSTNLVKNKCVNFNFNGLTGTGVLTESNKKFLPFQQFGRDIADTTDAVRDPQTLEILDITPCSFGGVSVITPGTNTSNQVAVLYQDVNCTEVPVAIHADQLTPTWRVYSTGSNVFQTRAGCLIGAEHVNNSYECDIPIGAGICASYQTQTNSPRRARSVASQSIIAYTMSLGAENSVAYSNNSIAIPTNFTISVTTEILPVSMTKTSVDCTMYICGDSTECSNLLLQYGSFCTQLNRALTGIAVEQDKNTQEVFAQVKQIYKTPPIKDCGGFNFSQILPDPSKPSKRSFIEDLLFNKVTLADAGFIKQYGDCLGDIAARDLICAQKFNGLTVLPPLLTDEMIAQYTSALLAGTITSGWTFGAGAALQIPFAMQMAYRFNGIGVTQNVLYENQKLIANQFNSAIGKIQDSLSSTASALGKLQDVVNQNAQALNTLVKQLSSNFGAISSVLNDILSRLDPPEAEVQIDRLITGRLQSLQTYVTQQLIRAAEIRASANLAATKMSECVLGQSKRVDFCGKGYQLMSFPQSAPHGVVFLNVTYVPAQEKNFTTAPAICNDGKAHFPREGVFVSNGTNWFVTQRNFYEPQIITTDNTFVSGNCDVVIGIVNNTVYDPLQPELDSGGSGYIPEAPRDGQAYVRKDGEWVLLSTFL

SEQ ID NO: 9936 - protein, 1177 aa, Artificial Sequence
  SARS-CoV-2/Tianmen/HBCDC-HB-07/2020__EPI_ISL_412983 spike protein (1-1147)(K986P_V987P_ H1048Q_H1064N_ H1083N_H1101N) Foldon construct
MFVFLVLLPLVSSQCVNLTTRTQLPPAYTNSFTRGVYYPDKVFRSSVLHSTQDLFLPFFSNVTWFHAIHVSGTNGTKRFDNPVLPFNDGVYFASTEKSNIIRGWIFGTTLDSKTQSLLIVNNATNVVIKVCEFQFCNDPFLGVYYHKNNKSWMESEFRVYSSANNCTFEYVSQPFLMDLEGKQGNFKNLREFVFKNIDGYFKIYSKHTPINLVRDLPQGFSALEPLVDLPIGINITRFQTLLALHRSYLTPGDSSSGWTAGAAAYYVGYLQPRTFLLKYNENGTITDAVDCALDPLSETKCTLKSFTVEKGIYQTSNFRVQPTESIVRFPNITNLCPFGEVFNATRFASVYAWNRKRISNCVADYSVLYNSASFSTFKCYGVSPTKLNDLCFTNVYADSFVIRGDEVRQIAPGQTGKIADYNYKLPDDFTGCVIAWNSNNLDSKVGGNYNYLYRLFRKSNLKPFERDISTEIYQAGSTPCNGVEGFNCYFPLQSYGFQPTNGVGYQPYRVVVLSFELLHAPATVCGPKKSTNLVKNKCVNFNFNGLTGTGVLTESNKKFLPFQQFGRDIADTTDAVRDPQTLEILDITPCSFGGVSVITPGTNTSNQVAVLYQDLNCTEVPVAIHADQLTPTWRVYSTGSNVFQTRAGCLIGAEHVNNSYECDIPIGAGICASYQTQTNSPRRARSVASQSIIAYTMSLGAENSVAYSNNSIAIPTNFTISVTTEILPVSMTKTSVDCTMYICGDSTECSNLLLQYGSFCTQLNRALTGIAVEQDKNTQEVFAQVKQIYKTPPIKDFGGFNFSQILPDPSKPSKRSFIEDLLFNKVTLADAGFIKQYGDCLGDIAARDLICAQKFNGLTVLPPLLTDEMIAQYTSALLAGTITSGWTFGAGAALQIPFAMQMAYRFNGIGVTQNVLYENQKLIANQFNSAIGKIQDSLSSTASALGKLQDVVNQNAQALNTLVKQLSSNFGAISSVLNDILSRLDPPEAEVQIDRLITGRLQSLQTYVTQQLIRAAEIRASANLAATKMSECVLGQSKRVDFCGKGYQLMSFPQSAPHGVVFLNVTYVPAQEKNFTTAPAICNDGKAHFPREGVFVSNGTNWFVTQRNFYEPQIITTDNTFVSGNCDVVIGIVNNTVYDPLQPELDSGGSGYIPEAPRDGQAYVRKDGEWVLLSTFL

SEQ ID NO: 9937 - protein, 1177 aa, Artificial Sequence
  SARS-CoV-2/Hong Kong/case42_VM20002493/2020__EPI_ISL_414527 spike protein (1-1147)(K986P_V987P_ H1048Q_H1064N_ H1083N_H1101N) Foldon construct
MFVFLVLLPLVSSQCVNLTTRTQLPPAYTNSFTRGVYYPDKVFRSSVLHSTQDLFLPFFSNVTWFHAIHVSGTNGTKRFDNPVLPFNDGVYFASTEKSNIIRGWIFGTTLDSKTQSLLIVNNATNVVIKVCEFQFCNDPFLGVYYHKNNKSWMESEFRVYSSANNCTFEYVSQPFLMDLEGKQGNFKNLREFVFKNIDGYFKIYSKHTPINLVRDLPQGFSALEPLVDLPIGINITRFQTLLALHRSYLTPGDSSSGWTAGAAAYYVGYLQPRTFLLKYNENGTITDAVDCALDPLSETKCTLKSFTVEKGIYQTSNFRVQPTESIVRFPNITNLCPFGEVFNATRFASVYAWNRKRISNCVADYSVLYNSASFSTFKCYGVSPTKLNDLCFTNVYADSFVIRGDEVRQIAPGQTGKIADYNYKLPDDFTGCVIAWNSNNLDSKVGGNYNYLYRLFRKSNLKPFERDISTEIYQAGSTPCNGVEGFNCYFPLQSYGFQPTNGVGYQPYRVVVLSFELLHAPATVCGPKKSTNLVKNKCVNFNFNGLTGTGVLTESNKKFLPFQQFGRDIADTTDAVRDPQTLEILDITPCSFGGVSVITPGTNTSNQVAVLYQDVNCTEVPVAIHADQLTPTWRVYSTGSNVFQTRAGCLIGAEHVNNSYECDIPIGAGICASYQTQTNSPRRARSVASQSIIAYTMSLGAENSVAYSNNSIAIPTNFAISVTTEILPVSMTKTSVDCTMYICGDSTECSNLLLQYGSFCTQLNRALTGIAVEQDKNTQEVFAQVKQIYKTPPIKDFGGFNFSQILPDPSKPSKRSFIEDLLFNKVTLADAGFIKQYGDCLGDIAARDLICAQKFNGLTVLPPLLTDEMIAQYTSALLAGTITSGWTFGAGAALQIPFAMQMAYRFNGIGVTQNVLYENQKLIANQFNSAIGKIQDSLSSTASALGKLQDVVNQNAQALNTLVKQLSSNFGAISSVLNDILSRLDPPEAEVQIDRLITGRLQSLQTYVTQQLIRAAEIRASANLAATKMSECVLGQSKRVDFCGKGYQLMSFPQSAPHGVVFLNVTYVPAQEKNFTTAPAICNDGKAHFPREGVFVSNGTNWFVTQRNFYEPQIITTDNTFVSGNCDVVIGIVNNTVYDPLQPELDSGGSGYIPEAPRDGQAYVRKDGEWVLLSTFL

SEQ ID NO: 9938 - protein, 1177 aa, Artificial Sequence
  SARS-CoV-2/USA/CruiseA-23/2020__EPI_ISL_414482 spike protein (1-1147)(K986P_V987P_ H1048Q_H1064N_ H1083N_H1101N) Foldon construct
MFVFLVLLPLVSSQCVNLTTRTQLPPAYTNSFTRGVYYPDKVFRSSVLHSTQDLFLPFFSNVTWFHAIHVSGTNGTKRFDNPVLPFNDGVYFASTEKSNIIRGWIFGTTLDSKTQSLLIVNNATNVVIKVCEFQFCNDPFLGVYYHKNNKSWMESEFRVYSSANNCTFEYVSQPFLMDLEVKQGNFKNLREFVFKNIDGYFKIYSKHTPINLVRDLPQGFSALEPLVDLPIGINITRFQTLLALHRSYLTPGDSSSGWTAGAAAYYVGYLQPRTFLLKYNENGTITDAVDCALDPLSETKCTLKSFTVEKGIYQTSNFRVQPTESIVRFPNITNLCPFGEVFNATRFASVYAWNRKRISNCVADYSVLYNSASFSTFKCYGVSPTKLNDLCFTNVYADSFVIRGDEVRQIAPGQTGKIADYNYKLPDDFTGCVIAWNSNNLDSKVGGNYNYLYRLFRKSNLKPFERDISTEIYQAGSTPCNGVEGFNCYFPLQSYGFQPTNGVGYQPYRVVVLSFELLHAPATVCGPKKSTNLVKNKCVNFNFNGLTGTGVLTESNKKFLPFQQFGRDIADTTDAVRDPQTLEILDITPCSFGGVSVITPGTNTSNQVAVLYQDVNCTEVPVAIHADQLTPTWRVYSTGSNVFQTRAGCLIGAEHVNNSYECDIPIGAGICASYQTQTNSPRRARSVASQSIIAYTMSLGAENSVAYSNNSIAIPTNFTISVTTEILPVSMTKTSVDCTMYICGDSTECSNLLLQYGSFCTQLNRALTGIAVEQDKNTQEVFAQVKQIYKTPPIKDFGGFNFSQILPDPSKPSKRSFIEDLLFNKVTLADAGFIKQYGDCLGDIAARDLICAQKFNGLTVLPPLLTDEMIAQYTSALLAGTITSGWTFGAGAALQIPFAMQMAYRFNGIGVTQNVLYENQKLIANQFNSAIGKIQDSLSSTASALGKLQDVVNQNAQALNTLVKQLSSNFGAISSVLNDILSRLDPPEAEVQIDRLITGRLQSLQTYVTQQLIRAAEIRASANLAATKMSECVLGQSKRVDFCGKGYQLMSFPQSAPHGVVFLNVTYVPAQEKNFTTAPAICNDGKAHFPREGVFVSNGTNWFVTQRNFYEPQIITTDNTFVSGNCDVVIGIVNNTVYDPLQPELDSGGSGYIPEAPRDGQAYVRKDGEWVLLSTFL

SEQ ID NO: 9939 - protein, 1177 aa, Artificial Sequence
  SARS-CoV-2/Hong Kong/case85_VM20002868/2020__EPI_ISL_414519 spike protein (1-1147)(K986P_V987P_ H1048Q_H1064N_ H1083N_H1101N) Foldon construct
MFVFLVLVPLVSSQCVNLTTRTQLPPAYTNSFTRGVYYPDKVFRSSVLHSTQDLFLPFFSNVTWFHAIHVSGTNGTKRFDNPVLPFNDGVYFASTEKSNIIRGWIFGTTLDSKTQSLLIVNNATNVVIKVCEFQFCNDPFLGVYYHKNNKSWMESEFRVYSSANNCTFEYVSQPFLMDLEGKQGNFKNLREFVFKNIDGYFKIYSKHTPINLVRDLPQGFSALEPLVDLPIGINITRFQTLLALHRSYLTPGDSSSGWTAGAAAYYVGYLQPRTFLLKYNENGTITDAVDCALDPLSETKCTLKSFTVEKGIYQTSNFRVQPTESIVRFPNITNLCPFGEVFNATRFASVYAWNRKRISNCVADYSVLYNSASFSTFKCYGVSPTKLNDLCFTNVYADSFVIRGDEVRQIAPGQTGKIADYNYKLPDDFTGCVIAWNSNNLDSKVGGNYNYLYRLFRKSNLKPFERDISTEIYQAGSTPCNGVEGFNCYFPLQSYGFQPTNGVGYQPYRVVVLSFELLHAPATVCGPKKSTNLVKNKCVNFNFNGLTGTGVLTESNKKFLPFQQFGRDIADTTDAVRDPQTLEILDITPCSFGGVSVITPGTNTSNQVAVLYQDVNCTEVPVAIHADQLTPTWRVYSTGSNVFQTRAGCLIGAEHVNNSYECDIPIGAGICASYQTQTNSPRRARSVASQSIIAYTMSLGAENSVAYSNNSIAIPTNFTISVTTEILPVSMTKTSVDCTMYICGDSTECSNLLLQYGSFCTQLNRALTGIAVEQDKNTQEVFAQVKQIYKTPPIKDFGGFNFSQILPDPSKPSKRSFIEDLLFNKVTLADAGFIKQYGDCLGDIAARDLICAQKFNGLTVLPPLLTDEMIAQYTSALLAGTITSGWTFGAGAALQIPFAMQMAYRFNGIGVTQNVLYENQKLIANQFNSAIGKIQDSLSSTASALGKLQDVVNQNAQALNTLVKQLSSNFGAISSVLNDILSRLDPPEAEVQIDRLITGRLQSLQTYVTQQLIRAAEIRASANLAATKMSECVLGQSKRVDFCGKGYQLMSFPQSAPHGVVFLNVTYVPAQEKNFTTAPAICNDGKAHFPREGVFVSNGTNWFVTQRNFYEPQIITTDNTFVSGNCDVVIGIVNNTVYDPLQPELDSGGSGYIPEAPRDGQAYVRKDGEWVLLSTFL

SEQ ID NO: 9940 - protein, 1177 aa, Artificial Sequence; identical to SEQ ID NO: 9930
  SARS-CoV-2/England/200990660/2020__EPI_ISL_414523 spike protein (1-1147)(K986P_V987P_ H1048Q_H1064N_ H1083N_H1101N) Foldon construct

SEQ ID NO: 9941 - protein, 1177 aa, Artificial Sequence
  SARS-CoV-2/Australia/NSW09/2020__EPI_ISL_413595 spike protein (1-1147)(K986P_V987P_ H1048Q_H1064N_ H1083N_H1101N) Foldon construct
MFVFLVLLPLVSSQCVNLTTRTQLPPAYTNSFTRGVYYPDKVFRSSVLHSTQDLFLPFFSNVTWFHAIHVSGTNGTKRFDNPVLPFNDGVYFASTEKSNIIRGWIFGTTLDSKTQSLLIVNNATNVVIKVCEFQFCNDPFLGVYYHKNNKSWMESEFRVYSSANNCTFEYVSQPFLMDLEGKQGNFKNLREFVFKNIDGYFKIYSKHTPINLVRDLPQGFSALEPLVDLPIGINITRFQTLLALHRSYLTPGDSSSGWTAGAAAYYVGYLQPRTFLLKYNENGTITDAVDCALDPLSETKCTLKSFTVEKGIYQTSNFRVQPTESIVRFPNITNLCPFGEVFNATRFASVYAWNRKRISNCVADYSVLYNSASFSTFKCYGVSPTKLNDLCFTNVYADSFVIRGDEVRQIAPGQTGKIADYNYKLPDDFTGCVIAWNSNNLDSKVGGNYNYLYRLFRKSNLKPFERDISTEIYQAGSTPCNGVEGFNCYFPLQSYGFQPTNGVGYQPYRVVVLSFELLHAPATVCGPKKSTNLVKNKCVNFNFNGLTGTGVLTESNKKFLPFQQFGRDIADTTDAVRDPQTLEILDITPCSFGGVSVITPGTNTSNQVAVLYQDVNCTEVPVAIHADQLTPTWRVYSTGSNVFQTRAGCLIGAEHVNNSYECDIPIGAGICASYQTQTNSPRRARSVASQSIIAYTMSLGAENSVAYSNNSIAIPTNFTISVTTEILPVSMTKTSVDCTMYICGDSTECSNLLLQYGSFCTQLNRALTGIAVEQDKNTQEVFAQVKQIYKTPPIKDFGGFNFSQILPDPSKPSKRSFIEDLLFNKVTLADAGFIKQYGDCLGDIAARDLICAQKFNGLTVLPPLLTDEMIAQYTSALLAGTITSGWTFGAGAALQIPFAMQMAYRFNGIGVTQNVLYENQKLIANQFNSAIGKIQDSLSFTASALGKLQDVVNQNAQALNTLVKQLSSNFGAISSVLNDILSRLDPPEAEVQIDRLITGRLQSLQTYVTQQLIRAAEIRASANLAATKMSECVLGQSKRVDFCGKGYQLMSFPQSAPHGVVFLNVTYVPAQEKNFTTAPAICNDGKAHFPREGVFVSNGTNWFVTQRNFYEPQIITTDNTFVSGNCDVVIGIVNNTVYDPLQPELDSGGSGYIPEAPRDGQAYVRKDGEWVLLSTFL

SEQ ID NO: 9942 - protein, 1177 aa, Artificial Sequence; identical to SEQ ID NO: 9922
  SARS-CoV-2/Australia/NSW10/2020__EPI_ISL_413596 spike protein (1-1147)(K986P_V987P_ H1048Q_H1064N_ H1083N_H1101N) Foldon construct

SEQ ID NO: 9943 - protein, 1177 aa, Artificial Sequence
  SARS-CoV-2/Switzerland/1000477797/2020__EPI_ISL_413023 spike protein (1-1147)(K986P_V987P_ H1048Q_H1064N_ H1083N_H1101N) Foldon construct
MFVFLVLLPLVSSQCVNLTTRTQLPPAYTNSFTRGVYYPDKVFRSSVLHSTQDLFLPFFSNVTWFHAIHVSGTNGTKRFDNPVLPFNDGVYFASTEKSNIIRGWIFGTTLDSKTQSLLIVNNATNVVIKVCEFQFCNDPFLGVYYHKNNKSWMESEFRVYSSANNCTFEYVSQPFLMDLEGKQGNFKNLREFVFKNIDGYFNIYSKHTPINLVRDLPQGFSALEPLVDLPIGINITRFQTLLALHRSYLTPGDSSSGWTAGAAAYYVGYLQPRTFLLKYNENGTITDAVDCALDPLSETKCTLKSFTVEKGIYQTSNFRVQPTESIVRFPNITNLCPFGEVFNATRFASVYAWNRKRISNCVADYSVLYNSASFSTFKCYGVSPTKLNDLCFTNVYADSFVIRGDEVRQIAPGQTGKIADYNYKLPDDFTGCVIAWNSNNLDSKVGGNYNYLYRLFRKSNLKPFERDISTEIYQAGSTPCNGVEGFNCYFPLQSYGFQPTNGVGYQPYRVVVLSFELLHAPATVCGPKKSTNLVKNKCVNFNFNGLTGTGVLTESNKKFLPFQQFGRDIADTTDAVRDPQTLEILDITPCSFGGVSVITPGTNTSNQVAVLYQGVNCTEVPVAIHADQLTPTWRVYSTGSNVFQTRAGCLIGAEHVNNSYECDIPIGAGICASYQTQTNSPRRARSVASQSIIAYTMSLGAENSVAYSNNSIAIPTNFTISVTTEILPVSMTKTSVDCTMYICGDSTECSNLLLQYGSFCTQLNRALTGIAVEQDKNTQEVFAQVKQIYKTPPIKDFGGFNFSQILPDPSKPSKRSFIEDLLFNKVTLADAGFIKQYGDCLGDIAARDLICAQKFNGLTVLPPLLTDEMIAQYTSALLAGTITSGWTFGAGAALQIPFAMQMAYRFNGIGVTQNVLYENQKLIANQFNSAIGKIQDSLSSTASALGKLQDVVNQNAQALNTLVKQLSSNFGAISSVLNDILSRLDPPEAEVQIDRLITGRLQSLQTYVTQQLIRAAEIRASANLAATKMSECVLGQSKRVDFCGKGYQLMSFPQSAPHGVVFLNVTYVPAQEKNFTTAPAICNDGKAHFPREGVFVSNGTNWFVTQRNFYEPQIITTDNTFVSGNCDVVIGIVNNTVYDPLQPELDSGGSGYIPEAPRDGQAYVRKDGEWVLLSTFL

SEQ ID NO: 9944 - protein, 1177 aa, Artificial Sequence
  SARS-CoV-2/Belgium/BA-02291/2020__EPI_ISL_415159 spike protein (1-1147)(K986P_V987P_ H1048Q_H1064N_ H1083N_H1101N) Foldon construct
MFVFLVLLPLVSSQCVNLTTRTQLPPAYTNSFTRGVYYPDKVFRSSVLHSTQDLFLPFFSNVTWFHAIHVSGTNGTKRFDNPVLPFNDGVYFASTEKSNIIRGWIFGTTLDSKTQSLLIVNNATNVVIKVCEFQFCNDPFLGVYYHKNNKSWMESEFRVYSSANNCTFEYVSQPFLMDLEGKQGNFKNLREFVFKNIDGYFKIYSKHTPINLVRDLPQGFSALEPLVDLPIGINITRFQTLLALHRSYLTPGDSSSGWTAGAAAYYVGYLQPRTFLLKYNENGTITDAVDCALDPLSETKCTLKSFTVEKGIYQTSNFRVQPTESIVRFPNITNLCPFGEVFNATRFASVYAWNRKRISNCVADYSVLYNSASFSTFKCYGVSPTKLNDLCFTNVYADSFVIRGDEVRQIAPGQTGKIADYNYKLPDDFTGCVIAWNSNNLDSKVGGNYNYLYRLFRRSNLKPFERDISTEIYQAGSTPCNGVEGFNCYFPLQSYGFQPTNGVGYQPYRVVVLSFELLPAPATVCGPKKSTNLVKNKCVNFNFNGLTGTGVLTESNKKFLPFQQFGRDIADTTDAVRDPQTLEILDITPCSFGGVSVITPGTNTSNQVAVLYQGVNCTEVPVAIHADQLTPTWRVYSTGSNVFQTRAGCLIGAEHVNNSYECDIPIGAGICASYQTQTNSPRRARSVASQSIIAYTMSLGAENSVAYSNNSIAIPTNFTISVTTEILPVSMTKTSVDCTMYICGDSTECSNLLLQYGSFCTQLNRALTGIAVEQDKNTQEVFAQVKQIYKTPPIKDFGGFNFSQILPDPSKPSKRSFIEDLLFNKVTLADAGFIKQYGDCLGDIAARDLICAQKFNGLTVLPPLLTDEMIAQYTSALLAGTITSGWTFGAGAALQIPFAMQMAYRFNGIGVTQNVLYENQKLIANQFNSAIGKIQDSLSSAAPALGKLQDVVNQNAQALNTLVKQLSSNFGAISSVLNDILSRLDPPEAEVQIDRLITGRLQSLQTYVTQQLIRAAEIRASANLAATKMSECVLGQSKRVDFCGKGYQLMSFPQSAPHGVVFLNVTYVPAQEKNFTTAPAICNDGKAHFPREGVFVSNGTNWFVTQRNFYEPQIITTDNTFVSGNCDVVIGIVNNTVYDPLQPELDSGGSGYIPEAPRDGQAYVRKDGEWVLLSTFL

SEQ ID NO: 9945 - protein, 1177 aa, Artificial Sequence
  SARS-CoV-2/USA/WA8-UW5/2020__EPI_ISL_413486 spike protein (1-1147)(K986P_V987P_ H1048Q_H1064N_ H1083N_H1101N) Foldon construct
MFVFLVLLPLVSSQCVNLTTRTQLPPAYTNSFTRGVYYPDKVFRSSVLHSTQDLFLPFFSNVTWFHAIHVSGTNGTKRFDNPVLPFNDGVYFASTEKSNIIRGWIFGTTLDSKTQSLLIVNNATNVVIKVCEFQFCNDPFLGVYYHKNNKSWMESEFRVYSSANNCTFEYVSQPFLMDLEGKQGNFKNLREFVFKNIDGYFKIYSKHTPINLVRDLPQGFSALEPLVDLPIGINITRFQTLLALHRSYLTPGDSSSGWTAGAAAYYVGYLQPRTFLLKYNENGTITDAVDCALDPLSETKCTLKSFTVEKGIYQTSNFRVQPTESIVRFPNITNLCPFGEVFNATRFASVYAWNRKRISNCVADYSVLYNSASFSTFKCYGVSPTKLNDLCFTNVYADSFVIRGDEVRQIAPGQTGKIADYNYKLPDDFTGCVIAWNSNNLDSKVGGNYNYLYRLFRKSNLKPFERDISTEIYQAGSTPCNGVEGFNCYFPLQSYGFQPTNGVGYQPYRVVVLSFELLHAPATVCGPKKSTNLVKNKCVNFNFNGLTGTGVLTESNKKFLPFQQFGRDIADTTDAVRDPQTLEILDITPCSFGGVSVITPGTNTSNQVAVLYQDVNCTEVPVAIHADQLTPTWRVYSTGSNVFQTRAGCLIGAEYVNNSYECDIPIGAGICASYQTQTNSPRRARSVASQSIIAYTMSLGAENSVAYSNNSIAIPTNFTISVTTEILPVSMTKTSVDCTMYICGDSTECSNLLLQYGSFCTQLNRALTGIAVEQDKNTQEVFAQVKQIYKTPPIKDFGGFNFSQILPDPSKPSKRSFIEDLLFNKVTLADAGFIKQYGDCLGDIAARDLICAQKFNGLTVLPPLLTDEMIAQYTSALLAGTITSGWTFGAGAALQIPFAMQMAYRFNGIGVTQNVLYENQKLIANQFNSAIGKIQDSLSSTASALGKLQDVVNQNAQALNTLVKQLSSNFGAISSVLNDILSRLDPPEAEVQIDRLITGRLQSLQTYVTQQLIRAAEIRASANLAATKMSECVLGQSKRVDFCGKGYQLMSFPQSAPHGVVFLNVTYVPAQEKNFTTAPAICNDGKAHFPREGVFVSNGTNWFVTQRNFYEPQIITTDNTFVSGNCDVVIGIVNNTVYDPLQPELDSGGSGYIPEAPRDGQAYVRKDGEWVLLSTFL

SEQ ID NO: 9946 - protein, 1177 aa, Artificial Sequence
  SARS-CoV-2/England/20102000506/2020__EPI_ISL_415147 spike protein (1-1147)(K986P_V987P_ H1048Q_H1064N_ H1083N_H1101N) Foldon construct
MFVFLVLLPLVSSQCVNLTTRTQLPPAYTNSFTRGVYYPDKVFRSSVLHSTQDLFLPFFSNVTWFHAIHVSGTNGTKRFDNPVLPFNDGVYFASTEKSNIIRGWIFGTTLDSKTQSLLIVNNATNVVIKVCEFQFCNDPFLGVYYHKNNKSWMESEFRVYSSANNCTFEYVSQPFLMDLEGKQGNFKNLREFVFKNIDGYFKIYSKHTPINLVRDLPQGFSALEPLVDLPIGINITRFQTLLALHRSYLTPGDSSSGWTAGAAAYYVGYLQPRTFLLKYNENGTITDAVDCALDPLSETKCTLKSFTVEKGIYQTSNFRVQPTESIVRFPNITNLCPFGEVFNATRFASVYAWNRKRISNCVADYSVLYNSASFSTFKCYGVSPTKLNDLCFTNVYADSFVIRGDEVRQIAPGQTGKIADYNYKLPDDFTGCVIAWNSNNLDSKVGGNYNYLYRLFRKSNLKPFERDISTEIYQAGSTPCNGVEGFNCYFPLQSYGFQPTNGVGYQPYRVVVLSFELLHAPATVCGPKKSTNLVKNKCVNFNFNGLTGTGVLTESNKKFLPFQQFGRDIADTTDAVRDPQTLEILDITPCSFGGVSVITPGTNTSNQVAVLYQGVNCTEVPVAIHADQLTPTWRVYSTGSNVFQTRAGCLIGAEHVNNSYECDIPIGAGICASYQTQTNSPRRARSVASQSIIAYTMSLGAENSVAYSNNSIAIPTNFTISVTTEILPVSMTKTSVDCTMYICGDSTECSNLLLQYGSFCTQLNRALTGIAVEQDKNTQEVFAQVKQIYKTPPIKDFGGFNFSQILPDPSKPSKRSFIEDLLFNKVTLADAGFIKQYGYCLGDIAARDLICAQKFNGLTVLPPLLTDEMIAQYTSALLAGTITSGWTFGAGAALQIPFAMQMAYRFNGIGVTQNVLYENQKLIANQFNSAIGKIQDSLSSTASALGKLQDVVNQNAQALNTLVKQLSSNFGAISSVLNDILSRLDPPEAEVQIDRLITGRLQSLQTYVTQQLIRAAEIRASANLAATKMSECVLGQSKRVDFCGKGYQLMSFPQSAPHGVVFLNVTYVPAQEKNFTTAPAICNDGKAHFPREGVFVSNGTNWFVTQRNFYEPQIITTDNTFVSGNCDVVIGIVNNTVYDPLQPELDSGGSGYIPEAPRDGQAYVRKDGEWVLLSTFL

SEQ ID NO: 9947 - protein, 1177 aa, Artificial Sequence
  SARS-CoV-2/Belgium/VAG-03013/2020__EPI_ISL_415155 spike protein (1-1147)(K986P_V987P_ H1048Q_H1064N_ H1083N_H1101N) Foldon construct
MFVFLVLLPLVSSQCVNLTTRTQLPPAYTNSFTRGVYYPDKVFRSSVLHSTQDLFLPFFSNVTWFHAIHVSGTNGTKRFDNPVLPFNDGVYFASTEKSNIIRGWIFGTTLDSKTQSLLIVNNATNVVIKVCEFQFCNDPFLGVYYHKNNKSWMESEFRVYSSANNCTFEYVSQPFLMDLEGKQGNFKNLREFVFKNIDGYFKIYSKHTPINLVRDLPQGFSALEPLVDLPIGINITRFQTLLALHRSYLTPGDSSSGWTAGAAAYYVGYLQPRTFLLKYNENGTITDAVDCALDPLSETKCTLKSFTVEKGIYQTSNFRVQPTESIVRFPNITNLCPFGEVFNATRFASVYAWNRKRISNCVADYSVLYNSASFSTFKCYGVSPTKLNDLCFTNVYADSFVIRGDEVRQIAPGQTGKIADYNYKLPDDFTGCVIAWNSNNLDSKVGGNYNYLYRLFRKSNLKPFERDISTEIYQAGSTPCNGVEGFNCYFPLQSYGFQPTNGVGYQPYRVVVLSFELLHAPATVCGPKKSTNLVKNKCVNFNFNGLTGTGVLTESNKKFLPFQQFGRDIADTTDAVRDPQTLEILDITPCSFGGVSVITPGTNTSNQVAVLYQGVNCTEVPVAIHADQLTPTWRVYSTGSNVFQTRAGCLIGAEHVNNSYECDIPIGAGICASYQTQTNSPRRARSVASQSIIAYTMSLGAENSVAYSNNSIAIPTNFTISVTTEILPVSMTKTSVDCTMYICGDSTECSNLLLQYGSFCTQLNRALTGIAVEQDKNTQEVFAQVKQIYKTPPIKDFGGFNFSQILPDPSKPSKRSFIEDLLFNKVTLADAGFIKQYGDCLGDIAARDLICAQKFNGLTVLPPLLTDEMIAQYTSALLAGTITSGWTFGAGAALQIPFAMQMAYRFNGIGVTQNVLYENQKLIANQFNSAIGKIQDSLSSTATALGKLQDVVNQNAQALNTLVKQLSSNFGAISSVLNDILSRLDPPEAEVQIDRLITGRLQSLQTYVTQQLIRAAEIRASANLAATKMSECVLGQSKRVDFCGKGYQLMSFPQSAPHGVVFLNVTYVPAQEKNFTTAPAICNDGKAHFPREGVFVSNGTNWFVTQRNFYEPQIITTDNTFVSGNCDVVIGIVNNTVYDPLQPELDSGGSGYIPEAPRDGQAYVRKDGEWVLLSTFL

SEQ ID NO: 9948 - protein, 1177 aa, Artificial Sequence
  SARS-CoV-2/Belgium/BC-03016/2020__EPI_ISL_415157 spike protein (1-1147)(K986P_V987P_ H1048Q_H1064N_ H1083N_H1101N) Foldon construct
MFVFLVLLPLVSSQCVNLTTRTQLPPAYTNSFTRGVYYPDKVFRSSVLHSTQDLFLPFFSNVTWFHAIHVSGTNGTKRFDNPVLPFNDGVYFASTEKSNIIRGWIFGTTLDSKTQSLLIVNNATNVVIKVCEFQFCNDPFLGVYYHKNNKSWMESEFRVYSSANNCTFEYVSQPFLMDLEGKQGNFKNLREFVFKNIDGYFKIYSKHTPINLVRDLPQGFSALEPLVDLPIGINITRFQTLLALHRSYLTPGDSSSGWTAGAAAYYVGYLQPRTFLLKYNENGTITDAVDCALDPLSETKCTLKSFTVEKGIYQTSNFRVQPTESIVRFPNITNLCPFGEVFNATRFASVYAWNRKRISNCVADYSVLYNSASFSTFKCYGVSPTKLNDLCFTNVYADSFVIRGDEVRQIAPGQTGKIADYNYKLPDDFTGCVIAWNSNNLDSKVGGNYNYLYRLFRKSNLKPFERDISTEIYQAGSTPCNGVEGFNCYFPLQSYGFQPTNGVGYQPYRVVVLSFELLHAPATVCGPKKSTNLVKNKCVNFNFNGLTGTGVLTESNKKFLPFQQFGRDIADTTDAVRDPQTLEILDITPCSFGGVSVITPGTNTSNQVAVLYQGVNCTEVPVAIHADQLTPTWRVYSTGSNVFQTRAGCLIGAEHVNNSYECDIPIGAGICASYQTQTNSPRRARSVASQSIIAYTMSLGAENSVAYSNNSIAIPTNFTISVTTEILPVSMTKTSVDCTMYICGDSTECSNLLLQYGSFCTQLNRALTGIAVEQDKNTQEVFAQVKQIYKTPPIKDFGGFNFSQILPDPSKPSKRSFIEDLLFNKVTLADAGFIKQYGDCLGDIAARDLICAQKFNGLTVLPPLLTDEMIAQYTSALLAGTITSGWTFGAGAALQIPFAMQMAYRFNGIGVTQNVLYENQKLIANQFNSAIGKIQDSLSSTAPALGKLQDVVNQNAQALNTLVKQLSSNFGAISSVLNDILSRLDPPEAEVQIDRLITGRLQSLQTYVTQQLIRAAEIRASANLAATKMSECVLGQSKRVDFCGKGYQLMSFPQSAPHGVVFLNVTYVPAQEKNFTTAPAICNDGKAHFPREGVFVSNGTNWFVTQRNFYEPQIITTDNTFVSGNCDVVIGIVNNTVYDPLQPELDSGGSGYIPEAPRDGQAYVRKDGEWVLLSTFL

SEQ ID NO: 9949 - protein, 1177 aa, Artificial Sequence
  SARS-CoV-2/Germany/BavPat3/2020__EPI_ISL_414521 spike protein (1-1147)(K986P_V987P_ H1048Q_H1064N_ H1083N_H1101N) Foldon construct
MFVFLVLLPLVSSQCVNLTTRTQLPPAYTNSFTRGVYYPDKVFRSSVLHSTQDLFLPFFSNVTWFHAIHVSGTNGTKRFDNPVLPFNDGVYFASTEKSNIIRGWIFGTTLDSKTQSLLIVNNATNVVIKVCEFQFCNDPFLGVYYHKNNKSWMESEFRVYSSANNCTFEYVSQPFLMDLEGKQGNFKNLREFVFKNIDGYFKIYSKHTPINLVRDLPQGFSALEPLVDLPIGINITRFQTLLALHRSYLTPGDSSSGWTAGAAAYYVGYLQPRTFLLKYNENGTITDAVDCALDPLSETKCTLKSFTVEKGIYQTSNFRVQPTESIVRFPNITNLCPFGEVFNATRFASVYAWNRKRISNCVADYSVLYNSASFSTFKCYGVSPTKLNDLCFTNVYADSFVIRGDEVRQIAPGQTGKIADYNYKLPDDFTGCVIAWNSNNLDSKVGGNYNYLYRLFRKSNLKPFERDISTEIYQAGSTPCNGVEGFNCYFPLQSYGFQPTNGVGYQPYRVVVLSFELLHAPATVCGPKKSTNLVKNKCVNFNFNGLTGTGVLTESNKKFLPFQQFGRDIADTTDAVRDPQTLEILDITPCSFGGVSVITPGTNTSNQVAVLYQDVNCTEVPVAIHADQLTPTWRVYSTGSNVFQTRAGCLIGAEHVNNSYECDIPIGAGICASYQTQTNSPRRARSVASQSIIAYTMSLGAENSVAYSNNSIAIPTNFTISVTTEILPVSMTKTSVDCTMYICGDSTECSNLLLQYGSFCTQLNRALTGIAVEQDKNTQQVFAQVKQIYKTPPIKDFGGFNFSQILPDPSKPSKRSFIEDLLFNKVTLADAGFIKQYGDCLGDIAARDLICAQKFNGLTVLPPLLTDEMIAQYTSALLAGTITSGWTFGAGAALQIPFAMQMAYRFNGIGVTQNVLYENQKLIANQFNSAIGKIQDSLSSTASALGKLQDVVNQNAQALNTLVKQLSSNFGAISSVLNDILSRLDPPEAEVQIDRLITGRLQSLQTYVTQQLIRAAEIRASANLAATKMSECVLGQSKRVDFCGKGYQLMSFPQSAPHGVVFLNVTYVPAQEKNFTTAPAICNDGKAHFPREGVFVSNGTNWFVTQRNFYEPQIITTDNTFVSGNCDVVIGIVNNTVYDPLQPELDSGGSGYIPEAPRDGQAYVRKDGEWVLLSTFL

SEQ ID NO: 9950 - protein, 1177 aa, Artificial Sequence
  SARS-CoV-2/France/HF1805/2020__EPI_ISL_414628 spike protein (1-1147)(K986P_V987P_ H1048Q_H1064N_ H1083N_H1101N) Foldon construct
MFVFLVLLPLVSSQCVNLTTRTQLPPAYTNSFTRGVYYPDKVFRSSVLHSTQDLFLPFFSNVTWFHAIHVSGTNGTKRFDNPVLPFNDGVYFASTEKSNIIRGWIFGTTLDSKTQSLLIVNNATNVVIKVCEFQFCNDPFLGVYYHKNNKSWMESEFRVYSSANNCTFEYVSQPFLMDLEGKQGNFKNLREFVFKNIDGYFKIYSKHTPINLVRDLPQGFSALEPLVDLPIGINITRFQTLLALHRSYLTPGDSSSGWTAGAAAYYVGYLQPRTFLLKYNENGTITDAVDCALDPLSETKCTLKSFTVEKGIYQTSNFRVQPTESIVRFPNITNLCPFGEVFNATRFASVYAWNRKRISNCVADYSVLYNSASFSTFKCYGVSPTKLNDLCFTNVYADSFVIRGDEVRQIAPGQTGKIADYNYKLPDDFTGCVIAWNSNNLDSKVGGNYNYLYRLFRKSNLKPFERDISTEIYQAGSTPCNGVEGFNCYFPLQSYGFQPTNGVGYQPYRVVVLSFELLHAPATVCGPKKSTNLVKNKCVNFNFNGLTGTGVLTESNKKFLPFQQFGRDIADTTDAVRDPQTLEILDITPCSFGGVSVITPGTNTSNQVAVLYQGVNCTEVPVAIHADQLTPTWRVYSTGSNVFQTRAGCLIGAEHVNNSYECDIPIGAGICASYQTQTNSPRRARSVASQSIIAYTMSLGAENSVAYSNNSIAIPTNFTISVTTEILPVSMTKTSVDCTMYICGDSTECSNLLLQYGSFCTQLNRALTGIAVEQDKNTQEVFAQVKQIYKTPPIKDFGGFNFSQILPDPSKPSKRSFIEDLLFNKVTLADAGFIKQYGDCLGDIAARDLICAQKFNGLTVLPPLLTDEMIAQYTSALLAGTITSGWTFGAGAALQIPFAMQMAYRFNGIGVTQNVLYENQKLIANQFNSAIGKIQDSLSSTASALGKLQDVVNQNAQALNTLVKQLSSNFGAISSVLNDILSRLDPPEAEVQIDRLITGRLQSLQTYVTQQLIRAAEIRASANLAATKMSECVLGQSKRVDFCGKGYQLMSFPQSAPHGVVFLNVTYVPAQEKNFTTAPAICNDGKAHFPREGVFVSNGTNWFVTQRNFYEPQIITTDNTFVSGNCDVVIGVVNNTVYDPLQPELDSGGSGYIPEAPRDGQAYVRKDGEWVLLSTFL

SEQ ID NO: 9951 - protein, 1177 aa, Artificial Sequence
  SARS-CoV-2/Netherlands/ZuidHolland_9/2020__EPI_ISL_414445 spike protein (1-1147)(K986P_V987P_ H1048Q_H1064N_ H1083N_H1101N) Foldon construct
MFVFLVLLPLVSSQCVNLTTRTQLPPAYTNSFTRGVYYPDKVFRSSVLHSTQDLFLPFFSNVTWFHAIHVSGTNGTKRFDNPVLPFNDGVYFASTEKSNIIRGWIFGTTLDSKTQSLLIVNNATNVVIKVCEFQFCNDPFLGVYYHKNNKSWMESEFRVYSSANNCTFEYVSQPFLMDLEGKQGNFKNLREFVFKNIDGYFKIYSKHTPINLVRDLPQGFSALEPLVDLPIGINITRFQTLLALHRSYLTPGDSSSGWTAGAAAYYVGYLQPRTFLLKYNENGTITDAVDCALDPLSETKCTLKSFTVEKGIYQTSNFRVQPTESIVRFPNITNLCPFGEVFNATRFASVYAWNRKRISNCVADYSVLYNSASFSTFKCYGVSPTKLNDLCFTNVYADSFVIRGDEVRQIAPGQTGKIADYNYKLPDDFTGCVIAWNSNNLDSKVGGNYNYLYRLFRKSNLKPFERDISTEIYQAGSTPCNGVEGFNCYFPLQSYGFQPTNGVGYQPYRVVVLSFELLHAPATVCGPKKSTNLVKNKCVNFNFNGLTGTGVLTESNKKFLPFQQFGRDIADTTDAVRDPQTLEILDITPCSFGGVSVITPGTNTSNQVAVLYQGVNCTEVPVAIHADQLTPTWRVYSTGSNVFQTRAGCLIGAEHVNNSYECDIPIGAGICASYQTQTNSPRRARSVASQSIIAYTMSLGAENSVAYSNNSIAIPTNFTISVTTEILPVSMTKTSVDCTMYICGDSTECSNLLLQYGSFCTQLNRALTGIAVEQDKNTQEVFAQVKQIYKTPPIKDFGGFNFSQILPDPSKPSKRSFIEDLLFNKVTLADAGFIKQYGDCLGDIAARDLICVQKFNGLTVLPPLLTDEMIAQYTSALLAGTITSGWTFGAGAALQIPFAMQMAYRFNGIGVTQNVLYENQKLIANQFNSAIGKIQDSLSSTASALGKLQDVVNQNAQALNTLVKQLSSNFGAISSVLNDILSRLDPPEAEVQIDRLITGRLQSLQTYVTQQLIRAAEIRASANLAATKMSECVLGQSKRVDFCGKGYQLMSFPQSAPHGVVFLNVTYVPAQEKNFTTAPAICNDGKAHFPREGVFVSNGTNWFVTQRNFYEPQIITTDNTFVSGNCDVVIGIVNNTVYDPLQPELDSGGSGYIPEAPRDGQAYVRKDGEWVLLSTFL

SEQ ID NO: 9952 - protein, 1177 aa, Artificial Sequence
  SARS-CoV-2/Finland/FIN03032020A/2020__EPI_ISL_413602 spike protein (1-1147)(K986P_V987P_ H1048Q_H1064N_ H1083N_H1101N) Foldon construct
MFVFLVLLPLVSSQCVNLTTRTQLPPAYTNSFTRGVYYPDKVFRSSVLHSTQDLFLPFFSNVTWFHAIHVSGTNGTKRFDNPVLPFNDGVYFASTEKSNIIRGWIFGTTLDSKTQSLLIVNNATNVVIKVCEFQFCNDPFLGVYYHKNNKSWMESEFRVYSSANNCTFEYVSQPFLMDLEGKQGNFKNLREFVFKNIDGYFKIYSKHTPINLVRDLPQGFSALEPLVDLPIGINITRFQTLLALHRSYLTPGDSSSGWTAGAAAYYVGYLQPRTFLLKYNENGTITDAVDCALDPLSETKCTLKSFTVEKGIYQTSNFRVQPTESIVRFPNITNLCPFGEVFNATRFASVYAWNRKRISNCVADYSVLYNSASFSTFKCYGVSPTKLNDLCFTNVYADSFVIRGDEVRQIAPGQTGKIADYNYKLPDDFTGCVISWNSNNLDSKVGGNYNYLYRLFRKSNLKPFERDISTEIYQAGSTPCNGVEGFNCYFPLQSYGFQPTNGVGYQPYRVVVLSFELLHAPATVCGPKKSTNLVKNKCVNFNFNGLTGTGVLTESNKKFLPFQQFGRDIADTTDAVRDPQTLEILDITPCSFGGVSVITPGTNTSNQVAVLYQGVNCTEVPVAIHADQLTPTWRVYSTGSNVFQTRAGCLIGAEHVNNSYECDIPIGAGICASYQTQTNSPRRARSVASQSIIAYTMSLGAENSVAYSNNSIAIPTNFTISVTTEILPVSMTKTSVDCTMYICGDSTECSNLLLQYGSFCTQLNRALTGIAVEQDKNTQEVFAQVKQIYKTPPIKDFGGFNFSQILPDPSKPSKRSFIEDLLFNKVTLADAGFIKQYGDCLGDIAARDLICAQKFNGLTVLPPLLTDEMIAQYTSALLAGTITSGWTFGAGAALQIPFAMQMAYRFNGIGVTQNVLYENQKLIANQFNSAIGKIQDSLSSTASALGKLQDVVNQNAQALNTLVKQLSSNFGAISSVLNDILSRLDPPEAEVQIDRLITGRLQSLQTYVTQQLIRAAEIRASANLAATKMSECVLGQSKRVDFCGKGYQLMSFPQSAPHGVVFLNVTYVPAQEKNFTTAPAICNDGKAHFPREGVFVSNGTNWFVTQRNFYEPQIITTDNTFVSGNCDVVIGIVNNTVYDPLQPELDSGGSGYIPEAPRDGQAYVRKDGEWVLLSTFL

SEQ ID NO: 9953 - protein, 1177 aa, Artificial Sequence
  SARS-CoV-2/France/GE1977/2020__EPI_ISL_414632 spike protein (1-1147)(K986P_V987P_ H1048Q_H1064N_ H1083N_H1101N) Foldon construct
MFVFLVLLPLVSSQCVNLTTRTQLPPAYTNSFTRGVYYPDKVFRSSVLHSTQDLFLPFFSNVTWFHAIHVSGTNGTKRFDNPVLPFNDGVYFASTEKSNIIRGWIFGTTLDSKTQSLLIVNNATNVVIKVCEFQFCNDPFLGVYYHKNNKSWMESEFRVYSSANNCTFEYVSQPFLMDLEGKQGNFKNLREFVFKNIDGYFKIYSKHTPINLVRDLPQGFSALEPLVDLPIGINITRFQTLLALHRSYLTPGDSSSGWTAGAAAYYVGYLQPRTFLLKYNENGTITDAVDCALDPLSETKCTLKSFTVEKGIYQTSNFRVQPTESIVRFPNITNLCPFGEVFNATRFASVYAWNRKRISNCVADYSVLYNSASFSTFKCYGVSPTKLNDLCFTNVYADSFVIRGDEVRQIAPGQTGKIADYNYKLPDDFTGCVIAWNSNNLDSKVGGNYNYLYRLFRKSNLKPFERDISTEIYQAGSTPCNGVEGFNCYFPLQSYGFQPTNGVGYQPYRVVVLSFELLHAPATVCGPKKSTNLVKNKCVNFNFNGLTGTGVLTESNKKFLPFQQFGRDIADTTDAVRDPQTLEILDITPCSFGGVSVITPGTNTSNQVAVLYQGVNCTEVPVAIHADQLTPTWRVYSTGSNVFQTRAGCLIGAEHVNNSYECDIPIGAGICASYQTQTNSPRRARSVASQSIIAYTMSLGAENSVAYSNNSIAIPTNFTISVTTEILPVSMTKTSVDCTMYICGDSTECSNLLLQYGSFCTQLNRALTGIAVEQDKNTQEVFAQVKQIYKTPPIKDFGGFNFSQILPDPSKPSKRSFIEDLLFNKVTLADAGFIKQYGDCLGDIAARDLICAQKFNGLTVLPPLLTDEMIAQYTSALLAGTITSGWTFGAGAALQIPFAMQMAYRFNGIGVTQNVLYENQKLIANQFNSAIGKIQDSLFSTASALGKLQDVVNQNAQALNTLVKQLSSNFGAISSVLNDILSRLDPPEAEVQIDRLITGRLQSLQTYVTQQLIRAAEIRASANLAATKMSECVLGQSKRVDFCGKGYQLMSFPQSAPHGVVFLNVTYVPAQEKNFTTAPAICNDGKAHFPREGVFVSNGTNWFVTQRNFYEPQIITTDNTFVSGNCDVVIGIVNNTVYDPLQPELDSGGSGYIPEAPRDGQAYVRKDGEWVLLSTFL

SEQ ID NO: 9954 - protein, 1177 aa, Artificial Sequence
  SARS-CoV-2/Finland/FIN-313/2020__EPI_ISL_414641 spike protein (1-1147)(K986P_V987P_ H1048Q_H1064N_ H1083N_H1101N) Foldon construct
MFVFLVLLPLVSSQCVNLTTRTQLPPAYTNSFTRGVYYPDKVFRSSVLHSTQDLFLPFFSNVTWFHAIHVSGTNGTKRFDNPVLPFNDGVYFASTEKSNIIRGWIFGTTLDSKTQSLLIVNNATNVVIKVCEFQFCNDPFLGVYYHKNNKSWMESEFRVYSSANNCTFEYVSQPFLMDLEGKQGNFKNLREFVFKNIDGYFKIYSKHTPINLVRDLPQGFSALEPLVDLPIGINITRFKTLLALHRSYLTPGDSSSGWTAGAAAYYVGYLQPRTFLLKYNENGTITDAVDCALDPLSETKCTLKSFTVEKGIYQTSNFRVQPTESIVRFPNITNLCPFGEVFNATRFASVYAWNRKRISNCVADYSVLYNSASFSTFKCYGVSPTKLNDLCFTNVYADSFVIRGDEVRQIAPGQTGKIADYNYKLPDDFTGCVIAWNSNNLDSKVGGNYNYLYRLFRKSNLKPFERDISTEIYQAGSTPCNGVEGFNCYFPLQSYGFQPTNGVGYQPYRVVVLSFELLHAPATVCGPKKSTNLVKNKCVNFNFNGLTGTGVLTESNKKFLPFQQFGRDIADTTDAVRDPQTLEILDITPCSFGGVSVITPGTNTSNQVAVLYQGVNCTEVPVAIHADQLTPTWRVYSTGSNVFQTRAGCLIGAEHVNNSYECDIPIGAGICASYQTQTNSPRRARSVASQSIIAYTMSLGAENSVAYSNNSIAIPTNFTISVTTEILPVSMTKTSVDCTMYICGDSTECSNLLLQYGSFCTQLNRALTGIAVEQDKNTQEVFAQVKQIYKTPPIKDFGGFNFSQILPDPSKPSKRSFIEDLLFNKVTLADAGFIKQYGDCLGDIAARDLICAQKFNGLTVLPPLLTDEMIAQYTSALLAGTITSGWTFGAGAALQIPFAMQMAYRFNGIGVTQNVLYENQKLIANQFNSAIGKIQDSLSSTASALGKLQDVVNQNAQALNTLVKQLSSNFGAISSVLNDILSRLDPPEAEVQIDRLITGRLQSLQTYVTQQLIRAAEIRASANLAATKMSECVLGQSKRVDFCGKGYQLMSFPQSAPHGVVFLNVTYVPAQEKNFTTAPAICNDGKAHFPREGVFVSNGTNWFVTQRNFYEPQIITTDNTFVSGNCDVVIGIVNNTVYDPLQPELDSGGSGYIPEAPRDGQAYVRKDGEWVLLSTFL

SEQ ID NO: 9955 - protein, 1177 aa, Artificial Sequence
  SARS-CoV-2/Netherlands/ZuidHolland_2/2020__EPI_ISL_414556 spike protein (1-1147)(K986P_V987P_ H1048Q_H1064N_ H1083N_H1101N) Foldon construct
MFVFLVLLPLVSSQCVNLTTRTQLPPAYTNSFTRGVYYPDKVFRSSVLHSTQDLFLPFFSNVTWFHAIHVSGTNGTKRFDNPVLPFNDGVYFASTEKSNIIRGWIFGTTLDSKTQSLLIVNNATNVVIKVCEFQFCNDPFLGVYYHKNNKSWMESEFRVYSSANNCTFEYVSQPFLMDLEGKQGNFKNLREFVFKNIDGYFKIYSKHTPINLVRDLPQGFSALEPLVDLPIGINITRFQTLLALHRSYLTPGDSSSGWTAGAAAYYVGYLQPRTFLLKYNENGTITDAVDCALDPLSETKCTLKSFTVEKGIYQTSNFRVQPTESIVRFPNITNLCPFGEVFNATRFASVYAWNRKRISNCVADYSVLYNSASFSTFKCYGVSPTKLNDLCFTNVYADSFVIRGDEVRQIAPGQTGKIADYNYKLPDDFTGCVIAWNSNNLDSKVGGNYNYLYRLFRKSNLKPFERDISTEIYQAGSTPCNGVEGFNCYFPLQSYGFQPTNGVGYQPYRVVVLSFELLHAPATVCGPKKSTNLVKNKCVNFNFNGLTGTGVLTESNKKFLPFQQFGRDIADTTDAVRDPQTLEILDITPCSFGGVSVITPGTNTSNQVAVLYQGVNCTEVPVAIHADQLTPTWRVYSTGSNVFQTRAGCLIGAEHVNNSYECDIPIGAGICASYQTQTNSPRRARSVASQSIIAYTMSLGAENSVAYSNNSIAIPTNFTISVTTEILPVSMTKTSVDCTMYICGDSTECSNLLLQYGSFCTQLNRALTGIALEQDKNTQEVFAQVKQIYKTPPIKDFGGFNFSQILPDPSKPSKRSFIEDLLFNKVTLADAGFIKQYGDCLGDIAARDLICAQKFNGLTVLPPLLTDEMIAQYTSALLAGTITSGWTFGAGAALQIPFAMQMAYRFNGIGVTQNVLYENQKLIANQFNSAIGKIQDSLSSTASALGKLQDVVNQNAQALNTLVKQLSSNFGAISSVLNDILSRLDPPEAEVQIDRLITGRLQSLQTYVTQQLIRAAEIRASANLAATKMSECVLGQSKRVDFCGKGYQLMSFPQSAPHGVVFLNVTYVPAQEKNFTTAPAICNDGKAHFPREGVFVSNGTNWFVTQRNFYEPQIITTDNTFVSGNCDVVIGIVNNTVYDPLQPELDSGGSGYIPEAPRDGQAYVRKDGEWVLLSTFL

SEQ ID NO: 9956 - protein, 1177 aa, Artificial Sequence
  SARS-CoV-2/USA/WA-UW31/2020__EPI_ISL_414618 spike protein (1-1147)(K986P_V987P_ H1048Q_H1064N_ H1083N_H1101N) Foldon construct
MFVFLVLLPLVSSQCVNLTTRTQLPPAYTNSFTRGVYYPDKVFRSSVLHSTQDLFLPFFSNVTWFHAIHVSGTNGTKRFDNPVLPFNDGVYFASTEKSNIIRGWIFGTTLDSKTQSLLIVNNATNVVIKVCEFQFCNDPFLGVYYHKNNKSWMESEFRVYSSANNCTFEYVSQPFLMDLEGKQGNFKNLREFVFKNIDGYFKIYSKHTPINLVRDLPQGFSALEPLVDLPIGINITRFQTLLALHRSYLTPGDSSSGWTAGAAAYYVGYLQPRTFLLKYNENGTITDAVDCALDPLSETKCTLKSFTVEKGIYQTSNFRVQPTESIVRFPNITNLCPFGEVFNATRFASVYAWNRKRISNCVADYSVLYNSASFSTFKCYGVSPTKLNDLCFTNVYADSFVIRGDEVRQIAPGQTGKIADYNYKLPDDFTGCVIAWNSNNLDSKVGGNYNYLYRLFRKSNLKPFERDISTEIYQAGSTPCNGAEGFNCYFPLQSYGFQPTNGVGYQPYRVVVLSFELLHAPATVCGPKKSTNLVKNKCVNFNFNGLTGTGVLTESNKKFLPFQQFGRDIADTTDAVRDPQTLEILDITPCSFGGVSVITPGTNTSNQVAVLYQDVNCTEVPVAIHADQLTPTWRVYSTGSNVFQTRAGCLIGAEHVNNSYECDIPIGAGICASYQTQTNSPRRARSVASQSIIAYTMSLGAENSVAYSNNSIAIPTNFTISVTTEILPVSMTKTSVDCTMYICGDSTECSNLLLQYGSFCTQLNRALTGIAVEQDKNTQEVFAQVKQIYKTPPIKDFGGFNFSQILPDPSKPSKRSFIEDLLFNKVTLADAGFIKQYGDCLGDIAARDLICAQKFNGLTVLPPLLTDEMIAQYTSALLAGTITSGWTFGAGAALQIPFAMQMAYRFNGIGVTQNVLYENQKLIANQFNSAIGKIQDSLSSTASALGKLQDVVNQNAQALNTLVKQLSSNFGAISSVLNDILSRLDPPEAEVQIDRLITGRLQSLQTYVTQQLIRAAEIRASANLAATKMSECVLGQSKRVDFCGKGYQLMSFPQSAPHGVVFLNVTYVPAQEKNFTTAPAICNDGKAHFPREGVFVSNGTNWFVTQRNFYEPQIITTDNTFVSGNCDVVIGIVNNTVYDPLQPELDSGGSGYIPEAPRDGQAYVRKDGEWVLLSTFL

SEQ ID NO: 9957 - protein, 1177 aa, Artificial Sequence
  SARS-CoV-2/South Korea/SNU01/2020__EPI_ISL_411929 spike protein (1-1147)(K986P_V987P_ H1048Q_H1064N_ H1083N_H1101N) Foldon construct
MFVFLVLLPLVSSQCVNLTTRTQLPPAYTNSFTRGVYYPDKVFRSSVLHSTQDLFLPFFSNVTWFHAIHVSGTNGTKRFDNPVLPFNDGVYFASTEKSNIIRGWIFGTTLDSKTQSLLIVNNATNVVIKVCEFQFCNDPFLGVYYHKNNKSWMESEFRVYSSANNCTFEYVSQPFLMDLEGKQGNFKNLREFVFKNIDGYFKIYSKHTPINLVRDLPQGFWALEPLVDLPIGINITRFQTLLALHRSYLTPGDSSSGWTAGAAAYYVGYLQPRTFLLKYNENGTITDAVDCALDPLSETKCTLKSFTVEKGIYQTSNFRVQPTESIVRFPNITNLCPFGEVFNATRFASVYAWNRKRISNCVADYSVLYNSASFSTFKCYGVSPTKLNDLCFTNVYADSFVIRGDEVRQIAPGQTGKIADYNYKLPDDFTGCVIAWNSNNLDSKVGGNYNYLYRLFRKSNLKPFERDISTEIYQAGSTPCNGVEGFNCYFPLQSYGFQPTNGVGYQPYRVVVLSFELLHAPATVCGPKKSTNLVKNKCVNFNFNGLTGTGVLTESNKKFLPFQQFGRDIADTTDAVRDPQTLEILDITPCSFGGVSVITPGTNTSNQVAVLYQDVNCTEVPVAIHADQLTPTWRVYSTGSNVFQTRAGCLIGAEHVNNSYECDIPIGAGICASYQTQTNSPRRARSVASQSIIAYTMSLGAENSVAYSNNSIAIPTNFTISVTTEILPVSMTKTSVDCTMYICGDSTECSNLLLQYGSFCTQLNRALTGIAVEQDKNTQEVFAQVKQIYKTPPIKDFGGFNFSQILPDPSKPSKRSFIEDLLFNKVTLADAGFIKQYGDCLGDIAARDLICAQKFNGLTVLPPLLTDEMIAQYTSALLAGTITSGWTFGAGAALQIPFAMQMAYRFNGIGVTQNVLYENQKLIANQFNSAIGKIQDSLSSTASALGKLQDVVNQNAQALNTLVKQLSSNFGAISSVLNDILSRLDPPEAEVQIDRLITGRLQSLQTYVTQQLIRAAEIRASANLAATKMSECVLGQSKRVDFCGKGYQLMSFPQSAPHGVVFLNVTYVPAQEKNFTTAPAICNDGKAHFPREGVFVSNGTNWFVTQRNFYEPQIITTDNTFVSGNCDVVIGIVNNTVYDPLQPELDSGGSGYIPEAPRDGQAYVRKDGEWVLLSTFL

SEQ ID NO: 9958 - protein, 1177 aa, Artificial Sequence
  SARS-CoV-2/China/WF0004/2020__EPI_ISL_413694 spike protein (1-1147)(K986P_V987P_ H1048Q_H1064N_ H1083N_H1101N) Foldon construct
MFVFLVLLPLVSSQCVNLTTRTQLPPAYTNSFTRGVYYPDKVFRSSVLHSTQDLFLPFFSNVTWFHAIHVSGTNGTKRFDNPVLPFNDGVYFASTEKSNIIRGWIFGTTLDSKTQSLLIVNNATNVVIKVCEFQFCNDPFLGVYYHKNNKSWTESEFRVYSSANNCTFEYVSQPFLMDLEGKQGNFKNLREFVFKNIDGYFKIYSKHTPINLVRDLPQGFSALEPLVDLPIGINITRFQTLLALHRSYLTPGDSSSGWTAGAAAYYVGYLQPRTFLLKYNENGTITDAVDCALDPLSETKCTLKSFTVEKGIYQTSNFRVQPTESIVRFPNITNLCPFGEVFNATRFASVYAWNRKRISNCVADYSVLYNSASFSTFKCYGVSPTKLNDLCFTNVYADSFVIRGDEVRQIAPGQTGKIADYNYKLPDDFTGCVIAWNSNNLDSKVGGNYNYLYRLFRKSNLKPFERDISTEIYQAGSTPCNGVEGFNCYFPLQSYGFQPTNGVGYQPYRVVVLSFELLHAPATVCGPKKSTNLVKNKCVNFNFNGLTGTGVLTESNKKFLPFQQFGRDIADTTDAVRDPQTLEILDITPCSFGGVSVITPGTNTSNQVAVLYQDVNCTEVPVAIHADQLTPTWRVYSTGSNVFQTRAGCLIGAEHVNNSYECDIPIGAGICASYQTQTNSPRRARSVASQSIIAYTMSLGAENSVAYSNNSIAIPTNFTISVTTEILPVSMTKTSVDCTMYICGDSTECSNLLLQYGSFCTQLNRALTGIAVEQDKNTQEVFAQVKQIYKTPPIKDFGGFNFSQILPDPSKPSKRSFIEDLLFNKVTLADAGFIKQYGDCLGDIAARDLICAQKFNGLTVLPPLLTDEMIAQYTSALLAGTITSGWTFGAGAALQIPFAMQMAYRFNGIGVTQNVLYENQKLIANQFNSAIGKIQDSLSSTASALGKLQDVVNQNAQALNTLVKQLSSNFGAISSVLNDILSRLDPPEAEVQIDRLITGRLQSLQTYVTQQLIRAAEIRASANLAATKMSECVLGQSKRFDFCGKGYQLMSFPQSAPHGVVFLNVTYVPAQEKNFTTAPAICNDGKAHFPREGVFVSNGTNWFVTQRNFYEPQIITTDNTFVSGNCDVVIGIVNNTVYDPLQPELDSGGSGYIPEAPRDGQAYVRKDGEWVLLSTFL

SEQ ID NO: 9959 - protein, 1177 aa, Artificial Sequence
  SARS-CoV-2/China/WF0028/2020__EPI_ISL_413791 spike protein (1-1147)(K986P_V987P_ H1048Q_H1064N_ H1083N_H1101N) Foldon construct
MFVFLVLLPLVSSQCVNLTTRTQLPPAYTNSFTRGVYYPDKVFRSSVLHSTQDLFLPFFSNVTWFHAIHVSGTNGTKRFDNPVLPFNDGVYFASTEKSNIIRGWIFGTTLDSKTQSLLIVNNATNVVIKVCEFQFCNDPFLGVYYHKNNKSWMESEFRVYSSANNCTFEYVSQPFLMDLEGKQGNFKNLREFVFKNIDGYFKIYSKHTPINLVRDLPQGFSALEPLVDLPIGINITRFQTLLALHRSYLTPGDSSSGWTAGAAAYYVGYLQPRTFLLKYNENGTITDAVDCALDPLSETKCTLKSFTVEKGIYQTSNFRVQPTESIVRFPNITNLCPFGEVFNATRFASVYAWNRKRISNCVADYSVLYNSASFSTFKCYGVSPTKLNDLCFTNVYADSFVIRGDEVRQIAPGQTGKIADYNYKLPDDFTGCVIAWNSNNLDSKVGGNYNYLYRLFRKSNLKPFERDISTEIYQAGSTPCNGVEGFNCYFPLQSYGFQPTNGVGYQPYRVVVLSFELLHAPATVCGPKKSTNLVKNKCVNFNFNGLTGTGVLTESNKKFLPFQQFGRDIADTTDAVRDPQTLEILDITPCSFGGVSVITPGTNTSNQVAVLYQDVNCTEVPVAIHADQLTPTWRVYSTGSNVFQTRAGCLIGAEHVNNSYECDIPIGAGICASYQTQTNSPRRARSVASQSIIAYTMSLGAENSVAYSNNSIAIPTNFTISVTTEILPVSMTKTSVDCTMYICGDSTECSNLLLQYGSFCTQLNRALTGIAVEQDKNTQEVFAQVKQIYKTPPIKDFGGFNFSQILPDPSKPSKRSFIEDLLFNKVTLADAGFIKQYGDCLGDIAARDLICAQKFNGLTVLPPLLTDEMIAQYTSALLAGTITSGWTFGAGAALQIPFAMQMAYRFNGIGVTQNVLYENQKLIANQFNSAIGKIQDSLSSTASALGKLQDVVNQNAQALNTLVKQLSSNFGAISSVLNDILSRLDPPEAEVQIDRLITGRLQSLQTYVTQQLIRAAEIRASANLAATKMSECVLGQSKRVDFCGKGYQLMSFPQSAPHGVVFLNVTYVPAQEKNFTTAPAICNDGKAHFPREGVFVSNGTNWFVTQRNFYEPQIITTDNTFVSGNCDVVIGIVNNTVYDPLQPELESGGSGYIPEAPRDGQAYVRKDGEWVLLSTFL

SEQ ID NO: 9960 - protein, 1177 aa, Artificial Sequence
  SARS-CoV-2/2019-nCoV/USA-CruiseA-18/2020__MT159716.1 spike protein (1-1147)(K986P_V987P_ H1048Q_H1064N_ H1083N_H1101N) Foldon construct
MFVFLVLLPLVSSQCVNLTTRTQLPPAYTNSFTRGVYYPDKVFRSSVLHSTQDLFLPFFSNVTWFHAIHVSGTNGTKRFDNPVLPFNDGVYFASTEKSNIIRGWIFGTTLDSKTQSLLIVNNATNVVIKVCEFQFCNDPFLGVYYHKNNKSWMESELRVYSSANNCTFEYVSQPFLMDLEGKQGNFKNLREFVFKNIDGYFKIYSKHTPINLVRDLPQGFSALEPLVDLPIGINITRFQTLLALHRSYLTPGDSSSGWTAGAAAYYVGYLQPRTFLLKYNENGTITDAVDCALDPLSETKCTLKSFTVEKGIYQTSNFRVQPTESIVRFPNITNLCPFGEVFNATRFASVYAWNRKRISNCVADYSVLYNSASFSTFKCYGVSPTKLNDLCFTNVYADSFVIRGDEVRQIAPGQTGKIADYNYKLPDDFTGCVIAWNSNNLDSKVGGNYNYLYRLFRKSNLKPFERDISTEIYQAGSTPCNGVEGFNCYFPLQSYGFQPTNGVGYQPYRVVVLSFELLHAPATVCGPKKSTNLVKNKCVNFNFNGLTGTGVLTESNKKFLPFQQFGRDIADTTDAVRDPQTLEILDITPCSFGGVSVITPGTNTSNQVAVLYQDVNCTEVPVAIHADQLTPTWRVYSTGSNVFQTRAGCLIGAEHVNNSYECDIPIGAGICASYQTQTNSPRRARSVASQSIIAYTMSLGAENSVAYSNNSIAIPTNFTISVTTEILPVSMTKTSVDCTMYICGDSTECSNLLLQYGSFCTQLNRALTGIAVEQDKNTQEVFAQVKQIYKTPPIKDFGGFNFSQILPDPSKPSKRSFIEDLLFNKVTLADAGFIKQYGDCLGDIAARDLICAQKFNGLTVLPPLLTDEMIAQYTSALLAGTITSGWTFGAGAALQIPFAMQMAYRFNGIGVTQNVLYENQKLIANQFNSAIGKIQDSLSSTASALGKLQDVVNQNAQALNTLVKQLSSNFGAISSVLNDILSRLDPPEAEVQIDRLITGRLQSLQTYVTQQLIRAAEIRASANLAATKMSECVLGQSKRVDFCGKGYQLMSFPQSAPHGVVFLNVTYVPAQEKNFTTAPAICNDGKAHFPREGVFVSNGTNWFVTQRNFYEPQIITTDNTFVSGNCDVVIGIVNNTVYDPLQPELDSGGSGYIPEAPRDGQAYVRKDGEWVLLSTFL

SEQ ID NO: 9961 - protein, 1177 aa, Artificial Sequence
  SARS-CoV-2/SARS-CoV-2/Yunnan-01/human/2020/CHN__MT049951.1 spike protein (1-1147)(K986P_V987P_ H1048Q_H1064N_ H1083N_H1101N) Foldon construct
MFVFLVLLPLVSSQCVNLTTRTQLPPANTNSFTRGVYYPDKVFRSSVLHSTQDLFLPFFSNVTWFHAIHVSGTNGTKRFDNPVLPFNDGVYFASTEKSNIIRGWIFGTTLDSKTQSLLIVNNATNVVIKVCEFQFCNDPFLGVYYHKNNKSWMESEFRVYSSANNCTFEYVSQPFLMDLEGKQGNFKNLREFVFKNIDGYFKIYSKHTPINLVRDLPQGFSALEPLVDLPIGINITRFQTLLALHRSYLTPGDSSSGWTAGAAAYYVGYLQPRTFLLKYNENGTITDAVDCALDPLSETKCTLKSFTVEKGIYQTSNFRVQPTESIVRFPNITNLCPFGEVFNATRFASVYAWNRKRISNCVADYSVLYNSASFSTFKCYGVSPTKLNDLCFTNVYADSFVIRGDEVRQIAPGQTGKIADYNYKLPDDFTGCVIAWNSNNLDSKVGGNYNYLYRLFRKSNLKPFERDISTEIYQAGSTPCNGVEGFNCYFPLQSYGFQPTNGVGYQPYRVVVLSFELLHAPATVCGPKKSTNLVKNKCVNFNFNGLTGTGVLTESNKKFLPFQQFGRDIADTTDAVRDPQTLEILDITPCSFGGVSVITPGTNTSNQVAVLYQDVNCTEVPVAIHADQLTPTWRVYSTGSNVFQTRAGCLIGAEHVNNSYECDIPIGAGICASYQTQTNSPRRARSVASQSIIAYTMSLGAENSVAYSNNSIAIPTNFTISVTTEILPVSMTKTSVDCTMYICGDSTECSNLLLQYGSFCTQLNRALTGIAVEQDKNTQEVFAQVKQIYKTPPIKDFGGFNFSQILPDPSKPSKRSFIEDLLFNKVTLADAGFIKQYGDCLGDIAARDLICAQKFNGLTVLPPLLTDEMIAQYTSALLAGTITSGWTFGAGAALQIPFAMQMAYRFNGIGVTQNVLYENQKLIANQFNSAIGKIQDSLSSTASALGKLQDVVNQNAQALNTLVKQLSSNFGAISSVLNDILSRLDPPEAEVQIDRLITGRLQSLQTYVTQQLIRAAEIRASANLAATKMSECVLGQSKRVDFCGKGYQLMSFPQSAPHGVVFLNVTYVPAQEKNFTTAPAICNDGKAHFPREGVFVSNGTNWFVTQRNFYEPQIITTDNTFVSGNCDVVIGIVNNTVYDPLQPELDSGGSGYIPEAPRDGQAYVRKDGEWVLLSTFL

SEQ ID NO: 9962 - protein, 1177 aa, Artificial Sequence
  SARS-CoV-2/USA/WA-UW292/2020__EPI_ISL_418077 spike protein (1-1147)(K986P_V987P_ H1048Q_H1064N_ H1083N_H1101N) Foldon construct
MFVFLVLLPLVSSQCVNLTTRTQLPPAYTNSFTRGVYYPDKVFRSSVLHSTQDLFLPFFSNVTWFHAIHVSGTNGTKRFDNPVLPFNDGVYFASTEKSNIIRGWIFGTTLDSKTQSLLIVNNATNVVIKVCEFQFCNDPFLGVYYHKNNKSWMESEFRVYSSANNCTFEYVSQPFLMDLEGKQGNFKNLREFVFKNIDGYFKIYSKHTPINLVRDLPQGFSALEPLVDLPIGINITRFQTLLALHRSYLTPGDSSSGWTAGAAAYYVGYLQPRTFLLKYNENGTITDAVDCALDPLSETKCTLKSFTVEKGIYQTSNFRVQPTESIVRFPNITNLCPFGEVFNATRFASVYAWNRKRISNCVADYSVLYNSASFSTFKCYGVSPTKLNDLCFTNVYADSFVIRGDEVRQIAPGQTGKIADYNYKLPDDFTGCVIAWNSNNLDSKVGGNYNYLYRLFRKSNLKPFERDISTEIYQASSTPCNGVEGFNCYFPLQSYGFQPTNGVGYQPYRVVVLSFELLHAPATVCGPKKSTNLVKNKCVNFNFNGLTGTGVLTESNKKFLPFQQFGRDIADTTDAVRDPQTLEILDITPCSFGGVSVITPGTNTSNQVAVLYQDVNCTEVPVAIHADQLTPTWRVYSTGSNVFQTRAGCLIGAEHVNNSYECDIPIGAGICASYQTQTNSPRRARSVASQSIIAYTMSLGAENSVAYSNNSIAIPTNFTISVTTEILPVSMTKTSVDCTMYICGDSTECSNLLLQYGSFCTQLNRALTGIAVEQDKNTQEVFAQVKQIYKTPPIKDFGGFNFSQILPDPSKPSKRSFIEDLLFNKVTLADAGFIKQYGDCLGDIAARDLICAQKFNGLTVLPPLLTDEMIAQYTSALLAGTITSGWTFGAGAALQIPFAMQMAYRFNGIGVTQNVLYENQKLIANQFNSAIGKIQDSLSSTASALGKLQDVVNQNAQALNTLVKQLSSNFGAISSVLNDILSRLDPPEAEVQIDRLITGRLQSLQTYVTQQLIRAAEIRASANLAATKMSECVLGQSKRVDFCGKGYQLMSFPQSAPHGVVFLNVTYVPAQEKNFTTAPAICNDGKAHFPREGVFVSNGTNWFVTQRNFYEPQIITTDNTFVSGNCDVVIGIVNNTVYDPLQPELDSGGSGYIPEAPRDGQAYVRKDGEWVLLSTFL

SEQ ID NO: 9963 - protein, 1177 aa, Artificial Sequence
  SARS-CoV-2/Iceland/192/2020__EPI_ISL_417819 spike protein (1-1147)(K986P_V987P_ H1048Q_H1064N_ H1083N_H1101N) Foldon construct
MFVFFVLLPLVSSQCVNLTTRTQLPPAYTNSFTRGVYYPDKVFRSSVLHSTQDLFLPFFSNVTWFHAIHVSGTNGTKRFDNPVLPFNDGVYFASTEKSNIIRGWIFGTTLDSKTQSLLIVNNATNVVIKVCEFQFCNDPFLGVYYHKNNKSWMESEFRVYSSANNCTFEYVSQPFLMDLEGKQGNFKNLREFVFKNIDGYFKIYSKHTPINLVRDLPQGFSALEPLVDLPIGINITRFQTLLALHRSYLTPGDSSSGWTAGAAAYYVGYLQPRTFLLKYNENGTITDAVDCALDPLSETKCTLKSFTVEKGIYQTSNFRVQPTESIVRFPNITNLCPFGEVFNATRFASVYAWNRKRISNCVADYSVLYNSASFSTFKCYGVSPTKLNDLCFTNVYADSFVIRGDEVRQIAPGQTGKIADYNYKLPDDFTGCVIAWNSNNLDSKVGGNYNYLYRLFRKSNLKPFERDISTEIYQAGSTPCNGVEGFNCYFPLQSYGFQPTNGVGYQPYRVVVLSFELLHAPATVCGPKKSTNLVKNKCVNFNFNGLTGTGVLTESNKKFLPFQQFGRDIADTTDAVRDPQTLEILDITPCSFGGVSVITPGTNTSNQVAVLYQGVNCTEVPVAIHADQLTPTWRVYSTGSNVFQTRAGCLIGAEHVNNSYECDIPIGAGICASYQTQTNSPRRARSVASQSIIAYTMSLGAENSVAYSNNSIAIPTNFTISVTTEILPVSMTKTSVDCTMYICGDSTECSNLLLQYGSFCTQLNRALTGIAVEQDKNTQEVFAQVKQIYKTPPIKDFGGFNFSQILPDPSKPSKRSFIEDLLFNKVTLADAGFIKQYGDCLGDIAARDLICAQKFNGLTVLPPLLTDEMIAQYTSALLAGTITSGWTFGAGAALQIPFAMQMAYRFNGIGVTQNVLYENQKLIANQFNSAIGKIQDSLSSTASALGKLQDVVNQNAQALNTLVKQLSSNFGAISSVLNDILSRLDPPEAEVQIDRLITGRLQSLQTYVTQQLIRAAEIRASANLAATKMSECVLGQSKRVDFCGKGYQLMSFPQSAPHGVVFLNVTYVPAQEKNFTTAPAICNDGKAHFPREGVFVSNGTNWFVTQRNFYEPQIITTDNTFVSGNCDVVIGIVNNTVYDPLQPELDSGGSGYIPEAPRDGQAYVRKDGEWVLLSTFL

SEQ ID NO: 9964 - protein, 1177 aa, Artificial Sequence
  SARS-CoV-2/Belgium/ULG-6939/2020__EPI_ISL_417020 spike protein (1-1147)(K986P_V987P_ H1048Q_H1064N_ H1083N_H1101N) Foldon construct
MFVFLVLLPLVSSQCVNLTTRTQLPPAYTNSFTRGVYYPDKVFRSSVLHSTQDLFLPFFSNVTWFHAIHVSGTNGTKRFDNPVLPFNDGVYFASTEKSNIIRGWIFGTTLDSKTQSLLIVNNATNVVIKVCEFQFCNDPFLGVYYHKNNKSWMESEFRVYSSANNCTFEYVSQPFLMDLEGKQGNFKNLREFVFKNIDGYFKIYSKHTPINLVRDLPQGFSALEPLVDLPIGINITRFQTLLALHRSYLTPGDSSSGWTAGAAAYYVGYLQPRTFLLKYNENGTITDAVDCALDPLSETKCTLKSFTVEKGIYQTSNFRVQPTESIVRFPNITNLCPFGEVFNATRFASVYAWNRKRISNCVADYSVLYNSASFSTFKCYGVSPTKLNDLCFTNVYADSFVIRGDEVRQIAPGQTGKIADYNYKLPDDFTGCVIAWNSNNLDSKVGGNYNYLYRLFRKSNLKPFERDISTEIYQAGSTPCNGVEGFNCYFPLQSYGFQPTNGVGYQPYRVVVLSFELLHAPATVCGPKKSTNLVKNKCVNFNFNGLTGTGVLTESNKKFLPFQQFGRDIADTTDAVRDPQTLEILDITPCSFGGVSVITPGTNTSNQVAVLYQGVNCTEVPVAIHADQLTPTWRVYSTGSNVFQTRAGCLIGAEHVNNSYECDIPIGAGICASYQTQTNSPRRARSVASQSIIAYTMSLGAENSVVYSNNSIAIPTNFTISVTTEILPVSMTKTSVDCTMYICGDSTECSNLLLQYGSFCTQLNRALTGIAVEQDKNTQEVFAQVKQIYKTPPIKDFGGFNFSQILPDPSKPSKRSFIEDLLFNKVTLADAGFIKQYGDCLGDIAARDLICAQKFNGLTVLPPLLTDEMIAQYTSALLAGTITSGWTFGAGAALQIPFAMQMAYRFNGIGVTQNVLYENQKLIANQFNSAIGKIQDSLSSTASALGKLQDVVNQNAQALNTLVKQLSSNFGAISSVLNDILSRLDPPEAEVQIDRLITGRLQSLQTYVTQQLIRAAEIRASANLAATKMSECVLGQSKRVDFCGKGYQLMSFPQSAPHGVVFLNVTYVPAQEKNFTTAPAICNDGKAHFPREGVFVSNGTNWFVTQRNFYEPQIITTDNTFVSGNCDVVIGIVNNTVYDPLQPELDSGGSGYIPEAPRDGQAYVRKDGEWVLLSTFL

SEQ ID NO: 9965 - protein, 1177 aa, Artificial Sequence
  SARS-CoV-2/France/HF2496/2020__EPI_ISL_418231 spike protein (1-1147)(K986P_V987P_ H1048Q_H1064N_ H1083N_H1101N) Foldon construct
MFVFLVLLPLVSSQCVNLTTRTQLPPAYTNSFTRGVYYPDKVFRSSVLHSTQDLFLPFFSNVTWFHAIHVSGTNGTKRFDNPVLPFNDGVYFASTEKSNIIRGWIFGTTLDSKTQSLLIVNNATNVVIKVCEFQFCNDPFLGVYYHKNNKSWMESEFRVYSSANNCTFEYVSQPFLMDLEGKQGNFKNLREFVFKNIDGYFKIYSKHTPINLVRDLPQGFSALEPLVDLPIGINITRFQTLLALHRSYLTPGDSSSGWTAGAAAYYVGYLQPRTFLLKYNENGTITDAVDCALDPLSETKCTLKSFTVEKGIYQTSNFRVQPTESIVRFPNITNLCPFGEVFNATRFASVYAWNRKRISNCVADYSVLYNSASFSTFKCYGVSPTKLNDLCFTNVYADSFVIRGDEVRQIAPGQTGKIADYNYKLPDDFTGCVIAWNSNNLDSKVGGNYNYLYRLFRKSNLKPFERDISTEIYQAGSTPCNGVEGFNCYFPLQSYGFQPTNGVGYQPYRVVVLSFELLHAPATVCGPKKSTNLVKNKCVNFNFNGLTGTGVLTESNKKFLPFQQFGRDIADTTDAVRDPQTLEILDITPCSFGGVSVITPGTNTSNQVAVLYQGVNCTEVPVAIHADQLTPTWRVYSTGSNVFQTRAGCLIGAEHVNNSYECDIPIGAGICASYQTQTNSPRRARSVASQSIIAYTMSLGAENSVAYSNNSIAIPTNFTISVTTEILPVSMTKTSVDCTMYICGDSTECSNLLLQYGSFCTQLNRALTGIAVEQDKNTQEVFAQVKQIYKTPPIKDFGGFNFSQILPDPSKPSKRSFIEDLLFNKVTLADAGFIKQYGDCLGDIVARDLICAQKFNGLTVLPPLLTDEMIAQYTSALLAGTITSGWTFGAGAALQIPFAMQMAYRFNGIGVTQNVLYENQKLIANQFNSAIGKIQDSLSSTASALGKLQDVVNQNAQALNTLVKQLSSNFGAISSVLNDILSRLDPPEAEVQIDRLITGRLQSLQTYVTQQLIRAAEIRASANLAATKMSECVLGQSKRVDFCGKGYQLMSFPQSAPHGVVFLNVTYVPAQEKNFTTAPAICNDGKAHFPREGVFVSNGTNWFVTQRNFYEPQIITTDNTFVSGNCDVVIGIVNNTVYDPLQPELDSGGSGYIPEAPRDGQAYVRKDGEWVLLSTFL

SEQ ID NO: 9966 - protein, 1177 aa, Artificial Sequence
  SARS-CoV-2/USA/WA-UW291/2020__EPI_ISL_418076 spike protein (1-1147)(K986P_V987P_ H1048Q_H1064N_ H1083N_H1101N) Foldon construct
MFVFLVLLPLVSSQCVNLTTRTQLPPAYTNSFTRGVYYPDKVFRSSVLHSTQDLFLPFFSNVTWFHAIHVSGTNGTKRFDNPVLPFNDGVYFASTEKSNIIRGWIFGTTLDSKTQSLLIVNNATNVVIKVCEFQFCNDPFLGVYYHKNNKSWMESEFRVYSSANNCTFEYVSQPFLMDLEGKQGNFKNLREFVFKNIDGYFKIYSKHTPINLVRDLPQGFSALEPLVDLPIGINITRFQTLLALHRSYLTPGDSSSGWTAGAAAYYVGYLQPRTFLLKYNENGTITDAVDCALDPLSETKCTLKSFTVEKGIYQTSNFRVQPTESIVRFPNITNLCPFGEVFNATRFASVYAWNRKRISNCVADYSVLYNSASFSTFKCYGVSPTKLNDLCFTNVYADSFVIRGDEVRQIAPGQTGKIADYNYKLPDDFTGCVIAWNSNNLDSKVGGNYNYLYRLFRKSNLKPFERDISTEIYQAGSTPCNGVEGFNCYFPLQSYGFQPTNGVGYQPYRVVVLSFELLHAPATVCGPKKSTNLVKNKCVNFNFNGLTGTGVLTESNKKFLPFQQFGRDIADTTDAVRDPQTLEILDITPCSFGGVSVITPGTNTSNQVAVLYQGVNCTEVPVAIHADQLTPTWRVYSTGSNVFQTRAGCLIGAEHVNNSYECDIPIGAGICASYQTQTNSPRRARSVASQSIIAYTMSLGAENSVAYSNNSIAIPTNFTISVTTEILPVSMTKTSVDCTMYICGDSTECSNLLLQYGSFCTQLNRALTGIAVEQDKNTQEVFAQVKQIYKTPPIKDFGGFNFSQILPDPSKPSKRSFIEDLLFNKVTLADAGFIKQYGDCLGDIAARDLICAQKFNGLTVLPPLLTDEMIAQYTSALLAGTITSGWTFGAGAALQIPFAMQMAYRFNGIGVTQNVLYENQKLIANQFNSAIGKIQYSLSSTASALGKLQDVVNQNAQALNTLVKQLSSNFGAISSVLNDILSRLDPPEAEVQIDRLITGRLQSLQTYVTQQLIRAAEIRASANLAATKMSECVLGQSKRVDFCGKGYQLMSFPQSAPHGVVFLNVTYVPAQEKNFTTAPAICNDGKAHFPREGVFVSNGTNWFVTQRNFYEPQIITTDNTFVSGNCDVVIGIVNNTVYDPLQPELDSGGSGYIPEAPRDGQAYVRKDGEWVLLSTFL

SEQ ID NO: 9967 - protein, 1177 aa, Artificial Sequence; identical to SEQ ID NO: 9930
  SARS-CoV-2/Portugal/PT0034/2020__EPI_ISL_418019 spike protein (1-1147)(K986P_V987P_ H1048Q_H1064N_ H1083N_H1101N) Foldon construct

SEQ ID NO: 9968 - protein, 1177 aa, Artificial Sequence; identical to SEQ ID NO: 9922
  SARS-CoV-2/Iceland/202/2020__EPI_ISL_417750 spike protein (1-1147)(K986P_V987P_ H1048Q_H1064N_ H1083N_H1101N) Foldon construct

SEQ ID NO: 9969 - protein, 1177 aa, Artificial Sequence
  SARS-CoV-2/USA/WA-UW261/2020__EPI_ISL_418046 spike protein (1-1147)(K986P_V987P_ H1048Q_H1064N_ H1083N_H1101N) Foldon construct
MFVFLVLLPLVSSQCVNLTTRTQLPPAYTNSFTRGVYYPDKVFRSSVLHSTQDLFLPFFSNVTWFHAIHVSGTNGTKRFDNPVLPFNDGVYFASTEKSNIIRGWIFGTTLDSKTQSLLIVNNATNVVIKVCEFQFCNDPFLGVYYHKNNKSWMESEFRVYSSANNCTFEYVSQPFLMDLEGKQGNFKNLREFVFKNIDGYFKIYSKHTPINLVRDLPQGFSALEPLVDLPIGINITRFQTLLALHRSYLTPGDSSSGWTAGAAAYYVGYLQPRTFLLKYNENGTITDAVDCALDPLSETKCTLKSFTVEKGIYQTSNFRVQPTESIVRFPNITNLCPFGEVFNATRFTSVYAWNRKRISNCVADYSVLYNSASFSTFKCYGVSPTKLNDLCFTNVYADSFVIRGDEVRQIAPGQTGKIADYNYKLPDDFTGCVIAWNSNNLDSKVGGNYNYLYRLFRKSNLKPFERDISTEIYQAGSTPCNGVEGFNCYFPLQSYGFQPTNGVGYQPYRVVVLSFELLHAPATVCGPKKSTNLVKNKCVNFNFNGLTGTGVLTESNKKFLPFQQFGRDIADTTDAVRDPQTLEILDITPCSFGGVSVITPGTNTSNQVAVLYQDVNCTEVPVAIHADQLTPTWRVYSTGSNVFQTRAGCLIGAEHVNNSYECDIPIGAGICASYQTQTNSPRRARSVASQSIIAYTMSLGAENSVAYSNNSIAIPTNFTISVTTEILPVSMTKTSVDCTMYICGDSTECSNLLLQYGSFCTQLNRALTGIAVEQDKNTQEVFAQVKQIYKTPPIKDFGGFNFSQILPDPSKPSKRSFIEDLLFNKVTLADAGFIKQYGDCLGDIAARDLICAQKFNGLTVLPPLLTDEMIAQYTSALLAGTITSGWTFGAGAALQIPFAMQMAYRFNGIGVTQNVLYENQKLIANQFNSAIGKIQDSLSSTASALGKLQDVVNQNAQALNTLVKQLSSNFGAISSVLNDILSRLDPPEAEVQIDRLITGRLQSLQTYVTQQLIRAAEIRASANLAATKMSECVLGQSKRVDFCGKGYQLMSFPQSAPHGVVFLNVTYVPAQEKNFTTAPAICNDGKAHFPREGVFVSNGTNWFVTQRNFYEPQIITTDNTFVSGNCDVVIGIVNNTVYDPLQPELDSGGSGYIPEAPRDGQAYVRKDGEWVLLSTFL

SEQ ID NO: 9970 - protein, 1177 aa, Artificial Sequence
  SARS-CoV-2/Portugal/PT0035/2020__EPI_ISL_418020 spike protein (1-1147)(K986P_V987P_ H1048Q_H1064N_ H1083N_H1101N) Foldon construct
MFVFLVLLPLVSSQCVNLTTRTQLPPAYTNSFTRGVYYPDKVFRSSVLHSTQDLFLPFFSNVTWFHAIHVSGTNGTKRFDNPVLPFNDGVYFASTEKSNIIRGWIFGTTLDSKTQSLLIVNNATNVVIKVCEFQFCNDPFLGVYYHKNNKSWMESEFRVYSSANNCTFEYVSQPFLMDLEGKQGNFKNLREFVFKNIDGYFKIYSKHTPINLVRDLPQGFSALEPLVDLPIGINITRFQTLLALHRSYLTPGDSSSGWTAGAAAYYVGYLQPRTFLLKYNENGTITDAVDCALDPLSETKCTLKSFTVEKGIYQTSNFRVQPTESIVRFPNITNLCPFGEVFNATRFASVYAWNRKRISNCVADYSVLYNSASFSTFKCYGVSPTKLNDLCFTNVYADSFVIRGDEVRQIAPGQTGKIADYNYKLPDDFTGCVIAWNSNNLDSKVGGNYNYLYRLFRKSNLKPFERDISTEIYQAGSTPCNGVEGFNCYFPLQSYGFQPTNGVGYQPYRVVVLSFELLHAPATVCGPKKSTNLVKNKCVNFNFNGLTGTGVLTESNKKFLPFQQFGRDIADTTDAVRDPQTLEILDITPCSFGGVSVITPGTNTSNQVAVLYQDVNCTEVPVAIHADQLTPTWRVYSTGSNVFQTRAGCLIGAEHVNNSYECDIPIGAGICASYQTQTNSPRRARSVASQSIIAYTMSLGAENSVAYSNNSIAIPTNFTISVTTEILPVSMTKTSVDCTMYICGDSTECSNLLLQYGSFCTQLNRALTGIAVEQDKNTQEVFAQVKQIYKTPPIKDFGGFNFSQILPDPSKPSKRSFIEDLLFNKVTLADAGFIKQYGDCLGDISARDLICAQKFNGLTVLPPLLTDEMIAQYTSALLAGTITSGWTFGAGAALQIPFAMQMAYRFNGIGVTQNVLYENQKLIANQFNSAIGKIQDSLSSTASALGKLQDVVNQNAQALNTLVKQLSSNFGAISSVLNDILSRLDPPEAEVQIDRLITGRLQSLQTYVTQQLIRAAEIRASANLAATKMSECVLGQSKRVDFCGKGYQLMSFPQSAPHGVVFLNVTYVPAQEKNFTTAPAICNDGKAHFPREGVFVSNGTNWFVTQRNFYEPQIITTDNTFVSGNCDVVIGIVNNTVYDPLQPELDSGGSGYIPEAPRDGQAYVRKDGEWVLLSTFL

SEQ ID NO: 9971 - protein, 1177 aa, Artificial Sequence
  SARS-CoV-2/USA/NY-NYUMC7/2020__EPI_ISL_418192 spike protein (1-1147)(K986P_V987P_ H1048Q_H1064N_ H1083N_H1101N) Foldon construct
MFVFLVLLPLVSSQCVNLTTRTQLPPAYTNSFTRGVYYPDKVFRSSVLHSTQDLFLPFFSNVTWFHAIHVSGTNGTKRFDNPVLPFNDGVYFASTEKSNIIRGWIFGTTLDSKTQSLLIVNNATNVVIKVCEFQFCNDPFLGVYHHKNNKSWMESEFRVYSSANNCTFEYVSQPFLMDLEGKQGNFKNLREFVFKNIDGYFKIYSKHTPINLVRDLPQGFSALEPLVDLPIGINITRFQTLLALHRSYLTPGDSSSGWTAGAAAYYVGYLQPRTFLLKYNENGTITDAVDCALDPLSETKCTLKSFTVEKGIYQTSNFRVQPTESIVRFPNITNLCPFGEVFNATRFASVYAWNRKRISNCVADYSVLYNSASFSTFKCYGVSPTKLNDLCFTNVYADSFVIRGDEVRQIAPGQTGKIADYNYKLPDDFTGCVIAWNSNNLDSKVGGNYNYLYRLFRKSNLKPFERDISTEIYQAGSTPCNGVEGFNCYFPLQSYGFQPTNGVGYQPYRVVVLSFELLHAPATVCGPKKSTNLVKNKCVNFNFNGLTGTGVLTESNKKFLPFQQFGRDIADTTDAVRDPQTLEILDITPCSFGGVSVITPGTNTSNQVAVLYQGVNCTEVPVAIHADQLTPTWRVYSTGSNVFQTRAGCLIGAEHVNNSYECDIPIGAGICASYQTQTNSPRRARSVASQSIIAYTMSLGAENSVAYSNNSIAIPTNFTISVTTEILPVSMTKTSVDCTMYICGDSTECSNLLLQYGSFCTQLNRALTGIAVEQDKNTQEVFAQVKQIYKTPPIKDFGGFNFSQILPDPSKPSKRSFIEDLLFNKVTLADAGFIKQYGDCLGDIAARDLICAQKFNGLTVLPPLLTDEMIAQYTSALLAGTITSGWTFGAGAALQIPFAMQMAYRFNGIGVTQNVLYENQKLIANQFNSAIGKIQDSLSSTASALGKLQDVVNQNAQALNTLVKQLSSNFGAISSVLNDILSRLDPPEAEVQIDRLITGRLQSLQTYVTQQLIRAAEIRASANLAATKMSECVLGQSKRVDFCGKGYQLMSFPQSAPHGVVFLNVTYVPAQEKNFTTAPAICNDGKAHFPREGVFVSNGTNWFVTQRNFYEPQIITTDNTFVSGNCDVVIGIVNNTVYDPLQPELDSGGSGYIPEAPRDGQAYVRKDGEWVLLSTFL

SEQ ID NO: 9972 - protein, 1177 aa, Artificial Sequence
  SARS-CoV-2/Iceland/189/2020__EPI_ISL_417709 spike protein (1-1147)(K986P_V987P_ H1048Q_H1064N_ H1083N_H1101N) Foldon construct
MFVFLVLLPLVSSQCVNLTTRTQLPPAYTNSFTRGVYYPDKVFRSSVLHSTQDLFLPFFSNVTWFHAIHVSGTNGTKRFDNPVLPFNDGVYFASTEKSNIIRGWIFGTTLDSKTQSLLIVNNATNVVIKVCEFQFCNDPFLGVYYHKNNKSWMESEFRVYSSANNCTFEYVSQPFLMDLEGKQGNFKNLREFVFKNIDGYFKIYSKHTPINLVRDLPQGFSALEPLVDLPIGINITRFQTLLALHRSYLTPGDSSSGWTAGAAAYYVGYLQPRTFLLKYNENGTITDAVDCALDPLSETKCTLKSFTVEKGIYQTSNFRVQPTESIVRFPNITNLCPFGEVFNATRFASVYAWNRKRISNCVADYSVLYNSASFSTFKCYGVSPTKLNDLCFTNVYADSFVIRGDEVRQIAPGQTGKIADYNYKLPDDFTGCVIAWNSNNLDSKVGGNYNYLYRLFRKSNLKPFERDISTEIYQAGSTPCNGVEGFNCYFPLQSYGFQPTNGVGYQPYRVVVLSFELLHAPATVCGPKKSTNLVKNKCVNFNFNGLTGTGVLTESNKKFLPFQQFGRDIADTTDAVRDPQTLEILDITPCSFGGVSVITPGTNTSNQVAVLYQGVNCTEVPVAIHADQLTPTWRVYSTGSNVFQTRAGCLIGAEHVNNSYECDIPIGAGICASYQTQTNSPRRARSVASQSIIAYTMSLGAENSVAYSNNSIAIPTNFTISVTTEILPVSMTKTSVDCTMYICGDSTECSNLLLQYGSFCTQLNRALTGIAVEQDKNTQEVFAQVKQIYKTPPIKDFGGFNFSQILPDPSKPSKRSFIEDLLFNKVTLADAGFTKQYGDCLGDIAARDLICAQKFNGLTVLPPLLTDEMIAQYTSALLAGTITSGWTFGAGAALQIPFAMQMAYRFNGIGVTQNVLYENQKLIANQFNSAIGKIQDSLSSTASALGKLQDVVNQNAQALNTLVKQLSSNFGAISSVLNDILSRLDPPEAEVQIDRLITGRLQSLQTYVTQQLIRAAEIRASANLAATKMSECVLGQSKRVDFCGKGYQLMSFPQSAPHGVVFLNVTYVPAQEKNFTTAPAICNDGKAHFPREGVFVSNGTNWFVTQRNFYEPQIITTDNTFVSGNCDVVIGIVNNTVYDPLQPELDSGGSGYIPEAPRDGQAYVRKDGEWVLLSTFL

SEQ ID NO: 9973 - protein, 1177 aa, Artificial Sequence
  SARS-CoV-2/Australia/NSW56/2020__EPI_ISL_417408 spike protein (1-1147)(K986P_V987P_ H1048Q_H1064N_ H1083N_H1101N) Foldon construct
MFVFLVLLPLVSSQCVNLTTRTQLPPAYTNSFTRGVYYPDKVFRSSVLHSTQDLFLPFFSNVTWFHAIHVSGTNGTKRFDNPVLPFNDGVYFASTEKSNIIRGWIFGTTLDSKTQSLLIVNNATNVVIKVCEFQFCNDPFLGVYYHKNNKSWMESEFRVYSSANNCTFEYVSQPFLMDLEGKQGNFKNLREFVFKNIDGYFKIYSKHTPINLVRDLPQGFSALEPLVDLPIGINITRFQTLLALHRSYLTPGDSSSGWTAGAAAYYVGYLQPRTFLLKYNENGTITDAVDCALDPLSETKCTLKSFTVEKGIYQTSNFRVQPTESIVRFPNITNLCPFGEVFNATRFASVYAWNRKRISNCVADYSVLYNSASFSTFKCYGVSPTKLNDLCFTNVYADSFVIRGDEVRQIAPGQTGKIADYNYKLPDDFTGCVIAWNSNNLDSKVGGNYNYLYRLFRKSNLKPFERDISTEIYQAGSTPCNGVEGFNCYFPLQSYGFQPTNGVGYQPYRVVVLSFELLHAPATVCGPKKSTNLVKNKCVNFNFNGLTGTGVLTESNKKFLPFQQFGRDIADTTDAVRDPQTLEILDITPCSFGGVSVITPGTNTSNQVAVLYQDVNCTEVPVAIHADQLTPTWRVYSTGSNVFQTRAGCLIGAEHVNNSYECDIPIGAGICASYQTQTNSPRRARSVASQSIIAYTMSLGAENSVAYSNNSIAIPTNFTISVTTEILPVSMTKTSVDCTMYICGDSTECSNLLLQYGSFCTQLNRALTGIAVEQDKNTQEVFAQVKQIYKTPPIKDFGGFNFSQILPDSSKPSKRSFIEDLLFNKVTLADAGFIKQYGDCLGDIAARDLICAQKFNGLTVLPPLLTDEMIAQYTSALLAGTITSGWTFGAGAALQIPFAMQMAYRFNGIGVTQNVLYENQKLIANQFNSAIGKIQDSLSSTASALGKLQDVVNQNAQALNTLVKQLSSNFGAISSVLNDILSRLDPPEAEVQIDRLITGRLQSLQTYVTQQLIRAAEIRASANLAATKMSECVLGQSKRVDFCGKGYQLMSFPQSAPHGVVFLNVTYVPAQEKNFTTAPAICNDGKAHFPREGVFVSNGTNWFVTQRNFYEPQIITTDNTFVSGNCDVVIGIVNNTVYDPLQPELDSGGSGYIPEAPRDGQAYVRKDGEWVLLSTFL

SEQ ID NO: 9974 - protein, 1177 aa, Artificial Sequence
  SARS-CoV-2/Iceland/280/2020__EPI_ISL_417608 spike protein (1-1147)(K986P_V987P_ H1048Q_H1064N_ H1083N_H1101N) Foldon construct
MFVFLVLLPLVSSQCVNLTTRTQLPPAYTNSFTRGVYYPDKVFRSSVLHSTQDLFLPFFSNVTWFHAIHVSGTNGTKRFDNPVLPFNDGVYFASTEKSNIIRGWIFGTTLDSKTQSLLIVNNATNVVIKVCEFQFCNDPFLGVYYHKNNKSWMESEFRVYSSANNCTFEYVSQPFLMDLEGKQGNFKNLREFVFKNIDGYFKIYSKHTPINLVRDLPQGFSALEPLVDLPIGINITRFQTLLALHRSYLTPGDSSSGWTAGAAAYYVGYLQPRTFLLKYNENGTITDAVDCALDPLSETKCTLKSFTVEKGIYQTSNFRVQPTESIVRFPNITNLCPFGEVFNATRFASVYAWNRKRISNCVADYSVLYNSASFSTFKCYGVSPTKLNDLCFTNVYADSFVIRGDEVRQIAPGQTGKIADYNYKLPDDFTGCVIAWNSNNLDSKVGGNYNYLYRLFRKSNLKPFERDISTEIYQAGSTPCNGVEGFNCYFPLQSYGFQPTNGVGYQPYRVVVLSFELLHAPATVCGPKKSTNLVKNKCVNFNFNGLTGTGVLTESNKKFLPFQQFGRDIADTTDAVRDPQTLEILDITPCSFGGVSVITPGTNTSNQVAVLYQGVNCTEVPVAIHADQLTPTWRVYSTGSNVFQTRAGCLIGAEHVNNSYECDIPIGAGICASYHTQTNSPRRARSVASQSIIAYTMSLGAENSVAYSNNSIAIPTNFTISVTTEILPVSMTKTSVDCTMYICGDSTECSNLLLQYGSFCTQLNRALTGIAVEQDKNTQEVFAQVKQIYKTPPIKDFGGFNFSQILPDPSKPSKRSFIEDLLFNKVTLADAGFIKQYGDCLGDIAARDLICAQKFNGLTVLPPLLTDEMIAQYTSALLAGTITSGWTFGAGAALQIPFAMQMAYRFNGIGVTQNVLYENQKLIANQFNSAIGKIQDSLSSTASALGKLQDVVNQNAQALNTLVKQLSSNFGAISSVLNDILSRLDPPEAEVQIDRLITGRLQSLQTYVTQQLIRAAEIRASANLAATKMSECVLGQSKRVDFCGKGYQLMSFPQSAPHGVVFLNVTYVPAQEKNFTTAPAICNDGKAHFPREGVFVSNGTNWFVTQRNFYEPQIITTDNTFVSGNCDVVIGIVNNTVYDPLQPELDSGGSGYIPEAPRDGQAYVRKDGEWVLLSTFL

SEQ ID NO: 9975 - protein, 1177 aa, Artificial Sequence; identical to SEQ ID NO: 9930
  SARS-CoV-2/Iceland/247/2020__EPI_ISL_417575 spike protein (1-1147)(K986P_V987P_ H1048Q_H1064N_ H1083N_H1101N) Foldon construct

SEQ ID NO: 9976 - protein, 1177 aa, Artificial Sequence
  SARS-CoV-2/Iceland/238/2020__EPI_ISL_417566 spike protein (1-1147)(K986P_V987P_ H1048Q_H1064N_ H1083N_H1101N) Foldon construct
MFVFLVLLPLVSSQCVNLTTRTQLPPAYTNSFTRGVYYPDKVFRSSVLHSTQDLFLPFFSNVTWFHAIHVSGTNGTKRFDNPVLPFNDGVYFASTEKSNIIRGWIFGTTLDSKTQSLLIVNNATNVVIKVCEFQFCNDPFLGVYYHKNNKSWMESEFRVYSSANNCTFEYVSQPFLMDLEGKQGNFKNLREFVFKNIDGYFKIYSKHTPINLVRDLPQGFSALEPLVDLPIGINITRFQTLLALHRSYLTPGDSSSGWTAGAAAYYVGYLQPRTFLLKYNENGTITDAVDCALDPLSETKCTLKSFTVEKGIYQTSNFRVQPTESIVRFPNITNLCPFGEVFNATRFASVYAWNRKRISNCVADYSVLYNSASFSTFKCYGVSPTKLNDLCFTNVYADSFVIRGDEVRQIAPGQTGKIADYNYKLPDDFTGCVIAWNSNNLDSKVGGNYNYLYRLFRKSNLKPFERDISTEIYQAGSTPCNGVEGFNCYFPLQSYGFQPTNGVGYQPYRVVVLSFELLHAPATVCGPKKSTNLVKNKCVNFNFNGLTGTGVLTESNKKFLPFQQFGRDIADTTDAVRDPQTLEILDITPCSFGGVSVITPGTNTSNQVAVLYQGVNCTEVPVAIHADQLTPTWRVYSTGSNVFQTRAGCLIGAEHVNNSYECDIPIGAGICASYQTQTNSPRRARSVASQSIIAYTMSLGAENSVAYSNNSIAIPTNFTISVTTEILPVSMTKTSVDCTMYICGDSTECSNLLLQYGSFCTQLNRALTGIAVEQDKNTQEVFAQVKQIYKTPPIKDFGGFNFSQILPDPSKPSKRSFIEDLLFNKVTLADVGFIKQYGDCLGDIAARDLICAQKFNGLTVLPPLLTDEMIAQYTSALLAGTITSGWTFGAGAALQIPFAMQMAYRFNGIGVTQNVLYENQKLIANQFNSAIGKIQDSLSSTASALGKLQDVVNQNAQALNTLVKQLSSNFGAISSVLNDILSRLDPPEAEVQIDRLITGRLQSLQTYVTQQLIRAAEIRASANLAATKMSECVLGQSKRVDFCGKGYQLMSFPQSAPHGVVFLNVTYVPAQEKNFTTAPAICNDGKAHFPREGVFVSNGTNWFVTQRNFYEPQIITTDNTFVSGNCDVVIGIVNNTVYDPLQPELDSGGSGYIPEAPRDGQAYVRKDGEWVLLSTFL

SEQ ID NO: 9977 - protein, 1177 aa, Artificial Sequence
  SARS-CoV-2/Greece/16/2020__EPI_ISL_418265 spike protein (1-1147)(K986P_V987P_ H1048Q_H1064N_ H1083N_H1101N) Foldon construct
MFVFLVLLPLVSSQCVNLTTRTQLPPAYTNSFTRGVYYPDKVFRSSVLHSTQDLFLPFFSNVTWFHAIHVSGTNGTKRFDNPVLPFNDGVYFASTEKSNIIRGWIFGTTLDSKTQSLLIVNNATNVVIKVCEFQFCNDPFLGVYYHKNNKSWMESEFRVYSSANNCTFEYVSQPFLMDLEGKQGNFKNLREFVFKNVDGYFKIYSKHTPINLVRDLPQGFSALEPLVDLPIGINITRFQTLLALHRSYLTPGDSSSGWTAGAAAYYVGYLQPRTFLLKYNENGTITDAVDCALDPLSETKCTLKSFTVEKGIYQTSNFRVQPTESIVRFPNITNLCPFGEVFNATRFASVYAWNRKRISNCVADYSVLYNSASFSTFKCYGVSPTKLNDLCFTNVYADSFVIRGDEVRQIAPGQTGKIADYNYKLPDDFTGCVIAWNSNNLDSKVGGNYNYLYRLFRKSNLKPFERDISTEIYQAGSTPCNGVEGFNCYFPLQSYGFQPTNGVGYQPYRVVVLSFELLHAPATVCGPKKSTNLVKNKCVNFNFNGLTGTGVLTESNKKFLPFQQFGRDIADTTDAVRDPQTLEILDITPCSFGGVSVITPGTNTSNQVAVLYQDVNCTEVPVAIHADQLTPTWRVYSTGSNVFQTRAGCLIGAEHVNNSYECDIPIGAGICASYQTQTNSPRRARSVASQSIIAYTMSLGAENSVAYSNNSIAIPTNFTISVTTEILPVSMTKTSVDCTMYICGDSTECSNLLLQYGSFCTQLNRALTGIAVEQDKNTQEVFAQVKQIYKTPPIKDFGGFNFSQILPDPSKPSKRSFIEDLLFNKVTLADAGFIKQYGDCLGDIAARDLICAQKFNGLTVLPPLLTDEMIAQYTSALLAGTITSGWTFGAGAALQIPFAMQMAYRFNGIGVTQNVLYENQKLIANQFNSAIGKIQDSLSSTASALGKLQDVVNQNAQALNTLVKQLSSNFGAISSVLNDILSRLDPPEAEVQIDRLITGRLQSLQTYVTQQLIRAAEIRASANLAATKMSECVLGQSKRVDFCGKGYQLMSFPQSAPHGVVFLNVTYVPAQEKNFTTAPAICNDGKAHFPREGVFVSNGTNWFVTQRNFYEPQIITTDNTFVSGNCDVVIGIVNNTVYDPLQPELDSGGSGYIPEAPRDGQAYVRKDGEWVLLSTFL

SEQ ID NO: 9978 - protein, 1177 aa, Artificial Sequence
  SARS-CoV-2/Iceland/319/2020__EPI_ISL_417648 spike protein (1-1147)(K986P_V987P_ H1048Q_H1064N_ H1083N_H1101N) Foldon construct
MFVFLVLLPLVSSQCVNLTTRTQLPPAYTNSFTRGVYYPDKVFRSSVLHSTQDLFLPFFSNVTWFHAIHVSGTNGTKRFDNPVLPFNDGVYFASTEKSNIIRGWIFGTTLDSKTQSLLIVNNATNVVIKVCEFQFCNDPFLGVYYHKNNKSWMESEFRVYSSANNCTFEYVSQPFLIDLEGKQGNFKNLREFVFKNIDGYFKIYSKHTPINLVRDLPQGFSALEPLVDLPIGINITRFQTLLALHRSYLTPGDSSSGWTAGAAAYYVGYLQPRTFLLKYNENGTITDAVDCALDPLSETKCTLKSFTVEKGIYQTSNFRVQPTESIVRFPNITNLCPFGEVFNATRFASVYAWNRKRISNCVADYSVLYNSASFSTFKCYGVSPTKLNDLCFTNVYADSFVIRGDEVRQIAPGQTGKIADYNYKLPDDFTGCVIAWNSNNLDSKVGGNYNYLYRLFRKSNLKPFERDISTEIYQAGSTPCNGVEGFNCYFPLQSYGFQPTNGVGYQPYRVVVLSFELLHAPATVCGPKKSTNLVKNKCVNFNFNGLTGTGVLTESNKKFLPFQQFGRDIADTTDAVRDPQTLEILDITPCSFGGVSVITPGTNTSNQVAVLYQGVNCTEVPVAIHADQLTPTWRVYSTGSNVFQTRAGCLIGAEHVNNSYECDIPIGAGICASYQTQTNSPRRARSVASQSIIAYTMSLGAENSVAYSNNSIAIPTNFTISVTTEILPVSMTKTSVDCTMYICGDSTECSNLLLQYGSFCTQLNRALTGIAVEQDKNTQEVFAQVKQIYKTPPIKDFGGFNFSQILPDPSKPSKRSFIEDLLFNKVTLADAGFIKQYGDCLGDIAARDLICAQKFNGLTVLPPLLTDEMIAQYTSALLAGTITSGWTFGAGAALQIPFAMQMAYRFNGIGVTQNVLYENQKLIANQFNSAIGKIQDSLSSTASALGKLQDVVNQNAQALNTLVKQLSSNFGAISSVLNDILSRLDPPEAEVQIDRLITGRLQSLQTYVTQQLIRAAEIRASANLAATKMSECVLGQSKRVDFCGKGYQLMSFPQSAPHGVVFLNVTYVPAQEKNFTTAPAICNDGKAHFPREGVFVSNGTNWFVTQRNFYEPQIITTDNTFVSGNCDVVIGIVNNTVYDPLQPELDSGGSGYIPEAPRDGQAYVRKDGEWVLLSTFL

SEQ ID NO: 9979 - protein, 1177 aa, Artificial Sequence
  SARS-CoV-2/Congo/94/2020__EPI_ISL_417947 spike protein (1-1147)(K986P_V987P_ H1048Q_H1064N_ H1083N_H1101N) Foldon construct
MFVFLVLLPLVSSQCVNLTTRTQLPPAYTNSFTRGVYYPDKVFRSSVLHSTQDLFLPFFSNVTWFHAIHVSGTNGTKRFDNPVLPFNDGVYFASTEKSNIIRGWIFGTTLDSKTQSLLIVNNATNVVIKVCEFQFCNDPFLGVYYHKNNKSWMESEFRVYSSANNCTFEYVSQPFLMDLEGKQGNFKNLREFVFKNIDGYFKIYSKHTPINLVRDLPQGFSALEPLVDLPIGINITRFQTLLALHRSYLTPGDSSSGWTAGAAAYYVGYLQPRTFLLKYNENGTITDAVDCALDPLSETKCTLKSFTVEKGIYQTSNFRVQPTESIVRFPNITNLCPFGEVFNATRFASVYAWNRKRISNCVADYSVLYNSASFSTFKCYGVSPTKLNDLCFTNVYADSFVIRGDEVRQIAPGQTGKIADYNYKLPDDFTGCVIAWNSNNLDSKVGGNYNYLYRLFRKSNLKPFERDISTEIYQAGSTPCNGVEGFNCYFPLQSYGFQPTNGVGYQPYRVVVLSFELLHAPATVCGPKKSTNLVKNKCVNFNFNGLTGTGVLTESNKKFLPFQQFGRDIADTTDAVRDPQTLEILDITPCSFGGVSVITPGTNTSNQVAVLYQGVNCTEVPVAIHADQLTPTWRVYSTGSNVFQTRAGCLIGAEHVNNSYECDIPIGAGICASYQTQTNSPRRARSVASQSIIAYTMSLGAENSVAYSNNSIAIPTNFTISVTTEILPVSMTKTSVDCTMYICGDSTECSNLLLQYGSFCTQLNRALTGIAVEQDKNTQEVFAQVKQIYKTPPIKDFGGFNFSQILPDPSKPSKRSFIEDILFNKVTLADAGFIKQYGDCLGDIAARDLICAQKFNGLTVLPPLLTDEMIAQYTSALLAGTITSGWTFGAGAALQIPFAMQMAYRFNGIGVTQNVLYENQKLIANQFNSAIGKIQDSLSSTASALGKLQDVVNQNAQALNTLVKQLSSNFGAISSVLNDILSRLDPPEAEVQIDRLITGRLQSLQTYVTQQLIRAAEIRASANLAATKMSECVLGQSKRVDFCGKGYQLMSFPQSAPHGVVFLNVTYVPAQEKNFTTAPAICNDGKAHFPREGVFVSNGTNWFVTQRNFYEPQIITTDNTFVSGNCDVVIGIVNNTVYDPLQPELDSGGSGYIPEAPRDGQAYVRKDGEWVLLSTFL

SEQ ID NO: 9980 - protein, 1177 aa, Artificial Sequence
  SARS-CoV-2/Congo/158/2020__EPI_ISL_417950 spike protein (1-1147)(K986P_V987P_ H1048Q_H1064N_ H1083N_H1101N) Foldon construct
MFVFLVLLPLVSSQCVNLTTRTQLPPAYTNSFTRGVYYPDKVFRSSVLHSTQDLFLPFFSNVTWFHAIHVSGTNGTKRFDNPVLPFNDGVYFASTEKSNIIRGWIFGTTLDSKTQSLLIVNNATNVVIKVCEFQFCNDPFLGVYYHKNNKSWMESEFRVYSSANNCTFEYVSQPFLMDLEGKQGNFKNLREFVFKNIDGYFKIYSKHTPINLVRDLPQGFSALEPLVDLPIGINITRFQTLLALHRSYLTPGDSSSGWTAGAAAYYVGYLQPRTFLLKYNENGTITDAVDCALDPLSETKCTLKSFTVEKGIYQTSNFRVQPTESIVRFPNITNLCPFGEVFNATRFASVYAWNRKRISNCVADYSVLYNSASFSTFKCYGVSPTKLNDLCFTNVYADSFVIRGDEVRQIAPGQTGKIADYNYKLPDDFTGCVIAWNSNNLDSKVGGNYNYLYRLFRKSNLKPFERDISTEIYQAGSTPCNGVEGFNCYFPLQSYGFQPTNGVGYQPYRVVVLSFELLHAPATVCGPKKSTNLVKNKCVNFNFNGLTGTGVLTESNKKFLPFQQFGRDIADTTDAVRDPQTLEILDITPCSFGGVSVITPGTNTSNQVAVLYQDVNCTEVPVAIHADQLTPTWRVYSTGSNVFQTRAGCLIGAEHVNNSYECDIPIGAGICASYQTQTNSPRRARSVASQSIIAYTMSLGAENSVAYSNNSIAIPTNFTISVTTEILPVSMTKTSVDCTMYICGDSTECSNLLLQYGSFCTQLNRALTGIAVEQDKNTQEVFAQVKQIYKTPPIKDFGGFNFSQILPDPSKPSKRSFIEDLLFNKVTLADAGFIKQYGDCLGDIAARDLICAQKFNGLTVLPPLLTDEMIAQYTSALLAGTITSGWTFGAGAALQIPFAMQMAYRFNGIGVTQNVLYENQKLIANQFNSAIGKIQDSLSSTASALGKLQDVVNQNAQALNTLVKQLSSNFGAISSVLNDILSRLDPPEAEVQIDRLITGRLQSLQTYVTQQLIRAAEIRASANLAATKMSECVLGQSKRVDFCGKGYQLMSFPQSAPHGVVFLNVTYVPAQEKNFTTAPAICNDGKAHFPREGVFVSNGTNWFVTQRNFYEPQIITTDNTFLSGNCDVVIGIVNNTVYDPLQPELDSGGSGYIPEAPRDGQAYVRKDGEWVLLSTFL

SEQ ID NO: 9981 - protein, 1177 aa, Artificial Sequence
  SARS-CoV-2/USA/UT-00034/2020__EPI_ISL_417977 spike protein (1-1147)(K986P_V987P_ H1048Q_H1064N_ H1083N_H1101N) Foldon construct
MFVFLVLLPLVSSQCVNLTTRTQLPPAYTNSFTRGVYYPDKVFRSSVLHSTQDLFLPFFSNVTWFHAIHVSGTNGTKRFDNPVLPFNDGVYFASTEKSNIIRGWIFGTTLDSKTQSLLIVNNATNVVIKVCEFQFCNDPFLGVYYYKNNKSWMESEFRVYSSANNCTFEYVSQPFLMDLEGKQGNFKNLREFVFKNIDGYFKIYSKHTPINLVRDLPQGFSALEPLVDLPIGINITRFQTLLALHRSYLTPGDSSSGWTAGAAAYYVGYLQPRTFLLKYNENGTITDAVDCALDPLSETKCTLKSFTVEKGIYQTSNFRVQPTESIVRFPNITNLCPFGEVFNATRFASVYAWNRKRISNCVADYSVLYNSASFSTFKCYGVSPTKLNDLCFTNVYADSFVIRGDEVRQIAPGQTGKIADYNYKLPDDFTGCVIAWNSNNLDSKVGGNYNYLYRLFRKSNLKPFERDISTEIYQAGSTPCNGVEGFNCYFPLQSYGFQPTNGVGYQPYRVVVLSFELLHAPATVCGPKKSTNLVKNKCVNFNFNGLTGTGVLTESNKKFLPFQQFGRDIADTTDAVRDPQTLEILDITPCSFGGVSVITPGTNTSNQVAVLYQGVNCTEVPVAIHADQLTPTWRVYSTGSNVFQTRAGCLIGAEHVNNSYECDIPIGAGICASYQTQTNSPRRARSVASQSIIAYTMSLGAENSVAYSNNSIAIPTNFTISVTTEILPVSMTKTSVDCTMYICGDSTECSNLLLQYGSFCTQLNRALTGIAVEQDKNTQEVFAQVKQIYKTPPIKDFGGFNFSQILPDPSKPSKRSFIEDLLFNKVTLADAGFIKQYGDCLGDIAARDLICAQKFNGLTVLPPLLTDEMIAQYTSALLAGTITSGWTFGAGAALQIPFAMQMAYRFNGIGVTQNVLYENQKLIANQFNSAIGKIQDSLSSTASALGKLQDVVNQNAQALNTLVKQLSSNFGAISSVLNDILSRLDPPEAEVQIDRLITGRLQSLQTYVTQQLIRAAEIRASANLAATKMSECVLGQSKRVDFCGKGYQLMSFPQSAPHGVVFLNVTYVPAQEKNFTTAPAICNDGKAHFPREGVFVSNGTNWFVTQRNFYEPQIITTDNTFVSGNCDVVIGIVNNTVYDPLQPELDSGGSGYIPEAPRDGQAYVRKDGEWVLLSTFL

SEQ ID NO: 9982 - protein, 1177 aa, Artificial Sequence
  SARS-CoV-2/USA/UT-00033/2020__EPI_ISL_417976 spike protein (1-1147)(K986P_V987P_ H1048Q_H1064N_ H1083N_H1101N) Foldon construct
MFVFLVLLPLVSSQCVNLTTRTQLPPAYTNSFTRGVYYPDKVFRSSVLHSTQDLFLPFFSNVTWFHAIHVSGTNGTKRFDNPVLPFNDGVYFASTEKSNIIRGWIFGTTLDSKTQSLLIVNNATNVVIKVCEFQFCNDPFLGVYYHKNNKSWMESEFRVYSSANNCTFEYVSQPFLMDLEGKQGNFKNLREFVFKNIDGYFKIYSKHTPINLVRDLPQGFSALEPLVDLPIGINITRFQTLLALHRSYLTPGDSSSGLTAGAAAYYVGYLQPRTFLLKYNENGTITDAVDCALDPLSETKCTLKSFTVEKGIYQTSNFRVQPTESIVRFPNITNLCPFGEVFNATRFASVYAWNRKRISNCVADYSVLYNSASFSTFKCYGVSPTKLNDLCFTNVYADSFVIRGDEVRQIAPGQTGKIADYNYKLPDDFTGCVIAWNSNNLDSKVGGNYNYLYRLFRKSNLKPFERDISTEIYQAGSTPCNGVEGFNCYFPLQSYGFQPTNGVGYQPYRVVVLSFELLHAPATVCGPKKSTNLVKNKCVNFNFNGLTGTGVLTESNKKFLPFQQFGRDIADTTDAVRDPQTLEILDITPCSFGGVSVITPGTNTSNQVAVLYQGVNCTEVPVAIHADQLTPTWRVYSTGSNVFQTRAGCLIGAEHVNNSYECDIPIGAGICASYQTQTNSPRRARSVASQSIIAYTMSLGAENSVAYSNNSIAIPTNFTISVTTEILPVSMTKTSVDCTMYICGDSTECSNLLLQYGSFCTQLNRALTGIAVEQDKNTQEVFAQVKQIYKTPPIKDFGGFNFSQILPDPSKPSKRSFIEDLLFNKVTLADAGFIKQYGDCLGDIAARDLICAQKFNGLTVLPPLLTDEMIAQYTSALLAGTITSGWTFGAGAALQIPFAMQMAYRFNGIGVTQNVLYENQKLIANQFNSAIGKIQDSLSSTASALGKLQDVVNQNAQALNTLVKQLSSNFGAISSVLNDILSRLDPPEAEVQIDRLITGRLQSLQTYVTQQLIRAAEIRASANLAATKMSECVLGQSKRVDFCGKGYQLMSFPQSAPHGVVFLNVTYVPAQEKNFTTAPAICNDGKAHFPREGVFVSNGTNWFVTQRNFYEPQIITTDNTFVSGNCDVVIGIVNNTVYDPLQPELDSGGSGYIPEAPRDGQAYVRKDGEWVLLSTFL

SEQ ID NO: 9983 - protein, 1177 aa, Artificial Sequence
  SARS-CoV-2/USA/WI-13/2020__EPI_ISL_417516 spike protein (1-1147)(K986P_V987P_ H1048Q_H1064N_ H1083N_H1101N) Foldon construct
MFVFLVLLPLVSSQCVNLTTRTQLPPAYTNSFTRGVYYPDKVFRSSVLHSTQDLFLPFFSNVTWFHAIHVSGTNGTKRFDNPVLPFNDGVYFASTEKSNIIRGWIFGTTLDSKTQSLLIVNNATNVVIKVCEFQFCNDPFLGVYYHKNNKSWMESEFRVYSSANNCTFEYVSQPFLMDLEGKQGNFKNLREFVFKNIDGYFKIYSKHTPINLVRDLPQGFSALEPLVDLPIGINITRFQTLLALHRSYLTPGDSSSGWTAGAAAYYVGYLQPRTFLLKYNENGTITDAVDCALDPLSETKCTLKSFTVEKGIYQTSNFRVLPTESIVRFPNITNLCPFGEVFNATRFASVYAWNRKRISNCVADYSVLYNSASFSTFKCYGVSPTKLNDLCFTNVYADSFVIRGDEVRQIAPGQTGKIADYNYKLPDDFTGCVIAWNSNNLDSKVGGNYNYLYRLFRKSNLKPFERDISTEIYQAGSTPCNGVEGFNCYFPLQSYGFQPTNGVGYQPYRVVVLSFELLHAPATVCGPKKSTNLVKNKCVNFNFNGLTGTGVLTESNKKFLPFQQFGRDIADTTDAVRDPQTLEILDITPCSFGGVSVITPGTNTSNQVAVLYQGVNCTEVPVAIHADQLTPTWRVYSTGSNVFQTRAGCLIGAEHVNNSYECDIPIGAGICASYQTQTNSPRRARSVASQSIIAYTMSLGAENSVAYSNNSIAIPTNFTISVTTEILPVSMTKTSVDCTMYICGDSTECSNLLLQYGSFCTQLNRALTGIAVEQDKNTQEVFAQVKQIYKTPPIKDFGGFNFSQILPDPSKPSKRSFIEDLLFNKVTLADAGFIKQYGDCLGDIAARDLICAQKFNGLTVLPPLLTDEMIAQYTSALLAGTITSGWTFGAGAALQIPFAMQMAYRFNGIGVTQNVLYENQKLIANQFNSAIGKIQDSLSSTASALGKLQDVVNQNAQALNTLVKQLSSNFGAISSVLNDILSRLDPPEAEVQIDRLITGRLQSLQTYVTQQLIRAAEIRASANLAATKMSECVLGQSKRVDFCGKGYQLMSFPQSAPHGVVFLNVTYVPAQEKNFTTAPAICNDGKAHFPREGVFVSNGTNWFVTQRNFYEPQIITTDNTFVSGNCDVVIGIVNNTVYDPLQPELDSGGSGYIPEAPRDGQAYVRKDGEWVLLSTFL

SEQ ID NO: 9984 - protein, 1176 aa, Artificial Sequence
  SARS-CoV-2/India/1-27/2020__EPI_ISL_413522 spike protein (1-1146)(K985P_V986P_ H1047Q_H1063N_ H1082N_H1100N) Foldon construct
MFVFLVLLPLVSSQCVNLTTRTQLPPAYTNSFTRGVYYPDKVFRSSVLHSTQDLFLPFFSNVTWFHAIHVSGTNGTKRFDNPVLPFNDGVYFASTEKSNIIRGWIFGTTLDSKTQSLLIVNNATNVVIKVCEFQFCNDPFLGVYHKNNKSWMESEFRVYSSANNCTFEYVSQPFLMDLEGKQGNFKNLREFVFKNIDGYFKIYSKHTPINLVRDLPQGFSALEPLVDLPIGINITRFQTLLALHRSYLTPGDSSSGWTAGAAAYYVGYLQPRTFLLKYNENGTITDAVDCALDPLSETKCTLKSFTVEKGIYQTSNFRVQPTESIVRFPNITNLCPFGEVFNATRFASVYAWNRKRISNCVADYSVLYNSASFSTFKCYGVSPTKLNDLCFTNVYADSFVIRGDEVIQIAPGQTGKIADYNYKLPDDFTGCVIAWNSNNLDSKVGGNYNYLYRLFRKSNLKPFERDISTEIYQAGSTPCNGVEGFNCYFPLQSYGFQPTNGVGYQPYRVVVLSFELLHAPATVCGPKKSTNLVKNKCVNFNFNGLTGTGVLTESNKKFLPFQQFGRDIADTTDAVRDPQTLEILDITPCSFGGVSVITPGTNTSNQVAVLYQDVNCTEVPVAIHADQLTPTWRVYSTGSNVFQTRAGCLIGAEHVNNSYECDIPIGAGICASYQTQTNSPRRARSVASQSIIAYTMSLGAENSVAYSNNSIAIPTNFTISVTTEILPVSMTKTSVDCTMYICGDSTECSNLLLQYGSFCTQLNRALTGIAVEQDKNTQEVFAQVKQIYKTPPIKDFGGFNFSQILPDPSKPSKRSFIEDLLFNKVTLADAGFIKQYGDCLGDIAARDLICAQKFNGLTVLPPLLTDEMIAQYTSALLAGTITSGWTFGAGAALQIPFAMQMAYRFNGIGVTQNVLYENQKLIANQFNSAIGKIQDSLSSTASALGKLQDVVNQNAQALNTLVKQLSSNFGAISSVLNDILSRLDPPEAEVQIDRLITGRLQSLQTYVTQQLIRAAEIRASANLAATKMSECVLGQSKRVDFCGKGYQLMSFPQSAPHGVVFLNVTYVPAQEKNFTTAPAICNDGKAHFPREGVFVSNGTNWFVTQRNFYEPQIITTDNTFVSGNCDVVIGIVNNTVYDPLQPELDSGGSGYIPEAPRDGQAYVRKDGEWVLLSTFL

SEQ ID NO: 9985 - protein, 1171 aa, Artificial Sequence
  SARS-CoV-2/pangolin/Guangxi/P4L/2017__EPI_ISL_410538 spike protein (1-1141)(K980P_V981P_ H1042Q_H1058N_ H1077N_H1095N) Foldon construct
MFVFLFVLPLVSSQCVNLTTRTGIPPGYTNSSTRGVYYPDKVFRSSILHLTQDLFLPFFSNVTWFNTINYQGGFKKFDNPVLPFNDGVYFASTEKSNIIRGWIFGTTLDARTQSLLIVNNATNVVIKVCEFQFCTDPFLGVYYHNNNKTWVENEFRVYSSANNCTFEYISQPFLMDLEGKQGNFKNLREFVFKNVDGYFKIYSKHTPIDLVRDLPRGFAALEPLVDLPIGINITRFQTLLALHRSYLTPGNLESGWTTGAAAYYVGYLQQRTFLLSYNQNGTITDAVDCSLDPLSETKCTLKSLTVEKGIYQTSNFRVQPTISIVRFPNITNLCPFGEVFNASKFASVYAWNRKRISNCVADYSVLYNSTSFSTFKCYGVSPTKLNDLCFTNVYADSFVVKGDEVRQIAPGQTGVIADYNYKLPDDFTGCVIAWNSVKQDALTGGNYGYLYRLFRKSKLKPFERDISTEIYQAGSTPCNGQVGLNCYYPLERYGFHPTTGVNYQPFRVVVLSFELLNGPATVCGPKLSTTLVKDKCVNFNFNGLTGTGVLTTSKKQFLPFQQFGRDISDTTDAVRDPQTLEILDITPCSFGGVSVITPGTNTSNQVAVLYQDVNCTEVPMAIHAEQLTPAWRVYSAGANVFQTRAGCLVGAEHVNNSYECDIPVGAGICASYHSMSSLRSVNQRSIIAYTMSLGAENSVAYSNNSIAIPTNFTISVTTEILPVSMTKTSVDCTMYICGDSIECSNLLLQYGSFCTQLNRALTGIAVEQDKNTQEVFAQVKQIYKTPPIKDFGGFNFSQILPDPSKPSKRSFIEDLLFNKVTLADAGFIKQYGDCLGDIAARDLICAQKFNGLTVLPPLLTDEMIAQYTSALLAGTITSGWTFGAGAALQIPFAMQMAYRFNGIGVTQNVLYENQKLIANQFNSAIGKIQDSLSSTASALGKLQDVVNQNAQALNTLVKQLSSNFGAISSVLNDILSRLDPPEAEVQIDRLITGRLQSLQTYVTQQLIRAAEIRASANLAATKMSECVLGQSKRVDFCGKGYQLMSFPQSAPHGVVFLNVTYVPAQEKNFTTAPAICNEGKAHFPREGVFVSNGTNWFITQRNFYEPQIITTDNTFVSGSCDVVIGIVNNTVYDPLQPELDSGGSGYIPEAPRDGQAYVRKDGEWVLLSTFL
